United States Patent Application Publication US 2025/0130221 A1 - sequence listing, part 5

SEQ ID NO: 361 - DNA, 169591 bp, Homo sapiens
  source 1..169591: mol_type = genomic DNA; note = NC_000006.12:c116100739-115931149 FRK [organism=Homo sapiens] [GeneID=2444] [chromosome=6]
ctcgcgcggcgggcgtcctgcgccgcccggagtcaggtagtcagctcgcgtcctcctggtaccccaatgccggcgactcctgatctgttccgcaagcctaggagcccagaaggcagtaggggtccaggagcggtgccgctgctgcacagctgagacctgtaggcacgtagcctttcccgagggctaccacaaaattaaccgggacactccatcgcctcagggcgcctcggaaaccaggagatcatgaggttagacctgaccttttacccctgtgtgaggaatagtaagatcatagaaaaaattcatccgctaatatccctctgacccagttagcctacaatttggaaggtcttttcacccacgtgatctttgatagtggtttaaaccaaaaactttatattccttggtttcctaagtggttaagtggaagacagacctttcactatttcataccctggagtgcgttagaaaataaatgtatcagacatcgtgaagaaccattttgcaagatgatacttgttatggaaaccaatattggttattacttgataatcctattttgttattgtaatgaattttttatgaaagggcatcagaaacttcatagaaatatatagagcatactacaaaaaacttttgcaaaccgggtttaaggtttatagagcacaaaatgttttgagtgacatttgcttaattctctcaagaactgtataactactaccattttagatgcagagaaagttaatccattacatacaatgtatgccttagggcatttaattctcttcctgatttccggatgtgaaggactagcactttgagatctttattacatagtacctcattttaaaaagaaaatacaaatctattatgtttacactgcttcagttctcaatttaaaggaacaatgtgtctaatgggacaaatcaatagtcgtgacataatgaaaatataattgattgagaactgcatttaaccctttcaaatactaatccttctgaggctaatagaccaatcagaggattaatttagtgcaatagatagtacaattgagtaggaggacacttatacctagtagacccatttgaataaaattgataacttgttccattataacacttaaaagccccaaacaaatctctctggaataggaaaagtaaagaatcttcaagaagattaagctgttcactgatgagtccaacaatcatgttttcaatgtctgtgaaccaaaagagaaaaggctggattgttggagaggctggaaaaagcttgttggccctggagcattgaccttggcattctcctctgcaccttgcaatagaatgctaccaaagtcaaacttccaggtgcatgccacattgaagggcacatgtttccttggggaatatcttgtttcatgtgggagtaggtgctttaggtactttagggacttcccttagtaatacaaatgtactagtacattcattgtaagagggaagagtataaaaggattgttttttgttgacttagcaaaaacttctccttacaaaacctcttgagtgtgctgaattgtgaacaggaaattgacttggggtaaggggagagagggaaccagggcactcttaaagagaaaaagacccctgggtcgataaccaagtggtcctgggactggatctggctattacatgcacatcaacaatcttatgtacttgctgattaacaaattatatatattctgcatgtttgcacaaacagttcttgtgctagagagtccacatcatttaaactttgtgggagaattttgcaaatgatccaatcctagaggcttgtactctttcttgagccccactcacctttcctttgtacctcaaacctcagtctgactcttccagaaatataggggatggttcccttctcttctcccattccctacataaccctgagtttaaatacaaacactcagtttaattgtttcataaggcttatttttggataaagatatttcattttccctgcacattaaacttttatcacacttactgataaaatgccacagctcttgtattatcaactacaagttcagtcttctacttagataccaattaatttctgtttctttgagtatcatggactgaattttgtcccccactcattcatgtgttgaagacctaacccacaatgtgtttatatttgacatagggcctttaaggaagtaattaatgttaaataaggccataagggtggagccctaatccaacaggattagcattcttgtaagaagaggaaggggcaccagagttttcaagcacacaagaaaggccatgtgaggagccacaaaaccacggctgtctgcctggcgtcgtggcacacacctgtaatcccagcactttgggaggccaaagtaggcagatcgcttgaggtaaggagttcaagaccagcttgggcaacatagcgagacccatctctagaaaaaatacaaaaattagcagggtatggtggcaggcacctatagtcctagctgttgtaggggctggggtgggaggatcgcttgaacctgggaggcagaggttgcagtgggctggaatcaggccatcgcactccagcctgggtgacagagagagaccctgtcttttaaaaaaaaaaaaaaaaaaaaaaaaaaagctgtctgtaagccaaggagagtggcttcaccagaaaccaaccctgacagcgccttgatcttggactttgagcctccagaactgtgagaaaataattttttgttgtctaaaccccattgtgtggtattctgttaaggcacgctgagccaactaaggcagttaataaggataattgactcaaatcagtgttgtgttaaatgtaggaaatatttgccatttgaaaggtctgtaaaggacatgaacttgggtttatgttatttgttgacttcttgaagttgggtacttttgcttatgtgtaacattaataccatgctgtgaagttttagagtttttttgtttttagtatttcatgtactgttttttcttatacttatgagttatgtaataatttagaaatattcagaaacaggaagttatattacagccgattttctagaattaaatttcattattacaattgatctgcttttaattgaggtggtactataatttagcaattttaaccttaggtgtgacttgtgattagctagcttaagctttagactctataatatctcaataactgatcttttgtgaatttataatactttattttaacatctatattgtaaatatgatttgccatacatttttgggaaggagggaaatggcctgtttcttttttcattagtttaaaatatgcttttctaaatattcctaattaaacattgtatgttcaactttttgtataacctaagccaatctacatatcttctgtggcacatataattctttaaggggtaagaaaaaagttcatttactaaattggaaaaaaataggaaaaatatgaatttctaaaaataaaactctatggcacttaaatattagacatttagctacatagaaccaaatacttatttgtaatattatgctgaggcctttagatggcagtagtcctgcatgaggaatattttttatttttttttagtaatcttaaaatctttacatttcttaataaaaaatacttcattttctactctcttgattttctactctgttcttaccacaagaagaagaagcctacttagaaatttcactgtggttttttggtgtgtgaatttattttcgatgatggagagggaggacgtaatgggacaaagtccttttgtgtccgtagttggttccttccagggggttcttggtctcactgactttaagaatgaagccgtggacctttgtggtgagtgttacagctcttaaaggtggcatggacccaaagagtgagcagaagcaagatttattgtgaagagcgaaagaacaaagcttccacagcatggaagaggacctgagtgggttgccgctgctggctggagtggacagcttttattcccttatttgtccctgcacacgtcctgctgattggtccattttacagagcgctgattggtccattttatagagtgctgattggtccattttacagagtgctgattggtgcatttacaatcctttagctagacacagagtgctcattggtgcatttttgcagagtgctgattggcacatttacaatcctttaggtagacacagagtgctgattggtgcgtttttacagagtgctgattggcgtgtttacagtcttttagctagacacagagtgctgattggtgtgtttttacagagtgctgattagtgcatttacaatcctttagttagacacagagtattgattggtacatttacaatcctttagctagacacaaaaaatccccactcgacccacaaagtacagctggcttcacctctcaatctctcctctaaacaggacaccccaactgctgttgggaattgggcgatgaccattctagctacttcctgtgggataggggcaaagaaggggccctacagttgtactgtcctctagaggggaactctttaggccagtcaaagggccagtgggtttgtccacgggtcctcggtagaagttgttagttgagctcatttgtggttccatttgtaagaccatctgtagcttgatggccgtgatcctagaggaaccaaatttgacaaggaggttaaaaataaagggcctgaaggcgagtaatggcaagatggctgtcatgggacctagaaaggggagaagtcatgtcacccaattccagaggttggtataagagtttgaaaggcattgtctgatatcagaagccttttcctataaatgctgggcggcatctcatactgtccctgactggttagtgtaaaagcaacactcttcccctaagaagctgcaaagtcctcctttctcagcagtgaagaggtctaggccttggcagttttggagagtcactgctgccaaagagtctatttgggattgtagttactatccttactggatagattttgttatttcttgcaaattgtttgagaaatcctttgagagtgtgtggtagtaggatcatgaagtagataaacctgctattctgcttcctgtagcagtggccatttctaaccctataagtaggggtattagttgcatgaccctgcactgatggacttgagctttgaggggcactgatagggtatgatgtccataagattagacgttaggataatacatgttacactgttaacttttagcaaactttacttttgttgaaaaccttgtaagtttgggattttaatttttctttgctattaataaaacctctttcagtccatattaacttagaattgatatagatggctccttcctgattctgtaaatactttaaggtttggctgagtgcaagcaactcccatgtttgagcagaccaattattaggcaattttcctaactctgcttctataaagagttcccttatcacttactgaatacccatggtgtcgttttcccttaatcacctaggaggaaccatctattgtcctgtcttgaagggagttcttcctaggtctggttggacctttggatggtaattaattaagatttagatcccctgttaggaaacctgctggattaaggatttttgatagaaaggctacgggttgtcagtggcctcagtattttcggcctatgcccttgtttacactgacaacaaggtagtattggagtgttatagggttatagagaagaccttcaattatcaattataggttttaaatttaccctggcttttaaaggaatatggtacgctgttttttctttactacttccatctctctttctttctctttgacttctttgtctctttctctctttcttactccctgtctatctcttcctctctttgactttctgtctctctttctctctgattccctctttgtctctgtctcttcccctctcttcttctctttctctgactttctgtctctttctctctttcctttctgctggtctttccctgtctctgccagatgcttatgctgctgttctcccctctccttccccttttgacggctttggtagtgtaagactgccacctctttgggtttttgcactgcgtgcaataactccatggtttccttgtgatatttaatggaagttcccctaaaggttaggaactccctttttttccatattgcagcgtgagcatgtaggattagataagcatacttactatctgtagcaaagtctaccaattacaactgagaaggtgggagaaatacctggttacaggccgtcccaggattccttggatggtaatggaccttgaggcagctgtccgggacaggacactgagaaagccacgccagtgtccaggaggaagtcaattttctggcccttaatggttaaatgtacccggggctcagtgagggttatgacatgagctggcgcttgccccgggcaccctcagtcctgttattggatcatcttgttgggggattctggtccagagaacctttgtcccctggggcagtgcaccttccagtgattgcctcggcatagtggacatgagcgagggggcagcttgtttcttgttggacagtatttttaaggtatccttgaaaaccacacttgtaacaagccctactgggtgactggcctgcttcattttctgtcctttctgaaacaccaaggtttgtttgtctgagggccatgactaaggctgcggcctttctcttatcttgcttttccttttcagcctgttccttttggtccctattatagaacactgaggttgccaggtttaataatgcctccagattttgttcagggcccagggctcactttagctttctcctgatatctgtggctgattgggtaataaacttattttttaggatcaattgaacctcaagtgagtcaggtgacaggggagtgtattttcttaaggcctcccatagccacttgaggaaggcaggattttcttcctttccctgagttatggtggacatcattgcataattcatttttcctaattctccttagtccttctagaacacaggtcaacaaatgtttgcaactccagtccccatgatctgagtcaaggtcccagtggggatccatactggggatggcttgctgaccagtagggaatttgtccctttcttcagctgtcattctgtcatttacttgactaagataccaggtatctccaaactctcggactgcagctaaagcattcttttcattaaaggccagggtttgatctaacaatagcatgacatctttccaagtgagatcaaaggtttgccctagaccctgtaggacatctatgtacctatcaggatcatctgaaaacttccccaggtctaccttgatctgctttaaatcagagagggagaaggggacatgtacctgggttgggccaaattcccctccccctacagcttgaaggggacataactgatagcccgggggtttttttggtctcttggagatttctttgcttatttccttctgggcaggggagattggaggaggcttatcattaataggaaggggagctatagggaggctaggctatgggggtaagctgagaggtcctcctgtgggatgtaaattgcaagctttgcatagttgtggattcaccttcaatgaaaagaaagcttggacataaggtatttcactccgtttgccttccctcttacagcaaaggtcaagctgcaggatagtattgttatttatacctccctcaggtggccatttttccctatcagagagagaatattgggaccaggcaatagtgcagaaaaaaatgagctgcctctttttcagggtttgtgggtcaaattggtcccaatggcttaggatgcatttcaaggatgagcctgttgatgactgagtgtttcccatgtgaaagaaaaatctgcccatgattttggtttgtttgttttcctgctgctacccaagaactcgcaacggtccccagaccctgctgatcggaatagttgcactcaccgacgcagcagcagaaacccttcttgctcaagaacccacaacggtccctggaccctgttgatcagaatagttgtgctcactgacgcagcagcagaaacactagttttcctcctacaccacagggaggaccgaggaaggtcggatttagtggcccttactgatgctttcttgaaaacctgcacctttgcctgtcctcctagaccacaaagaggaccgagaaaaattggatttagtggctcttaccgatgcattctcaaaaacctgttagagtcctaagcattctcctgttagtattgggaccttaccactgtcctataaagatgttatgccccaaaaatgaagtggagggccataccctgagggagggaagggatctccagggttggaagagtgacgccttttgtcctacttctcatcatatggataggaaggatatcatttctgagactccccatatcctagcttcaggaatagcttttgttaggccttctagtctgaggggagatcctaaaattccagatagtccccacccgacagggctttgggcaaaaattatgcctctgattggtaagcccaggtgcctaaagaaggtaacagagtcctgaagtttatactagaaatcattcttataggagaaactagaaaagcaccagagacagggagtggtttttagaagtgggactagcctcggagaatggaggtaagaggaagcttgtctgactggcattaggacccaagaggcgagggtcaggctagataggatagatgggcaagtttcgcttgggtgacatgactttgaaagttccacacatggctacagggtcaaccaactttttgtctggaccccagagctgaatggctttcctctccgtcgaccctcggctcagcccagaagtacaggaaaagtggaagctggttccaggcaaaccaatgctcccaactccaaagagccgggggttgtcagagagccctttcccagaaaccctgacacccctgtcttcagtctgacggccacactagtctcttttaactggccaacagttgcctggtgtttagcccccgaattctaaggaaaaataggacagaatagcaagcgaaaggggtccgatggtactcactgcttggtgataggcaatagtcccttcatggttgccaaaatgtgtctggagttggttccttccggtgggttcttggtctcactgacttcaagaatgaagcctcggaccttcgcggtgagtgttagagctcttaaaggtggcgcagacccaaagagcgagcagaagcaagatttattgtgaagagcgaaagaacaaagcttccacagcatggaaggggacccaagcaggctgccgctgctggctggggtggccagcttttattcccttatttgtccccacccatgtcctgctgattggtccattttacagagtgctgatagtgcatttacaatcctttagctagacacagagctctgattgctgtgtttttacagagtgctgattggtgcatttacaatcctttagctagacacagagtgctgattggtacatttacaatcctttagctagacacaaaaaatctccaagtccccacatgacccaggaagtccaactggcttcacctctcacttttgtaggaaacttcttacaaagattgtgtctagattttaaaaaatgtttagaatatgaaatgaattcctcttggatagatattaagtggcaggattacaattttaaaaaaatctcaaatggtagagcaatgaaatgaaatttaattaaatgttaagttttgctttaaggttcaaataatcaactttaatgatatatgatagggaatgttgatttgccagcagctgagatggaaatacaatatggataaactcaaggtaagctcagctagttccaggttaaacttaatgtctctttgactgtcactttataatacctctctttgactttggctgttcttttgggggtgtggggcttctaaattgcagaagggctaacatactattgagaggtctggggagagaattttgatccttggttaatggcatccatatgcatggcttttcctggactagaccatccctggtgattttaggttgcctctagacacattgtctgtaaccaccactgctgtataaactttaaaacacttcagttacagtgttgtctaaaacatgtttagttttgactcaaaccatgcggccatttcaggcctgcctctccacactcagccaacctctgtatttatcttgcaatcacaggaaacctttggttttggaaccacagaaaaagaagatgtatgtactatgatgggggaaggtgaggtcaccacctcagaccctgtctctagatgtgacccactgttcctattctaatcactgtcccgtatcatcacattacaccctgcaaagctgttttctctcagaattctaaatgcaaatcaggacctagttttctctgctttgggacccccaaactcatgttgggggtgctgttgtttcctgtgcaagggatttaaccttgcagtggaacagagtgtaggacccatgacacgactcattatcatgctcttcatcctgtttatctgagactaacattcacagataaaatacaaaatgcccaattaaatttgaatgccccaaattttgtggaacttcttaatgctaaaaaattatttgtttatctgaaattcaaatttatctgaaattcaaatttaaattgatattctatatttttatttgctaaatctggcattgtgagacagggactcaatatccttttgcaacaaactttttggaaacatttttgtaattagtattttttttttccttcagaagtaaagtcaaatgtgccttggggtttgttataggcggaaatgtgtccgtccaaaagtcatattttaaagctctaaccctcagtatttcagaatgtgatgatacttggtgatagggcctttgaagaggtgattaagttaacatgaggctttaaggtgggcccagatccaatctgtctgttgtccttataagaagagaaaattagacacataaagatacagcagagatgcacaaacaaagagtgtgtgaggacacagtgagaaagaaaagtcatgtgaagccacagtgagaaggcagccgtctacaagacaaaacaggcctcagaagaaaccaagcctgctgacaccttgatcttggacttccagcctccagaactgtaagaaatacatgtccgttattcaagccacccaatctgtggcatattgttatggcagccctagcaaactaatacagcattcaagactatttatttactattagagtctagagttcattttgggaaacaaaactaagaattgtctctcttttctgctctagaagatcttccttttagggctgggctgagaaaactattgctgctttctgagtggggggaaatttgaagcaaagatatctcagtcaatatcttaatgttatgcagcatgagcaaaatctataaacaaagatataatggaagcatttaagccaagcctttttatctagggattggtgtctctgagggattatgggaaatttgtgagatagttttggagtgtggtcagcattttgatggtaatagcagtataaataatatgtaagaagactgaaatggttcttacactcatgtctgtcctttcctcttttgcctcatgtattgattccaatttttcaaatatctaggtgagttaaatttttgattatttaagggtatgccaaatatgaacatatttcaggaatcccttataaactgtgatccagtcaatgtggggctccccatggctcagtcttaagtgcataacttctttgtcttcagacctcttgggcacctttcagtcagttaactcagaaagtgtttactttcatgacttaactgactgaaagcatccaaggagagctaatcatattaaaaaaccaatcaatcattcattcataaattattattgaatttgtcagacattgtccctggctttgcttgctctgagcaccagaatcacatctgcaatattagctagacttgagaaattgaactacgaccatacataagaagaaaccttgaaccagggatgttagcaaggtgctaaatattttagctgaaaatgacatagtacatatcacatactctgtagtgtacaattatatgtgtgtacatatgcaacaaaatataaatgttatttggtgagattatgacatttgttttcaacttccttgcccttaagaaatcagaggaaatgtttttggggtaagagaatgctcttaggtcaggctttctcttcttccagggttagcttgttttatagttcttgtcctataccattgtgcactgaggtattgagttctcatgtctgttttttttattactatttgcagaaaatttataatttctcaaaagttactttactgcatctttctcatggatgggttgccctaaaagcagagcctgtgacaaggacttggctgcaggtggtatgttaggagatgatcccaggaataaacagtaaattaatggagagagagtaagccagtaacaataccaaaaagcaacatcaagatcactgttgtaggcaacggtggttcaattctgctggcatgtcccatgaaacacagaggatacttcctggaattgtccactggaaggaggagaggctgagtgtttacccgctggctcctgttgtcatgattgagggttatccactcaccaactttcaggccgtgcttgtacttgggctcctatggcctcagagaaggcccttgggcacaaaggagaaagaccttgcagagctctgttgaggtgggtcattgctagtgtgctgtaagtctgtacttacatgaaaatgagcatgtatgagctgtggttgaaatcaaaagtgggctaaggggatgtgaaacagagtaccagtgccatctgctacagtggccattcttgtaaaagctcattcacttcagtatagtccacaaaatttattccaatctataagaattaggctgggaatggtgtctccatctgttggccagtctgtctctaaccccctgttccttctgtatcttctctttctgttccatctgtgggctactctgtattctctgccccaaggcaaagtaatacaactcagtggaaattaccataaatagtttagtgctttccaaacgtgttcgtgtcatgactcacatagaaaatggtgaagtttatttagcatgctggaacacacagaaaaagctggtccagttaggtggggcagcttaggctttggggttactctagggtgcagagggcagggctgatcaatattgtagcataaatataacctggtatgtgttgggtacattggttgaaatattttattgaataaacttctatttttttctttttaaatgctagtaaactcttggcttcttacttctcagttcagtttagcaaatgtttattgagaatatactgcgtgccaggcactatggtagctaccataaaaatatagacaaagtaagtaccttgcctagagggccctgcggtttagagaaagagatggcacataacctgataactacaataaaacaatgtgtataaaataaagaggagacgttattttggcaatgcttctttcattcatgctgcgcgctctgctcaaaatattttttctcccttgatttcctgacttccattcccatgcaggatatctcccacattacctttagaaacgacatcaagtattttgtctagctgcaggaacctgaagttatctttacatctttttgtggtattataacctgttttcatgtcagtcttctcctccagctctaagttatttcagatggggacttcgtcttgttcacttttgtgtctcagtgcctagcacacaacctggcacataatatccattgaatgaatgaatgaattcccatttattcattttcatcttttcagttgtgaagttatcaatggctgcaaagaagcttttattcagaggccataggcacccatatttcactgaaactctgaatcccatgtccttagtaatcaattaatcacagatttagaataaagatttcagttgcttggagccaatttcaggaaatgttctgacaaccattaatttttcgttctgtcaaatactagtatcagtgcatgagctactacttttaatttgacctttggtagaccatttcccacaccaagaactgatgggcagactatataaataattacagcataaagacagcctaagctaacattttaggaaactgagaatgagcttacccagcagcacttactttttaaatagtacatcacatagaaaaatacttattttaggaacttaggtttatggattttatcatgagattcatagtgttcccttagttcctattaatagatttttatctatattgagataatactacctactaaattctcttcattgtgacttttgactgttggaaaatagtactttttgtcccctgcgacttgtttttaaagctgtatttttaaaatgtcatttggaaatacaaacaattagccgggcatggtggtgggtacctgtagtccaagctactcgggaggctgaggcaggagaatggcgtgaactcgggaggcggagcttacagtgagcagagatcatgccactgcactccagcctgggcgacagtgtgagactctgtctcaaaaaaaaaaaaaagtcatttggacattcaaacggtaatgagaatggttgaataaatgctgcttacagcttacaatggaagtgtcaatgtatgtgtaatttattgttactactattctcttctggaaattagccaggtaattgttatataaacaaaaacatgtccattttctttcttccttttcatctcaaaatctgagagtactccaaggagaatacaaaagtgctacagaatctccgtgttcatatgtaaccttctctgtaccatctctccctctctctctgtggcatgcacacacacacacacacacccacacacacacggcctgtgcatgtggtgcatgtggtgatggggggatttgtcagtgggtagagaaatagaaaacattcttgagctccttctaatatgccagacattgtattaagaacagtagataattacctcactcatcgtaacagcatggaaataggtaaatgcacactcattttacaaatataattcaaattccaatgtttgtgacaagaagttcaacacttttgctttcttacttgaaccttttctttagactaagtcatttatgcataatacatatgtgttatgaaacaacaaaaaagagaagcaaatagatttaaaatgaaaatcccctttcactacttcacacatttatcatcattattattcccagaagtaactgctgatagcagttgagtgaatgtccttaaagatctattccaacacacaaaatacagatatgtatgcggtatgtaccaacctatcctagtcatccctcaactccccacacttcccatttctttaaaattttagctcctacttcattgtattttttccatcctacttatttcttaatttttaatgattctaatactctaggctctcaattcctttaacttctgtgatgttcttgtcacccacacaacctcagccacgctttcacacatccttcataatttcaaagcaggcataccactctcttaactgcccccttctatctttcccactcatgttctcaagtatcctaccccaacaatccttagaggccactggtatctaaaatctaatgaaccccacttccttttcactgtgtccttcactgccattatcttatcacttctttttgcaaagctatgaatattcatagagaatcattataatcacttcattgatatatcctaatttgatattcctctctcacctctttgtattcctagaaaaaaccacaatcaaaattaggcataattattcctttccctgtatccatgccccttacaatacaactttgcaacacttctcatcaaggcaaagaatctgtttctctccatcttaaatatgatctagctttgtgacctgttttggccaataacatcaagtggaaagtgacatcttgcctgttctgagtctgagtcacaagaggccatgaggaattccacagtattttgggaattctgctacagctatttgaataaggctgaactagactgctaggagatgattattacagtcaccccagtcatcacagcctgtaatcactgatctgccagacatgtgagcaaagccatctgaaaacagtcagtccccagctgaactgtgaaccgactgcagaccatgaatgagtccagccatgatcatccaagcctggtccagatcaatatgactaccaactgaccttagactcctgagtaataataaatactattttaaaccaccgagttttggggttacttgtgtagcaatacttatacacattggttatcttcttttggttaacagatgtataagtttgactctttttattgtctgcattcacacttgagcaactgatcctgcctaaagaaaatatatataaccattcgatgagtagttagtgctagtgggtaatcatattttattgccttggtgcatttgctttgctggtatcctagcaattatttcatatttttcctttcatcaaactgctaccaccttcaccctcatcttcactctcagatattgaccgaacttttatttttctgtgaatatataagcagtcaaaaaagcttccttagggctaagcactgtggctcatgcctgtaatcccagtgctttgggaggccaaggtgggacaatcacttgagtctaggaatttgagaccagcctgggcaacataatgaggcctcatctatccaaaaaaaaaaaaaaattagctgggcatggtggctcccacatactcaggaggctgatgtgggaggatcactccagcccagtagtttgagtttgcagtaaactatgattgttactataggcagtggttcttatcttgtggttcctagcagtagtacctgggaacttgttagaaacaaatttttgggtcccactcgagaaatactgaatcagaaactctggaggtcgggcccagcaatctgtactttaataaaacctctagatgattccaatgtatattagaatttgagaatcattgctataaattatctgcatttttaggtaaagctaacccttcacttaggcactagacttatgcatcctctcaaaaatactgcttcccccctcctctgatgatattttttatttccgctaaatcattctcaccatcatacaaacatgctgttaattttctcatcttaaaacaaaacaaagctttttttttcccatgcaaacttgcttctctgctcccctttgatgaaaactgattgaaatagttgtttgtctcactgtttgcaatctgttttcgctcccattctctcttaagcacatgaaggtgaactttgcccttcaatattccacaaaaactgtagagtcactgacgttatttatttgctaaacccaatggtcaatcctcagtattattttattttattttatccatgaccgtcatttgacagagttgatctctccctccttggtaaacgcctttgggcttataggaaccctactccttcttcattgactgatccttctcagtctcctttgctggttcttcctcatcttcttgatgtctaaacttctgcgttccttgaacttcctcatcttcttgatgtcttgatggttccttgtcttcttgatgtctaaacatctctgttcctttccctccccttccttctgcctcctattttctcttctttaaatctgatctgatgacttaaaagatatatctatactttgaaaactccaacatttttattccttgccttgacctctcttctgaatttaggtttatagatctagttgtccacttgacatctccatttggagatctaatagacctcttaagctctactgtctaaaagtgacctaatttttcctccaaaacctgctgtatccatagtctttcctgagctagttaatagaaactctatgttttccagtttgtcagacaaaaatgcttggagccattctttattcctttcttgctcttacatctcacatctaattcatgatcaaatgctgcacctccactttaaacatatatccagaatctagccatttctaacttcactgcttggatccaggtggttacactgcttcactgctaccacctggatccaagtcaccaccatttccagcctggaatattgcaatagcccctaactggtcctcctacttctaccctcatccctctccatcccaattctgtccttagcccaaggcagagagcttctttaagcataaaatagattttgccttctgtttatatccttccagtggcttttagcctcactcagaatcgagtctaaggtcatcatggtgcaacaaggtgtacactgtcaggtctctgttaccctttcttatctcttactatatcttttctctcactctgctacaatcaaaccagccttctttctattcctcaaatatgcggtacaagctcccccttcagagatctttcagcggtttatcactctgcctagaatgctcttttcctagatatctgtgtaacttctttatatttttgcttaaattataccctcttgggtgattagatttcaaatttcccacacaccatttatctttgctgtgctctcccttagtacttaaccatcttctaatagagcatgttattgatttattatgattattgtttattattattctctcccctcccactataatgtaaatctccatgaggacagaaatttttctttttggtgtgtgcctatgctgaagttccagcatctagaacagcatatgatgcataatagggattcaattaaaacacttgattaatgtgtagatatttgctgttttctcttaataatatcagttgacccataacaagtgctcagtaagtgtaaccattattattattattgttatcttttatgtctgtggaatatatatatatatatatttttatatggagttgcactctgctgcctaggttggagtgcagtggcatggtctcgggtcacagcaacctctgcctcccaggctcaagcaattctcctgcctcagcctcctgagtagctaggattacaggcacccacaaccacacccggctaatttttgtatttttattagagacagggttttcaccatgttggccaggctggtctgaaactcctgacctcaggtgatccgcccaccttggcctcccaaagtgctgggattacaggcgtgagccactgcacctggcctatagaatcattttttacaagtggaattatgggatcaaacagaatgtatatcataaatagtgacaaattgctctccaaaacgatggtactgatttgcacctccacaaaaagtgtttgaagatatctggtatggtttggctgtgtctccactgaaatctcatcttgaactgttgctcccataatccctgcatgttgtgggaggcacccagtggaaggtaattgaatcatgggggcaggtttttcctatgctgttctcgagatagtgaataagtctcttgagatctgatggttttataaaagggcagtttccctgcaatgctgtcttgtctgccaccatgtaggacatgactttgctcctcctttgccttccaccttgattgtgaggcctccccagccatgctgaacagtgagtcaattaaacctctttcctttataaattacccagtcttgggtatgtctttattagcagcatgagaacagactaatacaacatctattttctcacatccatatcaaaatggatattatcaatatttatattttttgtcaatcaagggcaaacaatagatctcattgtagtgttaatttgcatttctctcattattaatgactttgagcatatgctatatgcttagaagtccttctatgtttctttgcctatgaattgtctgttcatatctcttgctcattttcttatgggttatttcttttttctctaacgtgtggaaagttttcatatggtataaatattaatccattgtctattttctagactgcaattattttcaactttgtgttgtagctttccttgtggtattatataaatgtggtatgttatagaagtttaacatttttgcgtaggcaaatctgccagatgttgggttcaaggcttctgggtttcatacttaaaaaggcttttttggcccagtgcaatggctcacgcctgtaatcctagcactttgggagtctgaggtgggtggatcatgaggtcaggagattgagaccatcctggctaacatggtgaaaccccatctctactaaaaatacaaaaattagccaggtgtggtggcaggtgcctgtagtcccagctactcaggaggttgaggcaggataattgcttgaacctgggattcggaggttgcagtgagccgcaatcatgccactgtactccaacctggtgaccatctcaaaaacaaacaaacaaacaaaaaggctttttctctacctagattttaaaaacatttttcttatattttcttctaatgttttatgctatcgttgcattatacttttaatctaactcaaatacttttattataaaaaaagtacatattcacattactatttttaacggatagtcaattgggtcaatataccctttatttaataggtcttctttttctcattgattacattttaattattcattttgagctgaggtagggtaaaggtaacataagatactattttcataatcttagaataagaagagagttgttatggccaaggagagtggctcacacctgtaatcccagcagtttggaaggctgaggcagaattgtttgaactcaggagtttgagaccagcctgggcaacatagtaagaccctgtctctacaaaaaattaaaaaattagcatgtgtctgtagtcccatctgctcagggcacacagtgggagggtcattttagcccagaaggtcaaggctgcagtgagccatgaccgtgccactgcactccagcttgggtgacagagcaagattctgtctcaaaaaagaagagatttattaaacaatataataaatattatccataaaaaacattttaaatgtacctacaatgaaattaagttttctttttattaaaagacacaactaagatagtgaagaagtaagcctcaaagaagaaatgtgtgttttcaacatgcataactgataaagagcccttatccagaaagaactctgaaaaaaaaaacaaaaaacccaatgcagaaataggcaaaagacctgaatcaaagaagaggacatataaatagaatacaaattaagatgcccaatatcactggaaaccagaaaaatgaagattaagatcttcagggaactattactataatccatcagattggcaaaaattaaaagtctgataattcaagtcaggcaaagatgtggagcaagaggaactcttatgaataatctctttggtaatatctagtatagatgcctataatctactactcagcaatttcaccgctagagagagaaatgtgcacattgcgctccagaaaatgtgtgcatgtagatttatagcattgttcaaaatggccccaaaccgcaaataacccaaaagtgcatcccaacagaatacacagttatagaatatccacacaaagttacaatacacagcaatgaaaaggaatggacttttgatatgttacaaactagatgaatcttaatgtcataatgctaagcaaaaggggccagagacaacagaacggtaactgtatgaacaaaaatgtaggcaaaattaaactatgcttttagggatggttaattctgttgtgaaacaataaaaaaatgaaaggaagttgaattctgtaaaagtcaggaaagtgtttggcactgggagaggtagacagagctatgatccagacggtcctgcagggggcttttagtgtgtcaataatgttttgtttctttatctgtgttataatacatgagcacgcatctgacaacttgttaagctatatgtttaagtttatgcactcttctgtatgttagctctatctcacaattttgaaaatttaacaaaacaaggtatttatttcacatggggtgttttgagaattaaaacaactaacactacccctgaccccattaaaacaaacaaaccaaccccttaacatacattagctattaggagtctatgtgtccatcccaagctctttagggacctcagatatctaataactggacactaggctagttagactcattttcccagattggtcaagggacattagaagaaaaacaggactgttcccaggagactattgtattgtctttagtcctagtaataaaaaacaatattatccaacaagttaaacacctctaacaaatcctcccacgttcataactgctgtccagaagttgggacactactcctgagtaaagaagtcattttgttcattttcattttcaaatgtttatttatttatttatgaaatggagttttgctcttgttgcccaggctggagtgcaatggtgcgatctcagctcactgcaaccttcgcttcccaggttcaagcaattctcctgcctcagcctccagagtagctgggattacagccacctgctaccatgccctgctaatttttgtgtttttagtagagatggggtttcaccatgttggccaggctggtcttgaacttctgacctcacgtgatctgcctgccttggcctcccaaagtgctgggattacaggcatgagccactgcacctggccaattttcagatgtttagactgtcttgtaagacatgtcaacatccagttgcataactgctgtatagtattagttgatctggcagggttggaacaaataaaggagtctggtcataggcatgatgacatcgagatctataataaagcaaaggagagtctccattttctctgaaagaaagaagcacaagctttctccagtacctagatagtccctggaatttaggaaatattcaaaaaactgttcaatgagtaaggtaatgtacacatgaatatgtgatcaagaaagaaattaagggtaattacagtttaaataaatcagaggagagaagccatattttagagaaagatcacactgaattagcaccgtgcatgtatctgcaaggatcaaattacaaatttgaatgagttgggtggggagctataggatttaaagtccactttacctgaggagcagctgaagtcaactgtaatttttgtgaaaggaaaagcaaccctgggcccatcaaggtggggaagggctggtgtcttagggtgcattttcacaggcacagctaagccctatgtgaaatattccttccacaacatcataaaggaatgaagccttcggcattggatgcattgggaactaattcctgcttggttcttgatgtgtgacttcagtaaataacctaaagcctctgtttttctattttgttataaagctgactgacagtaactacattacaggtaaaaacatgtaaaatggagtttgtaatgtacctctatttctatatgaattacttcattaatctaaatgtggtaggaacttacaactttttgattttcatttctttcatcttttggatagtcaatctgatatatgaatacttcggaattatctttgggcaactgaaaatgtttatgaattgggagatggatttttcaagataatgcagatagagtacaataaaaataatctataacgttatcacccttctttccttgatctggtaaacacctttcttggacaagttcagattcaaactgatagcaaagtgaaaggcattgttactattattattttaacttagagaatcagtgcatagggcactcatggaacaacagaagtataaacaccgcctgggtctgcatggccatttgtgcagccagctcactgcaccaccttagtcaaagaaaaacacatgagaattggttggaaatgtgtgacccttgagcagttaagctcacttatcagctttcatcctcaaaataagtgcaacaatgatattagacatgtctgtcattgaccaatcaggaacaattcagcaaggtgtttataagctatttcataccctttgcttccttatcattgctatacttttacaagggctgaaatggatgaaaaaaataataatttctcatttgttataaaaagatagcaaaaatctaatggtgaaatcatttttaaaatcaagaaaatgactcaatagttgaaattaaaatatgtgaaatacaaaaggaagtgtggtccaatagaaaaggatactttcaaataatttaaagaaaataaatcattttgaactttgctgtttagtattttatatttgcataaataaatttgatatacattgcatatatatgacatccatcataacatactgtaagaaaaaaatgaataatttcctttaaataatttcagaaaaatcttttatcatctggcaatcatcatataaacttttggtgagagttctcatacagaaacagatatgcaagacacttagaaaatggacatttataaacgaagtgactcaatttaaaatacttaaaacaagaagagcactaagaaaacaataatgaagatgaggatgagaaattctgtgttgcagaaggaatttccaggaagaagtcaatgtcaaggtatgcaaggaatcaatgttaaggagagttgatatgtgccaaaattttacatttatcatctcattaaatttttgtgttctacagtctacaggccctgcagatctcatccctctatctttcattgtcacctcttgtcactctcctcactttgttcagtccagccttaacagccttctttgagcacctgtaaagtgtagggctcagaatttatgccacttgccaaggtcacacagctagcaaaggaccgtaatatcatcctggtattatttcatccctttactccttaattgtgggtggtggtggggcacttttttattgttaaaaacagagccaaagactgaggtctaggtctctagggaaaggagggcacaaaagaaccccaatgaagagcgttaatttctcacctgagtttaaaagtgggcctttgatcctttgactgaaacaatcatcttaaaatgaaaagtctttgtaccaacttctgggaggaaaaaaagttccaggttttttttttttttttttcccccagctcttaagcttacatttgcataatcacaccaaaatcaaaaatactattagcttttttgggggcttactttgtgtcaaaattttcgtaagccttttatacctattaactcatataatcttcacaatgatccatatggtgtagatactataattatccctatttttgcagatgaggacttgggcataagaagtttaaaaagaaatacttactcacagtcacataaatagaaagtaattatagagaagccaaagcctgggacctagcatagaatctgttcatgattcacagtggagaaagagtggatggtgacatgtaagaactggtttctcttccaaaaggagagaagagttcaacaagcaagtgggaaaaagagaatcagaggggccttggtgagagctgaaaacccccttggatgattgaaatgaccctaatctctgcccttctccttctctctgagcactcacaagggagggggaatcggataggtcccagagcagtatatattgctgcctggcttcccagattgtaaccctaggaggccataatgtcaaggcataaagtcaaagggaacacagcatggcacaacagagggacaggcatgacatagaaaactaagggcagcccctcagattctcttgtgccctggtatggcactggagagcattaggaagtttttcacatcccttcatagggctgtgatgtaggttggctgagggccacagatgagaagtggacctgggatggtacaaagggaattagactcctcccgtctgacttctatgcaaagaaataatctcaagacaagtttttggtataggctttgatatatatggatggtcctacctcatggcagtttcaatattgttagtgaaattttgctatctatgaaaatgtagccataactcactaaaatatatttttaaataaataatttaaaagtgtttgctcaaatttaattttgccccatgtatatctgattactcgaagaaataagacaactggttacgttagtttcatcagttacataaaatgaagaagcatggcatatttcattacccagaagaagggtgaccaaccatttgggtttgcctgggacttcctcagttttaaaactgaaagtccagcagagctggagaccctcagtccctggtaaccagtatgccatgtacaaatctcaagcttcctaacattaaaagcatgtacacaaaggtgttagtcattatgaggacagatgagtcacccccagtctcctggttttagctttaggatataacagtattatttcttaagctctaagtcagacctgtggaggacttcttgacccaggtcattgaattgtggatttgaagattttcttaatcttttctaagtgaaatacctaactctgagacaccaagagctaagatagaaagagcgtctgcagtagctttgctgatcatgcaggggtaatttagaagcaggtgctcttggctcctttgtgtcaatgtggtgggcagaggacaggataagttaacttgctcacagcttccttcaccctggcagcagccaggagccagaatttggaactctcgtgtcagctcttattaattcccccagcagtctttggcattatagtcaaacatcatttcaagctctcagtctgtcaactctggataattctttgctatctctttgctgttatgggaattgattaatacttatgagcacattttaatggaaaaatggagtgtaagtattattgcatgaactgaaaaatagtttcctacataatatgtacaaggaaaataagtcatgggctgtagaggcttcttgcgagagttttaagtggcgatcacttacctgctgcttccctattcatttttaatatgtttagtgcttttgttatttaatgttctcaacaataatttctgctaaattaattttattattgttgttacatattgatgcattttgtttgctgttaagttcaatacatttctttgtttccagttagaatttgtaaatcactgactgattttctccactgaaatttttctggtgtactagggagatgtttaattacttaataattgctgaaactcatcacttaagaaaataaatatttctctagtcaaggtcattgcacatcaaatttctgttacatgaattagtgctccattcttgaatttctaagtataaaattagaagtattcttggcagagctgataagacacattttgaagtccaagacagagaaaataaagttacttagagcatagagaatctgaataaagaaattgagtgtatcaagcagatcatctcctcaccttgatataccagtgtgaccctttcttcttcttaccaaaattctgcaatactaactcataattaaaatcagggtacagtggagacatattgatacattcttctggtgccagtcttctctttcaatattttaaatgtcacacatacacataaaaaatttttaaaattacataacaaacttcctcatggcaaacacattacattttctagcatccatttcagagggatattttattttccagggagcaccctaagccttttgctaatcttaccagcagtttacttactatttctttggatgtttttcttccctgttatactttccacagatatctcaccttatctaggttatcagttagtatgggttaggttaaactcctacaggataacaacccttaattctctgaggcctaaaacaacaaaggttatttttcaattaggttatatgtacctatcaggtcagtggaagctcttccatgttttgcttagccaacaatgcaggctaatagatcacccctcatctggaacattgtcatcatggtaggggaaggaaacacgtgtaactgcacatttcctctgaaaggtatcttgtgtgtgtgtgtgtgtgtgtgtgtgtgtgtgtgtttatttaacctggaagtgatgtaatcagttctaacatttcatcactcaaagcaaatcatatgtctttgcttatcttcaaagggttaggaaagtacaattctgccatattttagaagatgagaactggaaatatctttgaacagcaataatgaataccacatcaagtcattttggttaatatttttatttagaaagaatgacattttttaccccatcctcagattcaggactcaatcactcaacatatatttatttaagaatcaattttttcaatgtttttttccaagctctgtggatgatacaaagatgaaacaagtatagatctaaagactcttgtgtataatagagtgcaatagtcctcttatagtacctgatacttctgcttcatagctttagcaggatggttataattatttctacaactatttgtctaatgctatctaatgctctagtagtttcacaaattctatttaggttacaggctgtacctcttttcatgactacatcctcaacagcaaataccctgcctgatatctagcaggggatgttcaacaattatgtgttgagtaaattataaaagaagaaaactactatggtagtcagagagggagacaatctttccaaacaaatgtatgcttctttagatttgtacctccttttgcactgacaatatttatctggtcacatttttgtttgcaatgtgagagactctccttgtataggagagactaggcttattttatttaattttatatccccaagcactagcctagtgcctgacacacaggagctcaataaatatttgttgaatcagtgaagcaaaggaggtaagcctcaaggactactgaaataaataatttttaataggcaggcacaccagagtgtgcttcctttaattggtctattaatgacatgtggtttaatctttttttaaagcactgacagactagctgataagtgtttttgtcatcaaacaaattctgattgcatctgatacgaactgggcaatgaaatttcagcagatgacctccagtggctgaagatggcacatttgctggaggcaaaagtggagaatgatgaggtttttcacattctgtaaatgtagggctaggtttgttgagtggatttgtaactcaattcgtatattttctttgatattctgaaatttctattgactgtgaaggtgtgaaaatgtgtacagtcaaccagtagcgaataccttcctttgtgaagatgagtagagcacatattacagactttctgtgctaaagtgaaccaaatgcatacatatcattatgtacataggcaacaaggtatgacttgtggtttaactttgaggaaaagcaaactgccttgtaataggcttttattatatactgaccatgtttactttgatgattcaccaggaaataataagcccctaagactcagttacttttccaaaatgagctactcttatcttccaaggcccaaggcaccaattacttgtgtgccatagatgacaatatgcattataagtttaacagattttcaataaaaacattgctaaaacatcattattatgaacttagttattaaagtaccaggtacttaaaaatgtccaatatcaaaataaaaaatgccaagtatacttcttatgtatcaagagacaaaaaaaggcctagcaggacaagaaattcttgaagctctatccaatttcttggcatagacataggaaaaatctaaatctggaaactttggcataagaattgttttctttgtttctataaaagaccatgtatatataagtaagaaacggtgcatttgttgttgctgttgttgctaatgactaaaagttttacaacatgggtgatagaaattaacctattacatatgtcttttaattggaaaatactgattggatatatgacttttttttcttcttcttgcattaggattttgttaatactattgagattttgcaaaagctgcatcataaatgcagcattccaagaaaggaaagcccatggttcaggttatatgatttgtggacatcataattcaaaggacgcaaaataaattgttgttagcacaagataaacctagactgagaatcaggagcctgggatcccagtcctggaatcttgtatgggtcacattctatgtaaaaatgttctttggccacatacttttcttcttccactcactgagttctttacccatgcagccccccaaccctgccacctatgctagccaagaattgtccagaatctgcttttgactggagtttttgagaagaagcagctgtgtggtaaagagaagattctcttgtacagggttggttatttctgattttatcttcactaatagctgtgacctaaagcaagtcactttagcaggtttttttttttttttttaaataatgggctgtttccttcattctaaaatgagataattagataagttggtctttaaaatattttttcaaagtgaaaaatccaagggattagatgatcatgctttcaaacgtgggtgatagtgaggatttgctgatgtctctcactcagagaaccaagctataaattgagtcactaaattcctgccgcacaaactgtggtcctaagatcagcagtatggacatcacctgggagcttgttaaaaaggcagactgtcagacttcactccagatctactgaattagaatccaagtttttacaggatccctgggtggtttgtgatgctttgtgtcaaaggtgagagagacaggaggaagcccaaatccccaaggaatttcccctgaccatctgcaggtctcaccagcctgaatcctttttgttttcccctgctctagtgcagaatgacattcatattcatccttttttgtttgatctacgaaactaagcagaattaatccacttttatacctggataagaccttctaggaaaaccaagtgagattgatttttagtttttaaactggttagaactcttagcctcaagtgatcttcccaactcagccccctcaagtattgggattgcaggtgtgagccaccatgcctggccaaatgaaagctttaaaaatatttttttcacagtaatattgaataatataaatattttcataggagttaactgcaagagaggcatgactctgttcatcttactttgcacatagagtttggaattagccaagaaacttgaagatgaacagtaagaactatgccgtcatactacatatcctcatgttcagtcagcccagccacaaattttgtatcccaaacttggtgaaatatcaaaagagaagttcttgagaaaaaagtcctcagagacttcaggtgcttctattttctgttattttggggaaatttgatagtgtctaacagattagagaggctctgtggcattgctaaaataatgttgctgctaggtagatgtgaatcttgattgatgaattatctgcttaataggcaagaacaaatcacctgggtaaaccatggataactatattttaggaaaggcttatcagctgcttctgggagattgcatatacaagaatattcagtctttttggaaagcaagttctctaatcccatttgcggatattgctagatcatttttttcagtatcttactgaaatctagatatactgtgcctattttgtgtctttgacagtgccaaagaatgaaacaaaaagctttaaaaagtttttttttttttaaacctgaattgatatacttgcaagtaagggaactcagatcagtaaagaaattcactgagtagctatagtttattgagggtaaaattcatggattttcaaatatagaaatagggtttcatgattatgctctgtaagtattgaaaacacaccttctgtttaggagagaatgagtccagcatcccatgttggctggatgtttaatgtagtccgtcatcattggtcaggaaaactgctacagttatggatattaaggacatggcatgccaacacacctcaaaattcatgttcttcaacggtttcagctggttagatagaaccagttgtaaaatacagcatttggttttgatgtcttctaagttccgaagtaattaaacaattttttatttacaatagtaattctatatgaaaaaggaaattgaggttaattcggcatcttttttttttctttttaagcccatattagcttctaatagtcattgcttttctttaaattccaagactcactcacatatgtctggtcttctttttccagtctgaggattatactctttggccaagaaaactggaataaatttagaattaagttgttaccatctgctgcaaatattaaaggccatcttttcatcatcatcatgatcatcatcattgttttcctctgattataactaaagagctccatatttcatttcctttcattttaacggattcttgtcatttcccctagtgtcaggctagtgtttggtcctacaagagatgactaaaagaggaattggtgaaggttaagatgaaagagatggagaatcccaaggtaccaagctgtattatagccaaaggaagtatctaaattttgtctggaagagaataaaagattaagctgatgccaagactcaagtccaagggataagatgaaattgtttgcggtctgcttatttaatggcatcatggaagacagctgaagcctgaaaaagtttccattaaacctcagaataacataaatcccatcatcagcctctcagcagtagtagccagacattatcattcagcctttggtataaaataatctttagagatatttcactttgttctattatagaaaacaatgacaacaacaacaagactcttgcaattagtataagtggccccaactttccttctagaaataggaattttccactgaaatagcagtgtctttgtatctactgcatttgtagtgatattattttatcaataaaaatgttttttgttatttttaccattatgtaatgattattggttgattgcctataacaggttaagctctagggacatagcagtgaagagggtagatgaagccgccatctcactggaacattttctagtagaggagactgtactcagtaggcaaataaatagaagacgtaaatacagagtgtgatgagtgctgcaaaaaataaataaataaataaataaatgaaaataaaaataaaaatagtgacatgctgtaatagttcctttgggctgctgtaataaagtaccaaagactgagtggcctaaagcaacagcactctattcttccatagttctgaaggctagaagtctgaaatcaagttgtcagcagtgccatgctctatagctagcctcttttagctgctggtgtttgctggtattccttggcctgcagatgcattactctgttcacatggctgggcttctctctgtgtatctttgcttggtgttgtttctgtgcctgtctgtgtccaaattttccctttttatgaggacacctgtcatactggattagggctcaccctgatgaattcattttaacttgattacctctgtaaagaccgtatttccaaataaggtcacgttctgaagtgctgagggttaggatttcaacatatccttttggaggacacaattcaacccatgagacatgctaagagagaagctaggttgggtagttttgctactttagacagagtggttaggggtaacctttttaatgatacattatttaggttgagaacagaaagatccatccaaatgaagaatctggacaagaatgttgttgattagaagaatagtgagaaagaatccatggtcagaaaaaagggcttggctgttgccgtggtgaacagaaaggtggccactgtggctggcccatagagagccagaagagtggtgccagatggagggaagggacaggctggagacagccccagcagagccttatttctgaagataaggaatttggaattcataagtgcaatgggaagctattgaaaaacacaggtctgattgatattatacaaagattattttggctgccatttggagaataagttgctgtattagtcagggttctctagagggacagaactaataggatacacacacacatacacacacacacacacatatatatatataaaggggagtttattaagtattaacttacatgatcacaagttcccacaataggctgcctgcaagcttgaggaacaaggagagccagtccgagtctcaaaactgaagaatctggagtctgatgttcgaggcaggaagcatccagcacaggagaaagatgtaggctgggaggctaggccagtctcgctttttcatgtttttctgcctgctttttatttgctggcagccgattaggtgatgccgaacagattaagggtgggtctgccttccccagcccactgattcaaatgttgatctcctttggcaacaccctcatagacacacccaggatcaatactttgcatccttcaatccaatcaagttgacactcaatattaaacatcacaattgcaatcgaacaagagtgaaagtagggagacttcctatgcataggacagattctagattttccttgtgatacagagaaatataagacataaacttgtcttcaaagacagggcaatatgcttggggaaacaacacaattacatataagcagatattagactacataagatataataaactgtgttctaggagaatgacattcattagatttcactcaacatatatttattgagtgtccattaagtgttaggcattgtgtcaatataggaacaaaagaacactacattaagtacataaagagatcagaatcacacatggaataaatgacaaaaatgggtataggttatgctgggagggcacaaatgagagagtggtcaattctgtctaatgaagtagttgggaaagaattaataaagacagagacattttattcgattcttaaaagatagacaagaacccatatttatctggcaaataagttggaagatggttaatgtaggaaaagggagagaagttggggtcatcacatcaggcaaaagaaggggattgagcaaaggtcaacaggtatgcagaagaagtgcacatttgcagattatatgggttcacagcaagagtttggaggaagactatgtggtggagagttttgtttttattttttatggctccctaggccataatcctcttttctatgtgtgggggaatatgttactgtgtgagttggggagacagagtccaattttcctttatgatagctctctctaagccctagtgctgaggcctagcagggtttggggatcattaattcgtcctggtataaaactgaatagctgttggattttctgtagcagtattcagcataccaggtataggagcatggttcaattcatttaatattgtgtatattaggagtggggattgtgggagctagaaaattcaaggaagacagaagtgatttttggctggaatggttaaggaaggtctaaggaggtgagggatttttattcagatcttgaaatgcaggcaggagtaagtagacttactgggaggggaagttagcagtggaaggaatactgagtaaaagaatggcaaaggatacaggatcagatgtgggaacagatgaggcatatgggagatctaataaaccagtctggctaacataaagccataatggagggggtgttgaaagggtacatctgataaagtttggataaagtacaaattccttagccttgaattccaagtcatatcttccaagcaatgaggatctgttgaaggttattgtgtaggagagtgattaagattaatgtggtggcaatttgctataaggatgagaagaaaattgactccaggcaggaaaactgggttaggaggctggcaaaggaatctaacattcagggagcaataagagaggaaaggaagggactgagaagcaatagacagaatgtattccctcctctgtgctcctggctcttttcacactatagaactttcactctcaatcatgaatattcacataaatgtttatctctccccaattgtttcttcctgcttccatttcctccccatttttatctctgtctctcccacactgtttctttttctttatttctgtgttaattatttaattcatcaaatatttattatttacataatggacattgtacaagacactaaaggttcagagaagggaattcagttctccttggaaaaccaaagaggggctcaaccacaaaccaagtagaagtttctgccagaatttaggggtgcatagaggcctttcatctatattcatgcatcgcctgaacccaacctagaaaaatgacaaggaagtcatcaggggagcaggtagaggaggatgcagaggtgcagcagggaactgctggtcatttggcgaactatgtcacaggacctgtgtgcaggagtgatgaaccatgattggagaagttagcagggccttgtgtatcatgctgaagaactaaggtttattccaaatgtgttggaggttcttccagaattttacatagaagaataatatcagatatttttagagtcagcaaaactgaggatttatactctcaggctctggagtcagattgagaacagagtgttactcagggttagccacttggtggccgtgtgaccttggacaaattacctagcctttcagcctcagtttcttctctaaaatactttttttaaaaaaaaatactaccttctttgtaggcattgttttttatttggtgagaattaaatgatatgttatttgtaacattctcttatttttacctgatattgacaaattattattgtatattttatggggtacaaagtaatgctgtgatacatgtatacagtgtagaattattgactcaagctaattaacatatccacagtctcgaatggaatacttatcatttattcctcctgtctaactgaaacattgtacccttcaaccaacatctccccattcccctgattccccagcttccggtaaccaccattctgctctctgcttctatgtgttggattttttttttttttagcttccacatataagtcagaacatgcagtatttgcctccatgtctggtttatttcattagcataaagtccttcaggttcattcatgttgtcacaaatgacaagattccctgcttctttgaggctgaataggtttctaatgtgtatatataccatattttcttgtccattcatcaattgatgaacactcagattgattccataacttgactgttttgaatagtgctgcaataaacataggagttcaatatctctcagacttcctgatttcaaatcttttggatacataccctggagtagaattcctggatgttatttctaacattcttagtacagtgcctggcacatagaaagctttccaaacagatagctactcttactagtaatgactaggaatgacttatcacctcagtcattgttactattataaaaactactctataaactattatgaacaccactcatcttggtgtgcaagatgagccagagatgggaataagctggaggaagggagatcagttaggaggcctctggaataatctaggaaagaatattctgttttctgtctggtgcccagctgtcgctcagaaggagctttaaaaaaagtttgtggaataaatgaaaaggaagactgagcagaattcagtgattgattagctcaaagaaaccagggagcaaacgaaagataactgcaagacttggagattgagtgactggagaattctggtactatggacacaaagaaaccttctctctttccacccctcagctctgcgttctcaggccattgctcacctgacatctttggatggttggccgctttttgaatttcactcacttgctcaatgactgtggtgtgcaggtctgctgctttgtctttttccagaatgccttgtcataactatagtaaaggtatatctgaatttagaaccccgacaattcaaaaatctaaaaccccacttacaaattgggtttgaatacatctctcaggttgcttccaaatctttctttcttttcttttctttttttttttttcatttttagatcatgtagatgtctcagggaagacttcagcatctgtgcctctgttggggcattaatagaatcctatgcttttacatccattattgtatttggaacaaaatatcctttatggtcatttggtattatatattttctgttttgtatataatatgaaattacatatacagtctattttaggtctcatatcattataaaacaaaacaacaacagcaacaacaaaaatttggctcagcttttggcttttatacttctgtcaacttgttatttgtactctgactccaaagacaattggagaaacttgggagcataacacaagattttattttaaccaattgatctgtccactgctatggactgatttttgcacaaagtaatagcaggttgggctgatgccatggttctctgattttctttttcttttcttttcttttctttctttctttctttccttctttctttcttttctttctttttctttcttttctttcttctttctttctttcttcctttctttcttcctttttcttgagtttgattattctgattactaaatgccttgcaatttgaaaaagaacagaagttatgagcttgtactaggaataggttagccaggttcaagggtctcacaacatttagaaagattgtttttaagaaagaaataaaaaaaaagtcttatagagagatcagtgacacttcataaacaagtttgcaatgctgtctactagtataaatgaccgtacgttgatctgccagactcattgcccggctgtttttgccagggcacatatttgtgagacagctgctccgaactagggaaggtcaagcaaaaaccactgcctgtctagagatggctgtcctgatgtcagtctcattagttcctgagttcttgccaagttagtaagaactagcatagatctggaggtcaaagtttagcagaaagagcccccacagcagtgtgcaaagagctctttttctgttctactctttttttctctactggtcacctagttggtgtgtagcgtgtgtgtgtgtgtgtgtgtgtgtgtgtgtgtgtttcccaaatagtacttgaaggataggaaattaaatgtctgtgggaaaaagcaacattttgggttctcagcattttagtcagctgctttcttacttttccagactgtgactattctttgaagctattaaaatctattcttggtaatgagaaaagggagtgacttgatggttcttttccaattgctctgtgtctgacaagaaatacctaaatactttaatttgcctttttaaatttcccctagtggtggcaaaacaattctactcctatttgtcagggaaaaaaatctctgccgtgaatttcagtgctgggaacataacaagacaaaaagctacctgggctagcctgtttctccaggatgaaacaaaaggaatatagattttagcggctgctttaacagtttggtaaaggatctggtctatcttgggtgtgggagatgggaggggtaaagaggtcagaataccatttagatcacagacagaaagaaaccaggaagtaaggggaaattattacagtctgttcatagctcagaatgttaaaggcaacagcctctgctggttggttattcattagcaaaaaggagagagccgtccagatccggactggtcgaaagacaggaacagacttgaaacagggggagagctcctggcgaaagcaagacgtggaggttttaccaggggttagtagcttcctcttgctaactttttattgggacaaaaggcaagatggcaccattctgttctcagatatttgtctaaataaagcccttttaattttattttatttttgttgtgggattcttaagcagataagaagaaaagacaccttcctagtgagcagctgcccagctcctgctcagttttgcctcggggtagcacctccagccacagaaagcaagccggtaagtctctccaggtaggacttgctgcaacccagctgctggactgatctgaaacgggactttgcatactctccgaagtatggtgagttggtgctgacttcaaagttgcctggtgaaggaagataaggtggatcgcagagactaaggggagagggagaagccctgctcctcttctccccaccaaggcacaatgagcaacatctgtcagaggctctgggagtacctagaaccctatctcccctgtttgtccacggaggcagacaagtcaaccgtgattgaaaatccaggggccctttgctctccccagtcacagaggcatggccactactttgtggctttgtttgattaccaggctcggactgctgaggacttgagcttccgagcaggtgacaaacttcaagttctggacactttgcatgagggctggtggtttgccagacacttggagaaaagacgagatggctccagtcagcaactacaaggctatattccttctaactacgtggctgaggacagaagcctacaggcagagccgtgagtagtacaaacttatacttaatttctgaactctctgagggctgggtaatgagttttcctttctacttctctacaaccccctaatgtccaaagagttgcctaaaaagtatgaggaagtactggcaagaaaccactaattgaaacacacctcccccgctaagtgagtgtgaaactggccagtaattgttgttgagatgacttcaattacagtatgtacatccacaggtccagggtgtattttcaaaataaacaaatgatgtgtttaatactgtaccttctctttggctgtaaaataactcatgcctcactttagcaataaaattgcattttgtttgaaggtaaattataagacttcccttaatgatattctcaaatctaaacttcagattcttttttttaaaaaaaacttttgaaacattccagggtaatatatcaactctagccctagctctaatcctaatccctttcattctgatgggaatatacagggctaatgtagaagacaacacttagaagatactaatgttctcagtgacatcatgatatagatttttttttaattcccagatcctgagatatgctacccaaattatgatatcttttggtttttattatgattagaaactggccagctacagacatttggtaaattttgataggaaaaaggacaacatctccttgaagaggagataaagactttatcctggtatttgaatgaaatatgaattatattgcaacaaaagaggaaagtttttatgtacttattcacccatccatccatccatccatccatccacctaccacccctccaagtgccaggcatagacagtagtgggcctggtgagttggggagggtaaaggagattattctagtagtgactgaatacaaagtggataaaacatagtcttgacaatggatacttggggtctggtgggttgggaagcaaatggagactgtcattggccctgatctcattgcttcctgaatccagtgaaaccttagactgggaatgtctttcaaaaaatgtactcatttttttttttttttttttttgagacggagtctcgctctgtcccccaggctggagtgcagtggcgcgatctcggctcactgcaagctccgcctcccgggttcacgccattctcctgcctcagccttccaagtagctgggactacaggcgcctgccaccacgcccggctaatttttttgtatttttagtagagacggggtttcaccgtgttagccgggatggtctcgatctcctgacctcgtgatccgcccgcctcggcctcccaaagtgctgggattacaggcgtgagccaccgcgcccggccaaaatggactcattttatagaatggtttcttaatagggaaaccattggagattctcttatgttctcatgtaagtgtttcttatttttatgtgagcgtcccttactggtccagggaataagataataataaatagccatagagcattgtttctgctttccaaactcatacatcacatatgaagggaggtttgacgagttttgagttttgagattcttttcaacaccaagaacctataaatgtttagaagggtcttaatttatgcttaaatagaaatgaattgaaatatacttttaatgaatggaattgatcagttatcaagtgggaaaatcacctgtgtgaacatttgctttctgtgataatctacaggaaatatctttatatattggatacacttatgtgcatttatctgttttcactactttatgatttctatgtcctgtatggcattatgcatattttatatttggcataacatgtatattataataataatatattaatgtttcatgccttgaattcataatctgttagttttaaatatattcaactcatataactacttaggacctcaatttcctcatctgcaactctctggggttgccatgaccaatggatttcctgactatctgggaacaggagctcttatgttcgtatgtagtggttcagttacattcatgcttgactgtattagaaatgctgaagaaagcaaattaactgaaacaagtcaagcaatccgaaggtatcatattctgggtaaaaggcttgagagcagtgttcttattaatttagattttctttgcctacaaacacaaaataaggcaactaaattattatggctatttttgattctcagagtcatttgtagccaataatattttttccctctgcacattaccttgacctttcttcttggaattggttctcagcagcattcctacctgtcagtaccattctagatctctgtagttagctttccttgggatcttcacatccactggaataaaaaccatgatgcccagaaaatgctgccactctgcctcctggctggaacaggctacttgttttcttttaagtgcacaccatggtcttcacctgtgaacctggcttacttctgaagtttcttgtcaccgtaaggcaaaattgcttcaatactcttagtgcaagtagctgtagcttctagaattcccctccatctcaaatagaagcgatttttactgaacagccttctgcgtgagtgtgtccaagtggctcacacagtactttaacacttgaagaattatataaaaacaacttattttaatattttttcttcagtgagttttttcaaaagtctatttttttctcctgaatgctgtgaaaattaacgtaattttttaaaatcatgagctcagtaagttgacttaaggaaagattattgtttatatccacatgtatgggatgagtaggcaatgggaaaccaatgaaagctgtcatctaattcctaattagaccagtttaatgcaacgtatgttagtatttgtgtttttatgtctttacttttgatgtgcatctgtaagaagaaactgcaaatacttctggagttattggtgccagggaaaattagtttaaggctttagtttgcagtttgtttgttttcttttatacttggaagtagagatgttgaaaaacaaactattgtttaaaaagcccaatttactaattcttatcccacttagaaatgcttttcacctttactgaatatcttccactaagtgatataataaaccaattcttgaagatttattttgtctttatgaagaatcattagatttatcttatcttcgacttgaatttattcctagctcattttagagatgagtctttttcttcaacatcttcaatgtgaaatccctcgaaaaccttgcccttagggtcttattaatcagaactttctttaatattttatttatggtgtttttaaagatataaagttcacataaaaataatgatgtggaaataacatataaatattagaaccaaaagtaatggctttaaatttcattgctttaattgtaaaaaattcaagtattgcaaaatattgataaaaagcaatatgatcagcaataatattagacgtagcatcatttatctgcaaagagtttaaaaagtttttttgcttagggaggatcacctgtgtccaggagttcaagaacaggctgagcaacatagtgagacccagtctctacaaaaaaattaaaaaatttgctaggcatggtggcacaaacctgtagtcccagctactcgagagagtgaggctggggcaggaagactgcttaaacctgggaggttgaggctgcagcaagctatggttgtgccactgcactccaggctgggtgacagagccagaccctatctcgaatccccaccaaccaaaaaaaaaaaaaaaaaccaaatgaacaattttttgcttaattgttaaagtgtaccttaggtgttgtctaacatacttttgtgttaaattgaactagggtcagagatgagatcagtttaatctcccagaaaggggattggtaggaggggaatggggtggacataatcacataagccagccactgatgatttctgcttcgccaacttgaccacgcaagccaagggcagcagttgagatagctgatttgactcccctttgcatgttaagtttaagttatgataacaacaatgaaatgtgctgctgaacttctgactccatacacttctcaaagacataaatgaagattctattaagaaaattagatcactacaatcatctctaaagtttattgtttattaagctccacatttttctaggtcatattcttgtgtatcttcttacttgtgaatcagtaattttgtcttaagtccattctataggcctggtatggtgctaagtgaatgactcagcaaaggcagaggaattagtatttgctttgttatatatatataatttggctttatgttaagaaatatttccacacttatgtgtgaaacaataaaggccataaagtttatttctgtctcctaaatttgagcatggcatacctttgtgggtaggagggctagaggagccacccatactgacctacgatggtgtctttgtatctcttgttagcactttagcaggggaagaagcaaagtactggattttgtagaaagtttttcttctcctcttattactgtgaaaggtagataatttccaattcctcatctattcatcatttcagtggcttccttgaaaaagaaagcaagaataaatatttgtaacttgtagttttgttggtagtttatgattatggtataaaaatgttagaatgttctgaagtataaaagtaatgggatttttctccatgtatttaggccatattttcctgcttgtgctgctctttagtgtgtcagactagagttctttgaagattttatctaacctatgatgattgccattgtcgagcttgaaagcagcatggtgaaacaaagtggtatattcttggaaagattcttatatcacctatatcaccgttttaaaatagagtgaggctttgctattttgtcatttgaatgctgtggaatttaataattattgaatacaaattgtacatagtgtgcctaatcattttcaacttaaatgtcagcagatttttttcttagctgggatatgagaccagcttttgcatcttaattataggtatagaaacaatgtggtttaaaaattaacattacccttaatacattttaaaagtcatcagaatattcataatccactctgacataatagatgttatctactttgagaagtttgaattattaaaagtcaccagtgtgcgatcagttccacaattgttctttatctagatcatttattttgttccctttgtgtaagttgtcagggaagactaaatgcccatgtgtcaaaatgaaaataatacctagtaataaatgcctgaaaataatgcctggcatttctgggttctctcctctaagacaaagtatacttactataattttagaaatgaaataaaaaggtatttatatatataaataacactatatttataaaatatagtattatactatattatactatataatatataatatatagtataatattataatagtataatatactattatatattatatatattatattatatataatatagtataaataatatataatatactatataaataatactatatttataaaaaatacactataaatatacatatggttgtttatcaagtgttttggattaatcaagataaaaattttagcacaaatcatttaagtcaaccaaaagcatatttaaatgccatgagattaattagcgttactgtccccatcctttatttttcaccatatgttatttatgatgatgtaaaataagaatatgacaaatacgtttttaaaataatttatcaaaaaatttcatctcaggtataatattatttgacttcatgttaatataattgtactgtttatgttaatataactaactcaatttgttatataataaatttttacataaattgccactatttttaagaaaaataattaactactaaattagaatatatttcataaaaataatagcaaaatcatagatgtgaagaaaagagcaaccaattcaactatgttaaaatcccagttgaagtttaattaatacctgtgtcaagtaattaatagcagtaaagcttgattacatgcatctcaaagtacctttgagaaccagtgaagtgacatagtatggcatcattaaaatgagttaggagtcttttctaggaaaagtagcaacattgataatactttaaaatttccaattgcaatatgtcattcagaatcactctttagtaaaagtattgattatttttgcttttcaggttttctacaaattactaacaatgggaaaaatcttatgtgagtgaaataaatcattaactactgagctccagtcttaaagattagaacccaaattttaacttgatcaaatttattctttgaaaagaaaatgttctattggattcaaattggtttacttttgttcaaatgaattaatttaattccatggtttgtctctgcagatacatcctagtgttgctttttgatgaatagaagtcaagaatctcaccaaactgagattgtcaaagtagacacaaccttctatacagtaaagcaggactaaattcttttagcagctactatatgctgtgcactttcattgttcttgaggttaccaaaagaggaaaaaccaacaaaactttgcctcaattaattcttgttgcagctcagaaaattcccttcagattttctaactaccaatacaatagtgagaacctatatgggcaatataaataagagcagcctttgggttcttctggtgaatgtttcaactagatccaaacattagtgtatggagttttactgaaatataatgctggttaccctttttgacctagcctatggtatgcctaagaacataaaatataggctcagatgatctagatttgaatttgactctgtaatgtcttagctgtgtgagcctgagcaaattacttgacccctctgcctcagtttctcatctgttaaataggaatcacagtgacacctatcttataggatcattatgtgacataaatgagactgtgcagaaagggtgcactgcagagaacctgacacatagtaaggtttaataaatattatgtttcatttagttggcagctcctcttttacttctgtctaaatggatcatactttacacccccactctagtctgagctcacaatattctttccctgtaacaggtgtcctggacattgagtgtctttcagtcttcgaccgtctgcactctccctcacctgcagccttggtcttcagatgggctattctctctgcctataaccctctccttcctctttttttcctgaccagcttaacttatccttcaagtctcaccctatttgttcctccttccccaagcctttcctgacatactagactacatgaggtgttcctgcctagagttgttagcaccctttgtctttactgctaatttattttctgcagtgctgtaaactatggatgtgggtagtggaaaggtgagccattgctcctcccagagcttagtatgatacctgtgaataataagcactgattgggtagatgaataactaaatgaatgattgcttatctacaaatctcaggtcttttaaagagcagcccacagagacacctcttctttaattgttcctctctgaattgcatttttacctaccagaaaattctacattaaaggcataagctattttttattcatttctcaatgaaattgctcatgccttaatatttggttagactcacagtcataaaagcataattcccaggttctcagaaattagttgctctaatccacctctggggagaaaatacttaagagtcgtagaccaattcaaatattctttgtaatgtagactgaatatcaagtcaggaacagactgtaaatctcattgaaatggcgtctaaaaatcacatatacacatattaaaccatactatggttatatttaaagtagaggatttactggccagagcttttaaatggagagcaaatctagatccaatttacaaaattaatgttgtggggccagacttgtaatttcagtttttatgctcaatatacataatttctaattattatgtgtatgaaatatttttcagcttacataagctgaaagtctgactcttcactgaatattaatagatttttactgtacattctaacattaccaaaaaataattttatcttctttttactagttttctcactaattaactactaatttctctgcagcattctctgactcccattttaaatatgggttcttagctcttcttagcattgaaaggattgagccagtttccctagggaaggtagttatatagattaatagcagttttaacgatattgcagggttccttacagatattttcctaaagcctgcaactttagtattagtttatatggctgttcccttgaagattaatgtaacagaagaaatttgctaaaatgcatagatgcaaatgtagatcatatactctggatcacttactttattgcttatttggataaattcagatactgtcatagactgtcccttgtgtaatatctttctgtcatgatgcaatttttttctacaaagttttttagttgaatatttttctatttaccaattgagtcgattgaatgtcagattctttaatgtttttattaacgtatttttaatattcagatggtgcattttatagtgcctttaaattcagactaaattctcaatcaaatacttttttcatgatttccgtgcctttttatgggtaaaataaaaatgcaattcagtaaattaataggaacgtttgaactttatactaggtatcttacttgaaagacatttagaatactatttcttagtaaatattcctgttaacacaaatgttgtataccacattggcagcatgatttggaagattcagaagatcccactttaaggttcctctgaaaggccagtattgttgatagctataaggtaattgtaatgctattttgatctcacatatatctttttaccatttctgaataataattaattctgacatacgaagacaccaccctgcaacttccagcattgtactgcctgcaaagtcactgctagagaataatttctggatactcctagttgcacttttgagaagcaggattcaggacactttctccaatgtcttttcaccatttctggtcattgaagaaaatagtttctatgagattcagttatccattcaacaaactttttgtatgtatttgctctattaaagacactgtttttgtgtagtgggagatatgaaaattaataagacaatactcttctccagagaattttacagtttcaggaggtaagattagtaaaccaagaatgttgtgacaatgccctttgtcaaaagcacatcaggaacacatctgtagtgttttattattcattgcagggaaggagaacacacatggtgaagagtagagcgcttcagtaagagggtgttagacagggcccactattagatctagggatgtgactttggggagattttaaggaagcaggcgttgctctgttttggatattgttaagaaatgggaataactgtgtaattaggtatttaataaatcttattgagaaagatggaagattagtttgggaataaagctagaattggttaagaaacatcagtcactcaggttagccaagataagtagatgtttggtcattttttaggatggacaatatccatgtttttgtgggtgttgagacttgattatggaatgatctgatcttgtttttgtcttgatccatcatagtcacagtgtagcctcgtctgaagttgatgttttgtgagattatttatgttcaacagaagacagcaaggtctagccgttaagtgccagtccaggtccaggatatcaagagttaattttcatttcctcagttagcatagacagatgctgataaatgccataagcgtgtcaaaaactgtctgccatgtagtgtgcatgtaaaaaacaatgttcaactcatgaatgaagacacaaatagttggaagaatgagtgcagagatagaagagatcagtcctgatttgggggaaatcataccttcctttcagggttcagctcatatgacccttttcctaaaagttttctaaccttcatagaaagaattcttaatttattttgttttcccatgattttgtatttattgttagtagagcaatggtcagggataactgacatttactgagagcataccattatgtcacttaccatacaaataacttaacttgcattgtcttatattattatcctatgagacagatgcttttattacccccatttgcagatgaggagactgaagctgaaagagtttaagtaaactgcttacgtccacacaactagtaaatgatggaagtgagatttatctgcctccagcttgctctcagagcctgtacttttatcatataacagctagctataaaacttttgtcttatgaggctgtaaagtctttgattgcctggaaaactatgcaagactctttgtgccccagagaatttataatctcagaaagtgagactatctattttctcctgagattgtaaatttcctggagcagaaagactgtcttatttagttttactcaatgcttaccaagctgaatttctaaaagcctagagagatgaacaattcagtacaattccttgaataatatacaggagggaaagtaaaagtgtattcggggaatggcaagttgtagagtttagctgaagcattcatggagaagagcaatgggaaacaaatctggaaaaatagccaggaacaagttttggaaaagagcatgtatgatagtttaaagagtgggttttatctaatgggaaatagaaatagatagaaggcagggctttgaaaagactacgaggaggtaggaatggattagagaagagataagctagttatagagaagtatagtgaaattatatttcaaaggtccatggcttgaggttataagggcttaattttaatttgtggtactgttaaaaaaaaaaaagaagtgcagggatgtgaacaatcccaagaataaggatcaagaagacttaaggggaaggaaaataacatttttgaatacattcaatgcgctaagcatacaaaactaatttaatccttctaatagctctgcaaggcaaattttcttatcactatttttagggtaaggaaattaatggtaaaatttaagtaaattcatatattcttatttggtaaatggtagaagtaaaactacaaattagatgtagaagaggagaggagaaagagactgacacaaaaaatatgtaatttgggggctcagcatggtggctcatgcctgtgatcccagtacttttggaggttgaggtgggaagatcacttgagcccaggagtttgagaccagcctgggcaacatggcgagactccatctctaaaaaaaaatacaaaaattacctgggcctggtggcacttgcctgtaatcccagctactcaggaggctgaggtgggaggattgctttagctgggaggtcaaggttaccgtgagctggcatctcaccactgcactacagcctaggtgaaagggcaagaccctgtctcaaaacaacaaaaaatgtaacttgggaccaggtgaaacattaagataaatacatgtgtcatatggtaatttttattgaagcagacaaggaaggaatggttgaaacagagaggaagataatacattcaattttagttcatgtcgaaattgaagccccagtagaacatctcagtgaaaatgtccaaaggaaatttagaaacacaaaagtcaaggcaaagagccaactctattctgtaaaaatggattttgaagcattcacaccaaggtattatagatgtcacagtaatataagaactgcagaatattttaaacttcacaaggattctaagaatcaaacaatgagagtctaacaggagcaatgaggcaaagatcaagtctttagatttaaatagctgtagtttaggtgaataagtggtgtgtaagttgtagtaactgtcccatctttttgtgcttccttgcatctgcattcttggggtagtctcctcccacactcattcttggctttgccaaatcacgggctttggccaatgggacagttgcaaatgtgacaaaagtggagacttaaaaagcacttgcacattggagttttctttcttagttctcttggagtcctgcaactgccataaaaatcctaagctaacctccaggaggaagtgagactatgtgaagagatgtcctactggcccagctgactcatcagctgactgagcaagcccagctaagatcagcagatactatcccaaagtggtaaccttcagactcatgagctaattaaatagttgtgatggaacaaagcctaacaatcccagctacttgggagactgaggcagaagaatcacttgaatccggaagctggattagctaggcatggtggcacatggttgtaataccagctacttgggagactgaggcaggagaatcacttgaatctggaaggtggagattgagccactgcactccagcctgggcaacagagcaagactccatctcaattaaaaaaaaaaaaaagaggaagtggaacacagctgcctccatctctgggtagagtctgcagtttcctaaaaaaactacagatgtctggttgtgatttatcaaaggcttgaccctttctacggcatcagatttggtaagtattcagtatcccctggtgggttagatatttggaggttggagtagagtgaggctagtttgaaggttcatctttagctccatggatttggccttcccaaatttattagaaaaattcatcagtttttgtcatgggtgacctctcacattttgaggtcatgttgtgggaagaatgagttcagtcctaggtcttaaagtagaggcagcaaatatatatatatgtatataaatatatatacatacatatatatatgtaactcatgaagaagtttgtgaaggaaacttcacaatacagatacaggcagtagattatgggggcatcaggaccacaacttggaaatgctgagtcaggggtacttgaatatttaattataaaccttgaatctacatttttaatacctttccctccgtctggtatactagtagtactattttaaaaaagaaaaagaatgtactcagatctatctattcaaggaatgtttattcttcttcttattattatactttaagttctgggatacatgtgcagaatgtgcaggtttgtttcataggtatacacgtgccatggttgtttgctgcacccattaacccatcacctaccttaggtatttctcttaatgctatccctcccctagccccctacccccctgcaggccctggtgtgtgatgttcccctcactgtgtccacatgttctcattgttcaattcccacttttgagtgagaacatgcagtgtttggttttctgttcttgtgttagtttgctgagaaagatggtttccagcttcatccttgtccctgcaaaggatatgaactcatccttttttatggctgcatagtattccatggtgtatatgtgctacattttctttatccagtctatcactgatgggcatttgggttggttccaagtctttgctgttgtgaacagtgctgcaataaacatatgtgtgcatgtgtctttatagtagaatgatttataatcctttggggatatacccagtaatgggattgctgggtcaaatgctatttctggatctagatccttgaggaatcaccacattgtcttccacaatggttgaactaatgtagactcccaccaacggtgtaaagcattcctatttctccagcatctattgtttcctgactttttaatgatcaccattctaactgacatgagatggtatctcatcatggttttgatttgcatttctctaattaccagtgatgatgagctttttttcatatgtttgttggttgcataaatgtcttcttttgagaagtgtctgttcatatcctttacccactttttgatggggttgtttgtttttttcttgtaaatttgtttaagttccttgtagattctggatattagccctttgtcagatggatagattgcaaacattttctcccattctctaggttgcctgtttactctgatgatagtttcttttgctgtgcagaagctctttagtttaattagatcccatttgtcaattttgacttttgttgccattgcttttggtgttttagtcatgaagtctttgcccatgcctatgtcctgaatgatattgcctaggttttcttttagtcttgaagtctttgcccatgcctatgtcctgaatggtattgagtaggttgtcttctagggtttttatgattttaggtcttacgtttaagtctttaatgcatcttgagttaatttttgtataagttgtaaggaaggggtccagtttcagttttctgcatatggctagccagttttcccaacaccatttattcaatagggaatcctttccccatttcttgtttttgtcaggtttgttaaagatcagatgtttgtagatgtgtggcattatttctgaggcctctgttctgttccattggtctatatatctgttttggtagcagtaccatgctgttttggttactgttgccttgtagtatagtttgaagtcaggtggcatgatgcctccagctttgttctttttgcttaggattgtcttggctatgtgggctcttttttggttccatatgaaatttaaattagtttttttctaattctgagaagaaagtcagtggtagcttgatggggatagcattgaatctataaattactttgggcagtatggccattttcacgatattgattctttctatccataagcatggaatgtttttccatttgtttgtgtcctctcttatttccttgagcagtggtttgtagttctccttgaagaggtccttcacatcccttgtaagttgtattcctaggtattttattctctttgtagcaattgtgaatgagagttcactcatgatttggctctctgtttgtctgttattggtgtataggaatgcttgtgaattttgcacattgattttgtattgacactttgctgaagttgcttatcagcttaaggaaattttgggctgagacagtggggttttctaaatacacaatcatgtcatctgcaaacagagacaatttgacttcctctcttcctatttgaatactctttatttctttctcttgcctgattgccttggccagaactttcaataccatgttgaataggattggtgagagagatcatccttgtcttgtgccaattttcaaagggaatgcttccagcttttgcccgttcagtatgatattggctgtgggtttgtcataaatcgctcttattattttgagatacatttcatcaatacctaatttattgtgattttttagcatgaaggggtgttgaattttattgaaggacttttctgcatatattgagataatcatgtagtttttgtcattggttctgtttatgtgatggattatgcttattgttttgcatatgttgagtaagccttgcatccgaaggatgaaaccgacttgattatggtggataactttttatatgttgctggattcagtttgccagtattttattgaggattttcgcattgatgttaatcagggatattggcctgaaattttctttttttattgtgtctctgccagagtttggtcacaggatgatgctggcctcataaaatgagttagggagcagtgcctctttttctattgtttggaatagtttcagaaggaatggtaccagcttctctttgtacctctggtagaattcagctgtgaatccgtctggtcctgggttttctttggttggaaggctgttaattactgccacaatttcggaacttgttattggtctattcaggcattcaacttctttctggtttcgacttgggagggtgtatgtttccaggaatttatccatttcttctggattttctagtttatttgtgtagaggtgtttatagtattctctgagggcattttgtacttctgtgggatcagtggtgatatcccctttatcacttttcatgtctaattgattcttctctcttttcttctttattagtctgtctagcggtctatctattttgttaatcttttcaataaaccacttcctggattcattgattttttgaagggtttttcatgtctctatctccttcagttctacttggatctcagttatttcttgtcttctgctagcttttgaatttgtttgctcttgcgtctctaatacttttaattgcaatgttagggtgtcaattttagatctttcccgcttccttctgtgggcatttagtgctataaatttccctctaaactctgggttagctgtgtcccagagattctggtatgttatgtctttgttctcgttggtttcaaagaacttatttatttctgccttaatttcattatttactcagtagtcattcaggagcaggttgttcagtttccatgtagttgtgaggttttgagtaagtttcttaatcctgagttctaatttgattgcactgtggtctgatagactgtttgttatgatttccattcttttgcatttgttaaggagtgttttacttccaattatgtgatcacttttagaataagtgcaatgtggtgctgagaagaatgtacatctattgattcagggtggagagttgtgtagatgtttattaggtccgcttggtcaagagatgagttcaagtcctgaatacccttattaattttctgtctcattttggtctgtctaatattaacagtgggtgttaaagtctcccactattattgtgtgagagtctaagtctgtttgtaggtctctaagaacttgctttatgaatctgggtgctcttatattgggtgcatacatatttagaattgttagcttttcttgttgcattgatccctttaccattatgtaatgcccttctttgtcttttttgatttttattggtttaaagtctgtcttatcagagactaggattgcaaccctgcttttttttttgctttccatttacttggtaaatattcccccattcctttgttttgagcctgtatgtgtctttgcacgtgagatggatctcctgaatacagcacatcaatgagtctttactctttatctaatttgccagtctgtgtcttttagttgcagcatttagcccatttacatttaaggttaatattgttgtgtgtgaatttaatcctgtcattatgatgctagctggttattttgcccattagttgatgtagtttcttcacagtgtcgatggtctttacaatttggtatgtttttgcagtgtctgaaacccgtttttcctgtccatatttagtacttccttcaggagctcttgtaaggcaggcctggtgatgacaaaatctctcagcatttgcttgtctgtaaaggattttattgctcctttgcttgtgaagcttagtttgtctggatataaaattttgggttgaaaattattttctttaggaatgttgaatattgtcccccactctattctggcatgtggggtttttgcagagagatctgctgctagtctagtgggcctccctttgctggcaggcaggaatgtataagtctgctgaagctgtgcccatacctgccccttcccccaggtgttctgtcctagggagatgggaattttatctataagcccctgattggggctgctgcctttgtttcagagatgccctgcccagagaggaggaagctacagaggccatctggctacagcggctttgcagtgctgtggtgggctctgcctagttcgaacttcctggtggctttgtttacactgtgagggaaaaaccgcctactcaagcctcagtaatggtggatgccccttccctgaccaagctctagtgtcccaggtagacttcagactgctgtgctggcagtaagaatttcatgtcagtggatcttagcttgctgggctccgtgggggtgcgatctgctgagctagaccactgggatccctggctttcagccccctttccaggtgagtgaacggttctgtctcgctggtgatccaggcaccactggggtatgaaaaagactcctacagctagcttggtgtctgcccaaacggctgcccagttttgtgcttcaaacccagggccctggtggcattggcacccaagggaatctcctcgtctgtgggtttctgagactgtgggaaaagagtagtatctgggctggagtgcaccgttcctcacggcatagtcccttacggcttcccttggctagggtaaggagttccctgaccccttgagcttcctgggtgaggcgacgcctcattcttctgcttgccctctgtgggctgcaccaactgtctaaacagtcccaatgagatgatccgggtacctcagttggaaatgcagaaatcacccaccttctgtgttgatcttgctgggagctgcagaccggagctgttcctattcagccatcttgcgcacgacttaatccaagatgcttcaaggaatcttttatacacaagaacaacacatgatcctctttgcactttcctagaagacagatagggaatgaattaagaagccctggttttcttttctggtatacagtggttatagagtattcctctgtttagccttaggctgttataatccagagaatacagtgacatttcagataaaaacaataaaaaagcaactcaataccttgcatttgtgttatgcaatagtttatagcaaaacagacaggtactggttttgatgatgaatcactttgaactctgtgctatcttttatcaaagtctaactcagggaagcgatagttgaggaaaatggaaagacatgctattgatttagtaggtcccgggaaaatgatagaaaacaaaattattacatagtaattagtggagaccaaagaatcccaatagataatttttcacttttgaaaattttggtgcttaaggaaatttctaccatcttttaaagcatgaatctccattatccaaaatttttagtattataaaatattctagtttatcaattttatcttaaaatatattttataaatacaaaataatatatgtaactttcaggtaggttctaaagcataataattaatgaacatccatataaccagctagcccaagacttagactattactagtaatgagcctatgaattcttcccgtttccattgtcagagtaaatcttttttcccagaagatgttgataccacctaaatttctaatagcaaatgctggaatcaattcaaatatctattaatgggtgaggaataatttatggcttatttattgaataaaatatgcaagattaaaataatgaattgagtgatgtataataacgggtgcaatttggtagcataatattgggtgaaaaaagtttcaagagactacatgtaacataattctatttttataaagcccacaaataaggaaaaccaaataatatattgtttgcaaatgtatgttagtaaactataaaatatagtaagagaattataaatggattgctattagatttacttatttgagtattatagattttatacttccataggatattattagaagaaattattagaagttatttatgccatgaaaaataaaggtagctagtatgctggccataaggtcaaatatagacattgtgattacacatatgtagttttaccttctttacataaagtcatttacatatgactttcccttctttacacaattattttcactaaattatcccttaatattatgctcttaaataagaaagacattaaaacagattttgcagtttctgctgtcattattcactatgacttttaagacttcccccatgtgcattctaatgacaagaatccttaatatgtagatcatggacttctagaggttccaaggataggcttgaaacagttcatgaatctttgaaaatgtctataaaatttctttgattttctttttcctttttttttttttttttagtgccaggtgtttattccctcacacgtgggtggttcacatacacagcacacacaggcgcgggcaccgtgggagagggcagcactcatggcttccgaggggaggatcttggcctcagggtgtaagaaggaagaggatggtttctctccttccctcattagggcctaggggacccagcagcaaatcctgccccttccacctctcagccaaggagaagccaccttggtgacgtctagttccaacgattatactaagtggagaagggagtggcctggtcccaaccattacagggtgaagatataaacagtaaaggaaggtacagtttggatgaggccgcaagagggggcagatgacaccatcagaaacatgtgcaggggaggggcagttactgggcttctgggctgcttagtccctggcttggcaggaagggtagggaagatggatggggctcattgtttggcattgatgatgtccacgaattagggcttgagggaagcatcacccacgaggaagccatccacttcaggctggctggccagctccttgcaggttgcccccatcacagagcctccataaatggatacgggtgctctgagccaccacatcagagatgttggacaccattctcagaacttctcgtgtacttcctgggccttctggggtgttgcagtcttgctggtaccaatggcccacacaggctcgcaggccaggacgaccttgctccagtccttcacgttatctgcgatgacctctttcttctcgaaaacaaacttctcagtgatgccacttccctttcagctagcttctccccagtgcaagcgattactctgagtccctttgccagagcatgggccactttctgcccaatcagcttatctgactccccaaagacatgcctactctctgagtgccccaggaccctcgattggctttgcagtctttgatcatgccagggctgatctcccaagtaaaggccccgttagttactttgtagcagttctgcgcagccacagcaatcttgggctctagcttctggggcaaagtcggtataggcagtggggagagtgcaaaccacctcagtgttggccggcaccttggccgccttcagagtgcggatgagctcccccaggctcttcttccgtcggttcatcttccagttccccccaacgaacttcctggaggtcgccatggcgctggagctgaggtgctgaaggtcagcgtcagccttcagtgattttctaggttggggattataggttttatgatattctaaaaggtatcatgttaaaaaaaatgtaagaacctgtgttgtgagattagtatgggcaaaagcttaaggttcatttctcttgaaaagttgaattgcttcctcacagcagatactaaaaatttattacacatcatggttttctttatttttagccactaggaagctcagagtccagctaatgcttattcataataaccatatttgtctttaagtctggcttattttcttccttctcacactctctttttttgaattcttttaaattgttattctatagaacatatgtggagttttataggcatctgctattttagcctactctaatacatgaataataatgatcagtcttgacatgttttacattttagaaccttaaattataaagaaaaaattttttatatcttaatctatatactaattaaaaaatacatttttaaattgcctttctgagcttggttggaagactcattgtaaaccaaacatgacaggctgtttgacagaattgtaattaatgaatgttggccagaaacctcctctagctacttccttacctggctcccattttgcttctgtggctctcatgctgattggtgctgtctcccctgcctcttaccttgtttatcccgttgcttttcaattctaactgtgcacatctttgctggagaatttgacacaagctccctgtgctttcccctcatttgcgggtttgtacacatgtgtaggattcattctgttttcctccaaatctgcaaagcaaggcaggaaagtgtcttcagttgggcctttcttcactctacctgaatgagacccaggtgcagtagaggagaaatatgaggtgtagagaaaacaatcaaaagaaaaagaggagacacattagtttaaaatgtgggtaaaaaaggcaggtgaatttttaataaacattagaaaagaagatgtttattaaacaaatgatcccaaaggcaaaaataaaagaaataagctaatgtttaaggaaaacaagtaaagtgagaatgtgtgagaaacgatagagaataagaagggatttacgagtagacagataatagtatgcagtagctgagggaaggctggatgtggatattgtgctcagtatggaaataagtcagacaaatatgggcatgccagaaagttcatgattctgtgcttatattattttaattatatttttaaagtccctggagcttttgctcctttaccattgggtctgtagtgtagaaaatgaaattctaatcattgtcattgaaagtgaattaagcccatttcttccctcattctactttctttatatcaaccaaattatctattacactttggtgttgtttatctttcttaatgtaaaaagaaagcaatgcacaaaaatacgaacacctgttgtacaggcagtggaaccaagtaagagacttcagggacctaaaattaaatttgttaaagcaacttaatagtaatataaaaaatcttttatatttgctaatgggaaattggctgtacaggcattttaaaggtggtaaaaccaaaggcttctgtagggtattagagtaagttaacagctttgcttggctgagtgattcagaaagtctacaaagaaagcagtgatacatttgggtgtgcctgacattctccattaggacaaacatgaaatatgtgttatttgctgacttaatattcaaagaaatactatgttaataatactaaaagtaactttttttctcttggcatgctcacatgtagaatatgaaattgctttttgaggagttaaaggaatacataattgaacttggattagagaaggttcatatgtttctgcacagttccaatgttgacataggacagtgctcatttaatttgctcaacatatctgtacatttaatttacagttaagtacattgatatctatgttgtaacgttattttacttatttaatgaataaagtattatttttttccttttcaaaagaatattaccaccttgtttgactttgaaagtcacttcccagaagctaattttctcaaaagcaagggaagactatctctcaggaatctttgctcaacagttttgggatgatataaaggattttgttttaccatttctattgcatcattgtacactgacaggtcattgagcacacttgggtgattcaattttgtacagagggtattatgagaaaaatgatcccaaattatttttcaaactcatgttttctgttatcaatgtaacattatattttaccaacttttgtttgctgtaattttgtaccatgtatagaaataggggtataagtaatgaatgttttagtttgatccagcagtaagtaagtatatttgctgagggcaacccaagtaattggctcactgcattcctgaagcttatcttatcaaacagatatcagacactgctgaaagatggaggtggagggaactatccctgttactcgaagatttgtcatagaaagaggctttgtctaagcaaagaaggaaactctgtcatttcttcttaagttgctgatctagtttaagaagcaaagtatatttgctgaaacttatttttaaaaaaagtgcaggcagctctcccactgcttgttccttttctgtccagacatttttcctagaatggaaaactgaaattaaatcacttttaatggaacttagaggtaatggtgattgagaaagagagccagatgaagagaaagaaaatagatagcattacaggatggaggaaaagaaggataagaatagggagaaggtaatacttaaatttctattataaaaggaaagtagcaagtgtcaaacaatctctctctactgtaaatagaaaccatagaaacagatattcacctgctcgctatttatttacgggtagttgttgcaacaactgagtacttgttagccagcaatgttgaaaaaaaagtgagtgcagtagtgattaaggaaaacgtttaagaattaattctactaataagccaatgagttgatagtttgattttaaggaatagctacatacagcgtatgacaattttccttgcttcttcattttttgatttgggcattggttatatttaatccaaatttactagctgtcatgtgctaatactttgctagtgagttatattagcagactataactttgaaacagaattttcattcaatgttattacgtagagagtttctgaatgtgtgtttttgatggatatgtagatgtgagtaatggttgtagttatattggaaaagaataagactgttagaaatgttataatgtggatgatccttaagcatcctgtgaggtcaactgaaattggatatttgtgtactgatttcttagaacaatttttgacctctcttgaggtcaccactataacttaaattctcattagtaaagaattaaatcatttgtcaggactaagttcttcttggaaggccaagcagcagcaaacaaaatcagtattcttaactcttaaaaacaacgcttgactctacttcccctctgattactgcacacgaatctctactatatagcaaaactctgaaaaagttgcctatactcagggtcctatttttttcttctctctctgatcccccacaccacaattttaaaatttttattataaaaaagttcaaacatataaaaaggatagagaacagtaccactaggtaccattactcaacttcaacaattctcaacatatggcaatcttatctcatccttatattaatatttcttcttcccacccaatttccatccactatggtgttattttgaagcaaatcctaggcatcatataattctatctgtaaataattttgtaagtatatctaaaatacatgaaatactcttaatgaacaaacataattataaaataatctctcctaaaaaataaaataaccctaatattaccaagtatccagggtaaaacttctcacagttttatagtttgttttttatggtttatttgaatccagatttttgtgggtatgtcttgtggttgcttgtgagtccacataaagtccatttgttataattgatttgtctcttttaatcttgtttaatatggatcttctctctgcgttagtttccttgcaatttatttcctttgcctgtggaatttcccacaatctgaattttgctgactcattctctcttgaacacactgcagttagactattcttcttactactctgggaagctgctcttatcaaaagtcaccaaggaaattccatatcgtaatacttgttggtcagctcttagtcctcattttagttatctacattatttttgatacataataattatacatatttatggtgtacatgtgatattttgattcatgcatacaatatataatgatcaagtcggggtaattgggatatccatcacctcaaacactgatcaattctccgtgttgggagcattccaaattctctcttctaggtattttgaaatatgcaattactgttaagtatagacatcatgctgtactattaaacattataacttattccttctgtctaactgtatgtttttacccagtaaacaacctctgttcatcccatgaatgcaggagcattcatcccatgacctggccccgcaaaggttaccccagctctgtcaacagcaaatatcctccatttgctcaggccgaataccttggaatcgttctgatttccattttcttttcatacctcatttccagacacattgctttgcctcttccttcagcagtgtccacaaatgaaccatctctcaccagctcctgtccccatctggtccaacctaccttgaactttcaatctggcttagagtgatagtttcctaactggcctctgtgatgtaacccttaccttaaatacagtctatgctcaacccagcaggcagagtgaccccattaaaatgccaaaaaattaaaattacttctctgttcaaaatcctccagcagttttctctctgacttagagttgacttctgagtctccttgcagggcctttcaaggccctaattatctctcatttacaccatcacttctctgacttaattcctcatttctttttccttggcttcttccacttctgccacaggacttttatgaggcagaaaagtagacacctagttgaaaaatgattttataaaatttgtttagagcctagattttaaaatttattgttcaataaatttgtacaaaataaagagaaaaataactggctcaattagaatttaaaagctgaagaactggtctcatagatgtaataccttgctctatcctgaaccactgatctatgggcttaggacaaattatccctaagtaatttatttttatattaaagggaaagtgtcttttttggtccatgtatgtgtacatttatcctgaggatattggtaaacatagccagttttaaagtctattgatattgtggtaatgactattattcttacttagatatttgaattgaaatgtaaccttttaattagcttgtgctgatgtttcatcctgcctggcagttcaaattgatcttattaataactggctgcctgtgatccatcatagagtctggagaacacagtctttcttgctcaagtatgctgagtgcaagaagggacaatctgagaggtgaaaatagtctctagtatttctaaaaatgacaacaaaaggctacgttattaataaacagatttctagatttcagtcctaggcatttcacaacccttgattgcatttgcttttctcttatttccataatttaaaaatttttatttttatttttttgcttatcacaggcatgaattccattatttatgtctgcaaagaagaatttttttaatgaattgaatgcaatatatacacaccccaaaaaagctgtaaacatggaaaaacaatgtgaatcaattctgcggtgctattacataaaattactctctgcatctcaaagatgtttctccctccctcaagaaattaaacatggccatgaaatataaatgaatatgtatttgcagtaatgctacttgacattttagttgtaattaacagaacttccaatattaaccaacattaattaacaatgtaaagtgtttaaacatggattgtaataacaatgctgagtggattatgcacattcatcaatacaccacatgtttgttaaagatttctcttcaaattctgtattattaagcaaacttattaaacctgccatgtgaatcttgattttttttctctatacttattctgtaatgatcactccttccttaggatatcgtggtgttggggataggctgcatgtttgcctctttttatcttaaatgtcaatcttttctcatttacatgtaagagaacattgtaagaaaagcatctcttttttctcatgtgttgcagataatgtttttcagttttagcttgccttttgacttttattatgtttttttgctacacaaaattttaaaaatatttctataatattgcctattagtctttcactttatgatttttacctgtgttgatcttctcagaaaaaatttattgtcttccatgtgctccatatgtggatgaatctgagaaatgatacacagttcctgaccctgtaggccttagaatacaatgagggattcattttattaggaaggaaccttatgttggaaatttttctacagcttcctcttgtgtatattttggatatgaatttagttataatgtcagaattatggtgacagtctgttagaatgaagtaatgagaaataattgtaagtctgggaaaatcttttaggaatttaaaaatatctgagagtttgggacagttttcatgtgaatgatcatattgtttctcaaaataaattttattcctaatctgctgtttcatatttcatagataaattggttaaagataaccaagacatggtgtatttttataacactttcatcttttaagaaacaaattgaaagaaacctaactgaatctatttctagctgatcttgatgtaattttgatgtcagacttggggtcacatggctttgtgggagtccatggactctaattctgattggcttagatgtacacagatccattgagttgatttcttactccaaattggggtgatgtggagtttggaacataaattaaaagtattgttgtgaatgtgtactcatttctctgccatccaaattgttcaatatccactttaaatctaacttcctgcattacatctcttctcaaccattagagctagatgtgattttcctcctctctgaaattcactgaagtatttttggcacaaagtaatatgttatgttataatgacatttttgaatgttactaaaatatatttttcaggtgatatatgtataacaaatttattatacaaaagtaaaatatcttagttttcatgtgcttatgttttctgcatgaaagtaatcagtgtacatattccacttttttacttctatgcattttaaggtgctaccaagtcttcagcttaatttttctaattttcatatttctgtcagtgaattaatcataatttaaccctcatcttaacagttagcatttagactttcttacactttttatttttctaatgtttgaatagcatagcaacaaatttcttcccatataaagatttttccatgttttgcacgatttttttaaggatagagtccaagaatctgagttactgagccaaacaatgaatgatttaaggctcttactgcttattgccaaatatgtttgtaaaggatcctactgactgcacagcttaagggcttagtcccacaggagtgtcctctactgcagataccagctacaatccccaggttgtgacctttgcttctgaccaactagctataaattgggtgcttcccatgacccactcttggggtttgattagtttgctcaaatggctcacagaactcagggaaacacgtttaccaatgtattccaaaggatattgtaaaggatacagatgaacagcctgatgaaagagattcacagggtgaggtatggggaaagcaatgaagggtttccacaccctccccaaatgcactaccctccagacacatccacatgttcttttttatggagggtttatcacgtgggtatgatcaattattagatctccagctcttccctcctcatggcttgttctttctggtgaccagccctgattcagaagcccaccatgtgttaccccattagaacaaaagatgctcctatcacccaggaaattccaaaggattaggagctttgtgccagagagctcctaaaactcttatcattttctgagtgataggagcgctaggtgcatattttattttaatatttgggaaatgattttggctgagttctcggattccccaaagtaagttggcaaaaccacgagtggtcaggcacactggaccaagggaattagcattttatgggacacctgagggatcatcctctctcccttacctctgtccctgactaaggatcaaaaagaaattgagagggtctgaattgtggagtggctggctcattataatctcaaactctgttctactatgaggccaggaaaacacctgtttcagataccaactctgtaccacacaaatatggattataccttcttccgaggggtctgtggttcataaataaaaactgatcattgtaggccatgaagaaattcaatttcaaagagtaagaatttatacagtactttctgagatggctagaaaataaataggatctggaattaataaagttaaactaaaacaaacaaaaatacaaaataattggaaaaaattttccttaaaaatcaggttaaaaaagggattaagggcacaatatcagagtattttgatttttagatagatgatgatgaatgaaaggaccttcagatggaaaaggggtgactgatagatctggatttgcattctagcactgtggcttgctaatttgacctcagaaaaggcttaaaacatctcagtttccttgtgtaggaagtgattgtaagagtgcttcccttatagggttgttctgtagaatagatgaatagttaatgtaaataatttgcacggtgcctggcccttactttatgcaatagaacaatactgaattaaattgatgatttaggaagcttttattctgaagagcaaagagagaataaaaaaatgaaagtgaatttggtatgactcactactacacaagcagtacctaaataggtaggtgctcaataaatatgtataaaataaataagagattattgaacttaaaccttaaggctgtagtatctctcatagcacttaatccattgcatcatcattatctgagcatgattttaggccctggggttacagcagtgtacaaaacagacaaaaatccctattctcaagttgtttaattctagtggggaggcagaaaataaacaaaacaaagaagtaagttatagactatattagaagatgagaagcatttttgagaaaattagaaggagaaataagcagtgtgagatgagtggtgtcactattttaaatgggatagttagggaagatctcacagaggtggtgaattgaaggatctagtgaagagcgttccaggcagaggaaagagaaggtgaaaagtccctgaggaaggagcttgctaactgtgcccaggaacatggaggagcttggtgtggctggagcagagtgagcaaaacagaatggcaggtcccacatctcaactgtctgctcagtgagggcaggaactggaagtttcctctttccttccaatgacaacataaggctaagcattgtaggattcatgacataaatgttctctgcctaaatatattgataagtgaattactgaatgatatgagttgaagtatgtccccccaaagtctttatgtggaagtccccaaccgcctttaccctcagaatgtgacctgatttggaatagagacattgcagatctagttagttaggaggagaccatacgggcataggatggagccctaatatgtacttatataaaggggaaatttggagactcagacatacacacaggaagaatgctatgtgaatgtgaggcagagattggagtgatgtatctacaaattaagggatgccaaagactgccaacaaaacaccagaagctaggagagagccatggaacagattttccctcactgaccgcagaaggagctaacatgctgacatgttggcctcagacttgtaaccttgagagctgtaggaagaagatacattcctgctaagctaacccatttgtagtgctttgttacagcagtgctagctgactaacacactgaatgaatgttttcttttgatggagtccacaccctatgttaagaaaaaaacatccagtttttaaataatcaaaagactgaaattttattagataaaaatgcaattagtcaaggaacatatgtagaaaatttaaatttattagtataggaaatttttaaaaataaattgtgatttcctgtcagaaaaaatactgatggtactgagtagtgataagggttttgtgacagtataaccagttaacatcaaaactgagttaaattgcagaaaacccagttggtgtctgctggtgaaatgcttggtgtgtggggaaaacctcctacacatctggtatcagaagtggtgtattttattgagtgttgactgtgcagtaaaaggagtcagtttctacctaccatataggcacttattatgagcattttaatgactcagttttcttttcctgtagatactggatagcttctcctctgaaccctgactttgtctctgaacagttcctcccttccctttggccagcatctctgactgtcctgtccactcctatatatcagcctttttttttttaaactcaaagctcatgtttcattttgcatttttcttttaatgtcttttataatgatttttctaatcatattattttttcttctttaagcccttttataatttttgtttattgaatctgttgtagacctataggactggattacaaatgttcttctttcccttttacttttgaatagttcttactttatgctatttttatttatcctattttgtgcgtattaactatttgtgaattatgaattatcagttataatgaccttttataatttgatgattttagaaaaactccaaactccaatttttctaaatttacattgttgtgcctagtttttaaaaagttaaattgaaaaaaatttatctgacactgtactttgataatttctgtatcttttcacctttggtgacttgataagaaatatacactcagattcgattttttaaaccagtcttaaattctatgacttgatgggagcatttaggccacttatattcactattataagtattttcttctgtcaacctatttgacagtttaaaaaattatgctgtcttgtctcttttctgttaaggctgtttatttgcgactatgtttttgttttgttctagtagtatgatgggaggaagttatttcatgttaaagaatagcagtttgaacattgttggatgatttaaatatgctctctcattagccctcaaaatcactttgtgaagtaattagtaacaattactttgaattcatctaacagttttctaacacatctaacacatcattcctaatgcatttaacagtttaggatggcccacaggcaactctttaagacctgatcctattcctgcaggaacatgacaagttatacataaagcaatagccaatacttcagagatttattataaattccttatcatctcttccctactttataccttattccatgcccaattttgacacatctttctccactattcagtttgccccgttttggtattcagctgatgatttcttcaggtgttggttactggcatcattcactgatgctacatttccttccttctggtaaattctttgtagaattagtaagtcaccttttggcttctcaaagccttttgttgtgaacaaagcaaccagctctctctaacttggatcccaaagaatttggctccttgaaagacatcttatccacatccctgacattttatcatcagttaaaaaaaaaacaaaacctaatggtgggtgggcaggtgggtgtgttacacgtgtctttccttccttccttccttccttccttccttccttctttcctcccttcccccctccctccctccctccttccttccttccttccttcctggttcaacttatgtttttctattatgaatcatacttttggtgtcacgtctaggaactctttgcctagccggagatcctgaagggttttgccttgctttttacattagtacaatttgattagagaattatttgctgcacacttctcaactgaaatcagaagtcttgattctaaagttcaaaactatgtaaatgaataaatggatgacagacttagccatagcgtatatagctagagtctttccttttaaaaaatatttttatggcttttagcattatagaaacacaaagttcctcttctatgggtactgtcatgaaggagggaggagtatggaaagataaggcccctgttctctgtgctttattgagttattggtagattactctagagttattggtagattacttttatagagttattggtagaatccaattgaaatgtcaaggagatattaaggtgctgaatttttttccattcaattctactttactctttgcaataaccctgtgaagaatgtactattattaccccctttttaactcagatgagtttcctcatctcagtttaactcagatgaggaaactgaggccagaggccatgcaacatatggaatatactcctttacagtgagtaaatggcaaactttggattcaacataaacagagaactatagcttgttttcccaacagtatttattattctgtattgtggaaccaatgacagataactcatattattaacagaggattataacacacacatattagtaataggaaggacattggtaagaagtaggctataacaaataaagatataaccacatatgttgggtgcttttaggtcttctaataagtctagttttgtaaaaggtcaaaatgacaagaatgtggtttcaagctttatcatatctggaaaagagttgtttaatttgaaaacatatttatggtctaggtataagttcatgatgatttcaccatcagtggcaggaatttccttttactgctgaaattcaatagaatatttcatagtcaaatacagagtagattccatatatagattttaagataaagttttagtcattttttgaataaagtgaaagcaaacaatacatttttgtttacttttcaatctgaatatatcttttccaaaaacctcagctaattgggagcataacttttcataacaaatattgccaattagatatttactttctggattccagaattagagcttcatccagctggtcctctgcaatgtgtggctatgtctacacctttctaaacaaagaagcaatggcagtctatgtggtatcttttgacagatcttctggggcctcactaattctaatttcgtcctttcatggggcctgcaattctttctattctttgctttaaagccctctctccagaagaccttttttaaaaaggtaagacatttatgcagccaaaaaacacatgaaaaaatgctcaccatcactggccatcagagaaatgcaaatcaaaaccacaatgagatatcatctcacaccagttagaatggcaatcattaaaaagtcaggaaacaacaggtgctggagaggatgtggagaaataggaacacttttatactgttggtgggactgtaaactagttcaaccattgtggaagtcagtgtggtgattcctcagggatctagaactggaaataccatttgacccagccatcccattactgggtatatacccaaaggactataaatcatgctgctataaagacacatgcacacgtatgtttattgtggcactgttcacaatagcaaagacttggaaccgacccaaatgtccaacaatgatagactggattaagaaaatgtggcacatatacaccatggaatactatgcagccataaaaaatgatgagttcatgtcctttgtagggacatggatgaagttggaaatcatcattctcagtaaactatcgcaagaacaaaaaaccaaacaccgcatattctcactcataggtgggaattgaacaatgagaacacatggacacaagaaggggaacatcacattctggggactgttgtggggtgtggggaggggggagggatagcattgggagatatacctaatgctagatgacgagttagtgggtgcagcgcaccagcatgtcacatgtatacatatgtaactaacctgcacattgtgcacatgtaccctaaaacttaaagtataataataataattaaaaaaatgaaagaaaaaggaaaaaataagtaaataaataaataaaaacataagtatcttatcaggaaagcagatattctccccaagtaactcacgtcatttccataccctccttgatggtaaggaagcaggagccaggaaagttatattcacatgggtcagtctaatgtgtgtgtgtgtgtgtgtgtgtgtgtgtgtgtgtgtgtgtgtaagttctcaggattctatagcagcagacacaaactgtatgaaaagatttctgtgatcaaagttttcagtggaatatttttttttcaaaagccaactagttattttcaagtgtaactaagaaaatgttagggctataaaattaaatgtagctttgaaaaattattctttcttacgtacagtttacacacagtaaaataacagattttaagcttacatttcaatggaatttgataaatgtatatcaaataacacaacaataatgatgtagaacatttcttggttatatagatgagaggtttgtatgttgcccaggctggcttcgaacgcctaaacctcgcctccttatgcaccaggacaacaggtctgagccaccgctgctcccaatgtagaacatttctattacctcaggaaattccatatccctttccagatactctccctttccctgcccctgtaattccatcaccatagcttagttttgcctatgctggcacttcatataaatgcaatcatatatctacttttctgtgtcttgcttctttggcttgacataatggttttgaggctcaatcatattgttgtatgtatcattagtttgctgatttttgattctgagtaccagttgactatattgtaatttgtttctccattctgttgttgatgaacattttggctgcttcccatttttgtctattacaaacaaaactcatattaacatttttgtgcaagtctacttgtggccatatgctttcatttttcttaagtaaatacccaagagtggaattgctgcatcatagagtcaatgtatgtttaactttataagatattgccaaatatttctccaaaggccttgtactattttgactttacatatgagagatgctccacatctttgccaatatttggtattgttagtttttttgttagctattctatttgttatgaattgccatctcacgttggttttaatttgcatttccttgatgactaatgatgttgagcacattttcctgtgcttattagccaacttcatatttccttttgtgaagtgtctctttaagtcttctgcccatttaaaaattcaacatctggacatacttggagttcgtttttgttgactgcttttttgcctgagtatgggttactcttcagtttctttgctatgctgctatttctgtgattggatataggacattgttgtagctactctagattctgtcacattctttgaaaattattatttttttgttttattagataattaagttgcctgaatctaactgcagactttgtctgcatccgtgtatataaaactgcttgtagctcttgtctgttcttagtttaccattgagtatgatgttaggtgaagggtttatattgttgccccttttcagaatgagaaagttttcttctatttcaactttgctaagtgtttttgtttttaaatcatgaatagatgttgactttttcaaaaagatttttctgcatctattgagcggctgattatatagtttttctttttcaattcatcaacatggtcaattacaactgattttcaaataaccttctaaatgggataaatcccatttggttgtgatatatttttgatgaatttgatttaccagtatattttaaggggttgcaaatcagtgttcataagagatattcatctgtagtttccttttcttggaaaaagatgattctctatgattttggtatcagggtaactttgtgtcataaaacaaattggaaaacattttttatttctgtattttctgaaagagtttatgtgtaaaactgacattatttcttccttaaattttggtagaattcacttgtgaagccctgagggcatggagttttctctgtgcgaaggttttaaattatgaatgtaatttctttaaaaaatatagggttattaatattttctgtttcttcttgtgttattttgggtactttatatgtattggggaacctgtcgatttcatcttagttgtcaaatttattgtcctatggttgttaacattttttttattaatttaatatatgtgagaatctgtgatggtctcctctttaattgctgatattgataaattatttttgatttttttcttgaacaatcttgttagagccttatgacttttattaatcttcccaaaaatatcaatttttgtctttgtgcattcttcccatggtttggttttcctttgaccattttttactgttgtctttactatttctttccttctatgtcttctaggtttaatttgttcttttttcaaaacatggattgaaagggaatatatggctttgaaaaagcaatagaaagatttgcattagggcatgctaagaaaatttatgcagatttcttaatcatcttatttttgttattaagagattttaaagtgacatgacctttgctgtaaatttaattttagttaattacatacaatgggcatgaagactgcaggcagcataaagaaatcataaggcagaaaatccttgttctctgcttgtcaagtcaaactcctactaatagcactgtaatttgaaggtggaagtatagttatgtattccaggcaattatactgtatcactctttttactcataacctttgaatgatcaaccattataggtgaaattttgtctgcaccatttgacatattgatcatatatgtcaattatgaaacgtttcctcatgatacatttctcttaaaatatatttctccaattatctgacatcaaaatgatgtatggcgtgcttaggaagcttatattttgtgacccttcttttctttttatactggtctacgtttgtgtttttccaactgtaatgtaaacttgtaagcaagcatggtcttttttttttttattctttcagtgcataataggcctccataaatatttattttttcaatatatttttaaaatgtttctcagcatttaaaacatttataattcatctttttagtttctaaagaacagaaagaacttgattttaaaagttaatggatcataaaaatattacatttcaaagcaaacatgaaaccactgaacttttattagtccttttttttacttcaatttcccaactgaggtttagaaaccaaccacagtttagaaatctgtattcatatcaaaagtaaaccacaagaaatacaattagaaaaattataattgttgcagctggatgttgggtaaagtggttatactattgtctctactttggaatatatttgaaaagttttatgaggcaaagttaaaaaatgcctattataagcacatgtatggaaactcaaggagttggaaaaattgtgtcttgtcattgcgatttactgtttacaaaaatagttctgaacacaggtgaatctagagagcctatagaatatgtaatttggagaggtagctctcttaaggaaaaatgatacaaaatgatgtttgcagaatttgttgagaaaaggaatattggcccagtgcagtggctcacgtctgtaatcccaacactttgggaagctgaggtgggtggatcacctgaggtcaggagttcaaaccagcctggccaacatggtgaaaccccatctctactaaaaatacaaaattagctggatgtggtggcgtgtgcctgtaatcctagctactcgggaggctgaggcaggagaatcacttgaacccaggaggtggaggttgcagtgagccaagatcatgccattgcactcaagcctgggcgtccgagcaaaactccaaaaaaaaacaaaaaacaaaaaaaaggaatattgatctaggacaaaagaagagatcactttaaattatttagagaataataaaatattaatgagctgtcttttataaatttttttatggtagtctttgtcttcattctctttggctcttcatgtcacaatgattttgtaatactgttttctatagatggaataaatcataatttggttttacttttgaaatgtttgatcaatttttttgttgttgatagtttagaaaagtttctttaagatcataatttattattggtaatagctgcacatttaggattgcaaataaatatttatttgaatctcattttgctttctgttttcaaattttaatccttatgcaaccaagcctacctctaaataacaaataggagttaatgtttaacttcataaacagatattctgttattctacaggaacatttttagaacctgaagtttgggtcttaataagtcataactattggctatttctgacccactctgtagagtggtattattatttgaggacaagtccatactccccactttctattctgcacaattttagtgaagtcacatgtaactgctttgcacatctgccaacacactggctctgcttattatttctgcatgacaaatcatgcaatttctctcatttctagttcccttttccacaaagtggggattttgaagcacttgctctgactatccccaagagttgccttgagaataagtgccatattctaggtgatggcactcaattataaagtggaatccaaatgttattctttacatgattgttataattgtcatcgtcgtcataggattgtgatcatctgattggctatgaggttattcattactggtaaaagtggacttgttcttttgctctctgtaccaaatcttcagtatattctctctatattcttgtcctacgttttgaaattatttggtcagctttttaactttcaagtggaagactcacatcctcaaataatcatctgtttattcattcaacagtatgaatgcaagtttatttaataccatgtgttgtgctaggctcttggaatttcagtgataagtaaaagataaggtttccactctcttgagcttacatgtgtaatgggaagtaggaattaatcaaataataccaaaaacaaagtaagctaaggaaagagctatgaaggaaaggaacaaggtgctcagactcatttgatctgtagaggaaggctttcctaccacaagccccttgccttgccatccaaagaatgcactggagataagtcagaggggagctggcttgtgcaatgaatctattatcattcaccttcagagaaatatgctcctcaagcttacttgaagctctaattctaaggctttaggatgttcctttactgtgccctctttccaacagcaggtctcttcaaatctataagattttaaaatcctttcctgggtcacagtgaacaggtcagattttattatgctctgagtatttcaatgattaaaaaaaaattatcccaggcaaagagcatggtggaaatgtctttgtatcactaaaattctggaataaaattttatttaattgcaatatgcttactagtaaggcagtcattgaggcagggaatatttcagtttctcaaaacacatatttgtatataaatagtttacatgctatttacaaataatatttccattgtgtattattagagtatatcctcttatgaaaacactttgtaagagagcaaacattttagtctacttcaagacacttataattttaataaactgaattatttaaaacacaaatataactggaaggactctgcctttcacccttaccccagggtataggcttgttctggacagcgagaggatgcataattctgttgctaccatctgctatggataatggtgtgagaagagctttgcctaaggatttgatgtgctaaagaaaattctgttttcaaagctctggctgtttgtgctgctgagaataaagacatggaatagatgggccttaattgagcagaacaatttaagaagtgctggggtatacagagggagacccagaatctagtttggagtaagggttgggtaggaaatcaaactgctttgcatacagaaacatggagaattttgttgtaaaatccctggcacagagaaaggaggaagaggagtggttcctcagcaacctattagggggccctagacataagggaaaaagttttgggaaattccctcttcagcagaaaggacattaaatttcaatgaacagaaatttctggtatctgtttgaacttgttttctgctctgtattgtacttaaagctttgctcttcacaaattttatacagcatttggattgaatttgtaatgttttgtaagggttgaaaataaagaagtggggtccagtgtgaggcagtgtgaggcagagtggactggagagaaaaaggtgcaaggtgggctatggcaggatgactcaggatttaggagaagatgttaagagaaagtccccctcttctagaaacagctgtgtttttcaaattgtagtaccttggttacctgcctctgaattgcctgtggcacttgggaacctacagcatcctgagctctacctccgaccttcttagactatttgccttgtacacacttcctgggacagtcttcagaaactggagtttgagaactgaggccctagagaaggttaatccttaggtagtgataaaagaaaaacctcgacaaattaaacttagcagagtttaactgggcaaagaactgttggcaaatcaggcagtctcctgagccagagtgtgctcagacagagtccagctggtggaaagggacttatggagagaaaaagaaaagcgatgtagaaaaattgaaaagaggtacagaaacagctggattggttacagctcggtgtttgccttattttgaacagggtttgaacagttggccacctttggttgctcaaaacttggtgattggcacaagagtaggttacagtctgtttgcacatccatttaggttgcagttcactgtgtacagagaaacctttaggctgaacttaaaacgtgtaaggagacagctttctgcttgatttaacagtaacacgggtgtgtgttgggaggtagggaggtgggggctctttcttctctcagtctgcctttttccacaacagttctgaggagtaagcttgtaatgtatttgtgcaactgcttctttctgtaattctaagcaggagcaagcagtaaactaattttcagatttcagaaaagtccatcagtgcaggcagagccttccttttgtttcctgacaaatagtttgttgacactgaaaacaaaagatgtgttttctggcactgtttcaggctttctttttgagaacaagctgctctgtggatgtgttcagtttctactatttcaaagtccagtgggtggcatttacatgggttttaaactatctttagttattaacattggtgttattattggtaattattcatgatagtaatgcttagtgagtatctgggtatacagggctaaattattaaaaagaaagaaagaaagaaagaatgaaggaagaaagaaagagaacgtgtgtgcttgttctgacctgtagcagaccaggtctcacaccttgactccctgggggcacctgcttcattttaatccccccaaagcagtaaaactagtacatatctgtacatccatgttggtatctgcagctacacacacacacacaaacacacacacacatccatccactcattcacatatatgtgtgtgtgtctctgtgtcatgtatggattaagattagacagtatagtttttaaaattattttttattggtacataaaagatgtacatattctctgggtacatgtgataatttgatacattaatataatctgaattggaatatccattaccttaactatttctcttttcttcatgctaggaacattcaaataaggaacagtagattaatgttaactatagtcaacctactatagagattgtgctctgctgtactttggcctcctttagccacagctggagctggagcagctgagacatagggcaccaagtccagaaggtgcacagagcagcaggaccctgtacccagcccatgagaccatttttctcttttaggcctctggacctgtgatgggaggggctgccatgaagatctctggcatgccttggagacattttcttcattgtcttggctattaacatttggcccctggtcacttaagcaaatttctgcaactgggttgaattgctccccagaaaatgggcttttcttttctaccacatgatcaggctgcaaattttccaaacttttatgctctgcttccctgataaataaaagttccagtttcagataatctcttggtgaatgcatatgactgactgctttcagaatcagccaggtcacatcttggatgcttcactgcttagaaatctcttctgctagataccctaaatcatctctgtcaagttcacaattccacagatcactagggcagggacaaaatgccaccagtctctttgccaaagcatagcatgagtgacctttactccagttcccaataacttcctcatttctatctgagaccaactgagcctggaattcattgtccatattactatcagcattttgatcaaaactgttcaacaagtgtctaggaagttccaaactttcctacatattcctgtcttcttctgagccctccaaactgtccaacatctgcctgttacctagttccaaagttgcttccacattttcagtttttctttatagcagtgccccactctactgctatcaattttctgtattagtccgttctcacacagctataaagatattacctgagactggataatttatgaagaaaagaggtttaattgtctcacagttctggatggctggggaagactcgggaaacttacaatcatggtggaaggggaagcaaggcacatcttacatggtggcaggagagagagagttcagagaaactgccacttttaaaccatcagctcttgtgagaactcactaccatgagaacggcatgggaagaaacaccctcatgatccagtcatctcccaccaggtcccttccccaacacatggggattataattagagagagatttgggtggggacacagagccaaaccatatcaataagtaaattttgaataaaaaatgaataagtgattttcaaggtggtaggttgtggttgtggccttggcaccagctcgtgtaaatacagaagaaacacttggccttattgaaagagttggttagtttctttcacaggcatttctgagaatttaataaaacaatggattatctccccggaaaaaaatgcatgtactcattaaaacacctttgcctgtagatccttatgaaaatttcttttcacctctaaagtttggaccaagtctcttttttgtttctagtcatggaagaattcctctttgctttcaccctccacatctccatctcatatttgtttgtgaaacaatttttaaagaacaagtcacattttttccctcatattgctggtgagctcagggcttaaaactccttttgtgttaaatattaaatggagtatcttaaaactctcctttgtagttttcaaatttaccaaagatctacttcttccatggagttagtttccacatggaattatctgtaaacatcaaaggcccatatttcttgggttttttttttttccctgaccactgctgttcattaaaccaatctgctcacaaatacctttttggtttcttcacttgtgcacatacccttgtctttcatttttttagatttctgtatctctttcaaatcctttcaaagtatatttttttaaaagaacacttccatcctccttatagcctatggttaatttcctactacacactgttgatgattaaatgatttttaaattcctgtttcatcactttcttttttgatttgttacttaaagtggtcttttatctctcccttgatactctaagattttcaaaggaaaagttatatacccttcttttgctttatcttttctccatattgttagtataaaattaatgtttctaatgtatttcagcacatagaaaatgatatgattagtaccttgtaggtaatgaagttaagataccttcaagatgtttacaatattttatttgagataagagatttaatgaagctcagtgacatcatagtgcatcactgagtgttaaaatgataagccccagggctgaagcttagacataagcctctagttttgctggtgtcttttctgatggtgtgtgtgtgtgctatagcagtcataaaatattttgaatatcacctctagtataggaaaagggaagaaagatgctccctcttttttactttttgcaagagaaacctggatccagggaatacagagcaggctgcacttgacattattgacccttcttgaatggtttacacacaatgactactagctgactaaactcaaatttggtatttgagttgggacttgagtttggtctttggtctttgggactgtcatttctgaaattagtgtcctgtataaccatatagtgtcccatgtaagaagtatagtactgccccaaagcttattcgtatagagaataggaatgaacatttgtggtattttataaaataaggcattttcctaggcatcataagatcaagtgcatttactttctttggatgtgacaaagatagaaattaatgattaaagctttcaactctaacccatccatattcttctagtttctgggacaaacattatcacaaatgttgtacaaaatcaaagcagatgcattaaaatttacatttttatttcaggcttgatgattggaaatgtcattatataggcacacattttgttttttattttaaaagagaaatcaatattagctgtcttttcctcttccccaaatagaggatagttttgaaacaaaaaaagtgccctgagattgaatatttatatgaactttgttgtattctttgtaaacttcttgtgaggaattgcatacttttgattaccagactcagggaagtggattcagactataacaagattcttttataaatagtcacctcccccagtgaagaaagcacaaatgagttcacctgacttcccctctaaagaaattccttcaaaatttctcatttatgatgactataaaggtgaataacagcaacaaaaaagctttatcaaatgacccaagcaaaggatttctatgtgactgcaagtcctacctctgatacttaatttgacattgtcactttatcacaaattttttacatgtgtacagccctgatatgcttgtgttttaaaggacagaaaaatcaatttcatttttgatctttacattcacatgaaagtgttctctttgggggaaaagagagaggtcagattgaaatctgtggtctaaggccaattaacattagaaactgtgttgcaactggtccatagcagataagccttctcccataaacactttatactgcaagctatgtggcaagctcaaataaaagattacacaaaaacacaggcattatctaaagttcaatgttcagtataaaccagaagactatataaaatgcccaaattgaagtacaatgtattaatgtttcatcaacaagtatttatttaacagctccacagggcatgtggccagtgcttcatgccacagatatgtgaagttatcagactctgtccttatgctggggaggtctgtagcttcaagtgtaaacaaagaataatctaaacaagaatttaaaatgcatcgctagcttttgtatgctacatatcaaaacagaggagtagtcactgaatactgtaggaattctgagcagtcaagttttagtattgccagtataagtagtgatagcagtgtgaatttagctagaacagagggctgatatagggaggataaagttgaagaagtggcttgtgtccagatggtggaaggcctgaatttccaggttaatagaggttttactccataagcaaaataccccttatttatgtgtatgtggggagatgataaatctagtggtggtggtgtgagcaagggggagagtctgagataaatgcatgtaaagcttgtagcaacagtgcctgcctccttttatgtgatcagtaaatataaattgttaatgttaaagagaacaggcagtaaaatatttccataatccaagaggcgatgttgaattagacaagggttatggtgagggaaatggaaaggaaggaatgaataacaaaataattgcgagcattattttttttctttgtccttatcattccatgtgagtgggaaagagtagcagggctaacttcctgggaaccaaggggatactgagccgaagaaggttttgtggaaagggagggaaataattaccttgacaggaagaactctcacagagattttcttcatagtgttgtggaaacacaggtagatgcaggtgagtcataccgaaccataatagttcaaggggcatgaatcaagcctttcatttagataccataaatgactaaatgtggttatgagtgtgccctgcaaattgaaggtgttttgccaatgtgggtgacagcgatgcctgccaagtcacattcatgaggacaataggtgttttacccattataacatgtgtaactgtgatgaaaacatgaaagacactgctaaccctgagctcccacagggaaatcatcctagcttactttccctatgactggttaggccaagttgatcgacccagtttcctttctgcattttctggaaggatgttttttttttttcctggaactagtcttaagagtttatttttttaggatctgtctatagtacttgaaggctgactgccttggtcttaaggagacattataaaaagaagtcatatgttaacttttgtaaatcctagccatcagttgctgggcatgagttttctctttaaaaagtgtaagaggcaattatcttcatctgataagaattatgagttacctaggaacctagtttgtacacgtcagtgaggcacaataagattctattagatgaaatgacaaaaccttaattgaggtaacacatctatttacatgttgatttccctaaattttgattaatatttaagatatttatcttatgtaaatgttgatattcatttatactgcaatttttttttttaaggctcactgcctttttcataaaataaagcacgtccagttaatcacaggacagctctcctttccctttttggattagtaaaatggcctactgccacctggtggcagcatgtcctagtccagaacagcaggcaggacagaagagtcacttgggatgaaactgttaatacaaacaaagaaataaggtcatgctcacatattcactcgtgtcccagcatgacctcaaatccaacatgcctaaaacaaaattgataatatctgccttcaattaattatcttaaaatctctactatttattgagcatgaatgtgtcgagacataaagcactttacatgcagcattcttcttaatcttgaaacaaggctataaggaaattattattattctcacttacaaatgaggagattgaggcatagagaggttaaataacttcctaatgagatgctgtcactcttaactgttattatactctgccttctgacatgttgcaggacatattgtcctttagtcattcagatttgaaatcctggtgtcacatcgtctcttccatctgtttcgctgctcattcataatcacttgttttatattcctttgggattttttcctgtatctatcaattctaagtgccaaagtttctagtccagacctttacaacatgtaaatttttgtagcatgttcctgattgacctcttttaattttttatatttaaatacattttaaagtaatctacaactacatgttattataaacatccaaattatagagaagaatgcagagtaaaaagtgaaactcctctgtcattactttcatattctctcactaatctccaggaaagtaagcacatataatttttagtttgtgaatttttttttttttcgagacagaatctcactctgttgcccaggcgatggcatgatctcggctcactgcaacctccgcctccttggttcaagcgattctcctgcctcagcctcccgagtagctgggactacaggtgcccaccacgcctggctatttttgtatttttagtagagatggggtttcaccgtgttagccaggatggtcttgatctcctgaccttgtgatccacccacctcggcctcccaaagtgctgggattacaggagtgagccaccatgcccggccagtttgttgattttttaaaatataaataaacctataacactcctaatatttgtaatttacccttttttatacaacaatgtcctgcagacacattttatacaacaatgtcctgcagacacagaaaataacacaatctttctgtgttaatgttacagaatttacatacggtagacacttgataatttacataattatagacttaaattacatactattttcatctaaaacagaaattatattttttgtttgtttttatcaaattgaagcatttgtttcttccagcatttcttttcatatcatgagtttaatcttcttcttggttattgttaataaagatatctttcatggcatggtatgtcaataaagattattttttaaaatatcaataaactgtgtgtgtgtgagtagttgtggtattattttactggatacttttttgcatgtaagtgccaaactcaaacattctcagctgccttgtacaaatttctaattggtttactatttttatacatcagtagttctcaaatttaatgtacattagattcagctgggggacttaataaaccccagattgttgggcccacccccagagtttatgatttggtaggtatgaagtgaaacccaagaatttccatttctaacaagtattagcctaaagctgtctccttgcatattttaagttcagcttaaaggtttctccgtgcatagtaaactataaccttactggatgtatgaacagacagtaacctactcttgtgccaatcactgagtttggccaatcaaagggggccaactcttcaaaccttgttcaaaataaggcaaacatcaagctgtaaccagtccggctgtttctgtctctcacttctgtttttttttgttagtcactttccttttgctgtccataaatcttccaccaagtggctgcactggactctctgagcatactctggcttgggaggctgcctaatttgtgaatcattctttgctcaattaaactctgttacatttgatttgtctaaggtttttcttttaacacaagttttcatgtgatgcgatgctcctgatctagggaccacacttggaggatcactgatccgtatgactctcttgtgatgctttatactcctaggatatcttgatcccttctcagcactctctgtctactgcacgtaagaactgtagcttaaagagagagctgaaaatggctgtggtggacatccgggcctggggtgtgtgcccttccagaatggggccagcagaggctctaaaaggcagacttgatcagaatgacagtcctgccaatggttcaaacctcaaattaagaaacagttttcacacatgcaaagggtagaacaagctattgtttatccatcagtctccacagcagcacttgccctagagactgcagtccacagcaattgcatcacctttgagtatgaaggacgatgttataaatgccactacatgcagaaaacatttttaaacttatattcttcacttcctgatcagagctcagctaagtaaaattctaggaattaagtgaattgatgcattcagtcaaatattatatttatttcattgttactatggattcaattctagtgtgatttgctttgtaaagtaattgtaccaatctattatacaaaagtccaaaattgttgaaacaaaggaggattaaaaaaatttgctatagggtttttctacaaatgtagtaaaattgctttatctttaaccatttgatttataaaaactgcctgcttatatatatattggacagaggaaacacatcatttatagacttgattagccaaaatacaaatgtaacatatgtacataaaacttatgtaatggagtatttagttttgagaatgatatataggagacataataataattctggagaacttaatctgctagatacattgtaattcttgtaaaggcttacatatttatattttgtttaaaccttttatttttatttttgcaccatcatcccttcatttttttcaaataaaaacatacttagaagtaaattatatattttctaaatacatgcattaaaatttatgtgccccaactttcaaatgctgtattgtttctgaacatatatgcattactgtcacctctagaaagttattgaaaccattaaattgcctggatggttgaagattagaaacattatagtgtattaataggacaatgccattctgagtgatctttggagtatgatactttatatactaattcagctttacaacctgaaggtagaaaccaattatatgggacaaaaaccgctttggtatattatttcttatctaagacactgttaaaatgctcaaattttactagtttaaaataagaaatgaggaccaaaatacatggtgttctttatcctaaattccctttgcctggtgcaaaaataatggttcatattttatctgagtgttcccaactcatcctcttcacattacacttcaaggtactgtggcatgcgaaatagaagtttggctcaatttcagactcaaccatcacctctccatgcggtctcaagttaataaacttccctgggcctgagtttcctcatctgtaaactaagagcatgtgagagtgctcataaaacattatttgaaaagactggagagcaagcatgagtgagtagtgtccattgaagggtttgtcccaataactcactggagagtgttcatgcctttcagtctgtgagctagcaaagatggagagcaatgaactaatgaaagagatatttagatgaatatgttgcttaaacattttagtgttgatgcataatcaatgcactttgaatcaggaaaatgcattgagttgattaagatatttcatccatattgcttctttgcttgaaatatttctgtgaaaaagtattgccagttctggaaatagagttaaaagaatgcttgagtactttattagctttcactaaacatgcatgtattcataaaaattaggtacagttttctaacgtgttttcttaaactttatacaaatgctactacaatggtatatatcattcttttcattctttaacttactctaatccttgaacaatttatttttaaaaatttaatttattttatgagagatggaatctttctatgtcacccaggctgaagtgcagtggctattcacaggtgcgatcatagtgcactacagccttgaactcctgggctcaagtgatcctcctgcctcagtctcctgagttcctgtgactataggtgcataccaccatgcccagtcattgttttaatttctacatagtatttcattttatatctacaactgtttgtttatcttttctcctgtgatggacatttaggttgtttccaaattttcaatgccaggattctttagtggatgttcttgtagtgtatcttcttgagctcatacagcatgtagtctagaagtgaaattgagtagtacacaaatattcagctttaccagatagtgccaaattgctcttaaattagttgtaccaaatcgtactaccactagtactgtataaaagctcatttcacattttcctcaatacctaataatgttagcattttaaattgtaatgtgaaagtataaaatagtatttcattgtggttttatatgtaatattactaataccagcacatgtagaggccgtgttcctgtcatttttattaattatttggggtttctttttatgtgaactgcccaattatatccaggcatcatcatatcctatgccaatttttctactgtgttgtctttctcttatcgattataggtctcaacataatgtgaatactaatcctattttgggttatatactttgcaaatattttttccaggtttttggcttatattcaaattttatttcatggtgaccttgttggtgtagaagattttaactgtgatgtaataaatattatcaatcttttccctaaggtttgtatgtctttttgtttttgtcttgctaaagaaaacttccctagtccaatgtccttaggaagttttgaagtttgccttttacagtaggcctttaatctatgtgaaattattgtgtatgctgtaggtagcatcagtttttttcccatatggattattaatgataacagtgttatttattgagtcatccattctttcatcactaatttgtatatttaggtatcagttttttactatgttcaagtattctattgacttgtttctgcaataatcaaaaacatgcatttctgtttttctgtgaattcattacatggccactttggaaggtttccatgacttccatggtttcagttacataaacaatagtccatggacatcaatttgctcctgatactgactcaatgcagcagtcattagtgtagtctaccaaatgtttccaattttctaccttctgggaaatggtgggattggctgtttctactctctttacatttagacatgactataagacttactgccagtgggttcattcctgagtagaatctttaaatagaagctctaggaaccagcctgcgattcgccacattttccaatcctggctcagcaatcatggaagcatggagatagaaactccctgagtgagactgacatcgagcagagctccagatgaccttgagtaccttaatagacctggagctgagtgaaaccagttgtcttaaaccactgagatttttggagttgttcattactccaagatgacctggcatatcctgacagatacagttaatgtactgtaatttacaatttgataattggggaaatgataaacgaacaccctgcatttgttagaaggtaatatttatatgttaatgtctctcttttcaattccttcccccaactgccttacaattgtgtcattgttagggcactcacattctctaatacccattacctgtcaatcaaattcaagttaaattttgatagcacacatttttttttttctcccagcctgtatttcttcccttaagcctgcatttcttctcttggagtgtttacatttttaaagaagttacctgaaaagatcaatgttttacctaaaatctttaatgatgatgaccatttttatggccctacagtgaggggtcatttgtgaaaagcaggaattctcagcttcctcttattagaacacattggtttctactaacatgatatacatttgacagtggctttgatattaatgatccataattccttgttgatgatgattgcattcatgaacttgtgtgttcagtatctgactcttatatttctggaatggtaaagataagaggggaaaagataagaagtggaggtattactaaaaggatatttcctgggcagatgtatctttttcagataatctctccactgcttaaatgttcctttatattaataaattcctcctagatatgcaaaataatctcatcttatggcagggttggacagtggtggaggtgggaaaagaaaggaactaatatccagagaactatatttttaatccttcgtactttaacataaagtacatggatcctttgattggaatatttgcctcctaacagctcagaggtgttaggggaagcagtggatggttggatggagatgatgagtcattttagagcctgggacatggcagacatacatggcaggcagacactggggctttggctttgatagagggaaggctcaggacctctcagacagaacacagctgtgagaagtgatgtggtagtgggcataatcaaattcctgctttgtaggtaaaaaaaaataaatgttggtgtgggttacaggcattctgaaaaatcatctcaagtgtcagaagctaccatttatacctgtaatagttttactaaagaataccaaacatttttgatattagaatactatcttgccaggctttttcctccttaaaaaatgaatgttaattggttacttaacatttacatatctctctttttaggtggttctttggagcaatcggaagatcagatgcagagaaacaactattatattcagaaaacaagaccggttcctttctaatcagagaaagtgaaagccaaaaaggagaattctctctttcaggtaagggtattgttttgtgtcattcaatatgagcttgagagtctgcagtcatgagctttctgtgtgaacatggacacgatcatttaaaatttgccttatttcttatctttacagtagcaccaaaattaatactaaactacttaagagtaatataaaaattagccaaaaagatactgtctatggctagaagtctctataaacagtttcaaatatatatgctctagatatgaaatggagaacatggatctgctgacagtttctaacttttgcattatctaggattcttttagggaaatgataaggaagaaacaaaaactctactgttgtcaaaattatcatgctacaatataatttttttcttcttctggcatttcaattctctttgctggttaaacataaaacgaattgaaatgattaatgcaaatatatgtgattaaccccataatatgtaaaatttggtcaaatgtagtttttcacttaaggatcaagtacgtgtttacactgccccaggagaaaagaagcacaggggacctgaaaatgtactcagtagttacaggtacctaaatatatgtctttgctttgaaaaagctatatttttaggtatattgccaggttgcagaatatcttttcttgaagaccctacactaagtcatctctaaatatgaggctttctctcttcttgtcccgttctgttctctgtgttgtcaaggtctgtcatttgtgttatcatcccctttaaatacgtattattctgtttctccaattagatgtgaaccttgtggagggagaggctttgcttccctctattcctgtttccctgcaataaatgctgattaaacatgatgcccatttgcctcattgtgtctgcctgactcactgagctggaaatcagggcagccgtcatgatgccgcatgaaagcaggccataattccacatatattgggaactttgatctgacctgaactctggccaggctgtctgtatttggtacacattatccttctccacacctggtagtcccaaatatcagggcagatgggttggagctggagagaagcaagggcagtggttttgaggcaggtgttgccgagggtccgtacttcaggtcctgactatgctgacactgagacaatgtggtactccagaaccacatggattcaacttcactactacctaatccatggataagaggttagagtatgctagttctgacagttactcttgaaatgtgattgtgtgtgatgtgtcaattaccatttttttgtttttttgagacggagtgtcgctctatggctaggctggagtgcagtggctcactgcaacttccgcctcccgggtttaagcgattctcctgcatcaggctaccaagtagctgggactacaggcgcgtgccactatgcctggctagtttttatattttcagttgggacgggatttcaccatgttggccaggatggtctcgatctcctggcctcgtgatccaccgcccttggcctcccaaagtgctgggattacaggcgtgagtcaccatgcctggcctgtcacttaccttaaatgttgtttatacccaaggtgataatcaaaatatctaatgactgatatgggatgggcattagccactcagaaaagatgctccaccaggctgggacttcacaccagtccacatctgtatatccaagtgatataagtgaatatttcatatagcaatgtttttttctcattatgaaagaaacataaaaaacttttctataagcaaacagcttaaagaagaataatctagaataagactttcgaaagatgcattttaaatatcgaaatacttttcctgtcaggatttttaaaaattcttgacctataagtatatttttatgcacatatacatatacatacatacttatacccccatacacagaaaacacaatttttgttttgaaaaattctgttctgaaaatgaattttcagaagagattctgcatcaaacattagcttgtaaataatgaaatacttgtgtgtgtgtgtatgttttgtaaacaaaattctccaaaaaggaattcgaaagaagagactttattccagtgacatttgcagacccagaagatgcagccttctgtgtaaaacaaagatgcattccagagaacaaagggagggttatgatttcatagaaaagttactacccaggttcccagtcagtttcatttatgcaaatgagggattcaaacttgcttagttctgagtggtcaatacagctgaaccttgattgtttgtcaaagttgagtcctgattggttgatacagctgagtcatgattggccaaggcaagtaagttctgaaagtcccaaagttaaagaggtgtggattttcaggaaactcagagtatgtgtgtgacctctatcagcaaatggacccttggttctattttaaatttaggaccagttagccacttgggatccatcttgaagactggctctttcaggttaacttttgttaatagtgtatatatctataaatctatctatatctagataaatatacacacatgtgtacagacatatgtatatacatatgtgtgtgcatgcatgtatgcatgtatgtgtataacatggatccaagctccatttttcttttctttttttttttttcagacagagtctcactctgccgaccaggctggagtgcagtggcgccatgtcggctcactgcaacctctcccttctgggttcaagcaattctcctccctcagcctccccagtagctgggaatacaggcatgtgccaccacatctggctaatttttgtatttttagtagggacggggtttcaccgtgttagcctggatggtctcaatctcctgacctcgtgatccatcctccctggcctcctaaagtgctgggattacaggcgtgaaccaccacgcccggcccaagctccatatttcttatttctgtcttgcagtatcttgtgaacatttttgcatgccctttaatattcttctattacttttagaagttgcatgggtatatcatcatttatttgacttattgtatattttgtacattttaattattttgctgctataaaatatgatacagtggacatccttacagataaatagttgaatatttgagtattttcatggtaatatattcagaggaagaaaaatctttttgaaatctttatgcttaataagaagagttataagagaattccttgtttaaatacatccctgattgtttatttgtctttggcaataagtgtcaaattaggtggcagctatttagtcaaaagtgagatcaaatgtttttagattagcgttaaaaatatagaagaatgaggcagggtgtggtggctcatgcctgtaagtaatcccagcactttgggaggccgagctgggtggatcacttggggccagaagttcaagactagcctggccaacatggtgaaaccctgtctctactaaaaatataaaaattaatggggcatggtggtgcacacctgtaattccagctactagggaggctgaggcacgagaattgcttgaacctgggaggtggagattgcagtgagcagaggtcacgccattgtactccatcctgggtgacagagcgagactccgtctcaaaaaaaaaaaaaaaaaaaaaaaaaaaaaaaaaaaaagaaagaatgatattttcatgaggaaaacaaacttaaagtagaattacctgaattatatctttgaataatggccaggctacagtgactgttcagaatactctctaagtagaatgttatggaacaaaacagctttacaggcttagaaaaaaattacaaggatattggctgttatgtgctgtgaatactctggagcttgcttatggatttaggaagctctgcaggccttgcttagagaccagcatatcattatgatttcttttcaatgaagtcaaacaatttagtcttttaaacaaattatctgattgctatgtattcactgggggacaaagtaaatgcataccattatgttctactgaaagaaaatttttcctattagccagagggaaggctatacaggagaaaaatggaaaggaaagaaaaaggactttcaatatatccacattaaaacaaacaacccaattgctgactgttgattactgctaaggatcttcagatataccactctagatttatttcttagtgcagttgtcttcttaatcagtctgaattgatggtcttcaattttgctgactgctgtgctgctaaaggaaggcaaaaaatatcccttttctatctctttctttcccacttgagtttccttagaagtattgtctttattccttgagcaacaatggcttggagctgtcagaaaagagcttcatgagggtgcatgatttattgatgctgagtgggctgagaagtagcagcccaaggttgggtgggtgctaattgggttgttgtgatccctgcacggctgtctgctcttgtgaggtctgagtagatctgaaaagagagttagggccacgacacctctcataatggcaagacactaattagctgtgaattacagcagcgcttttgaatattacatattatatgtggtagccagagaatctgtcttcattagatgcatgacagatagttttagtgaccttactcttatttgtcattggtagtgaattgtttttctgatgaaaaataccaaattctaactgcatgtcaactggtttggctatttcttgacttcaatcaattactttaaaggaaactattattgttattaccattaatattaatttactggttggtattctataagcattagtattatttattgtttaaagtacacttaaaaaatgcactttagggtctaaaattgagctgcagctgagtttttcagaggagattctgcattgaatactgtgattttacttgagacaactctgcacgtaaaagcctacagagtagtagagctttcacatttttcgtcagtgaaacctgttcagcaccaagcaataatatattgaagataattgaaaagtgactacattgaggccataaggcaaaagagctcatcaataatattcaaggtgatgcatctaggagttgacatatacttatacctttgtttatttcttcaacggcattcagtatgcccactgtgtgccaggccctctagtaagtgaaaggcagccaagaccagcaaggcacagtccctgaactcagtctagagaagaattacaatacagttattttgttgtgagacaagagagggcaggggccaaatctctgaggggagtcagggaaggtatcaatttgtgttttaaggtggcagtgtgtaaattattatttctggcaaagacaaatgcacagagttgtgagtttttctggtgttttgtggaatgattggaagggtggaggatagtgcaggtgtgtgggtgcatgtggggagtggatgaaggcgaggagggatggtagaaaataagtgtggaaaggaaagttggaactagactattcacgaccttgtatatcacactgaggaatttggaccttgttctacagagcaaagttttaggcagaaagtaattggtgtaatctgtctgttagatgttacctttgatgttgagaatggatgagagatttgtaggcaatagtccggggggatatgagaggaacacacacggtggaatcactagttgctgtttgaaattataggtgcaagatgagcagagtccatcagcattctgcagacagaagcaacagatcccaagctcagctggctgcactgtctctgctctagcagagggcatccccagaagcatagggcccctctgttgctcttctcttttatgagcaagtatgggagtcgcccaaggactggggataaagactgctttggtgctaagcagtctgagtttagttatcagttatttgcaaggttctttggaaagcccagcacctatgagcttgaagtgctgtgggaaatggcagcttcttttgctcagaagaggaaatcacttggcctgtgggaagctgagttcagatgcagtccctatggggtgacagtgggacaggcctagtgaaccctttgctttgcaatccagaaagagttcccaggattcttttctacacagtctcctttctccataaatgagagcttgaaccaggacagagttatgaggaacaaagagaaaagaatagaggtgagaaatatctagaagataaaactgacaggaactggtgactaatcagaaatggggcaaaataagggagaatgagattctaggatggatgtcagatctctgacatgagggattgggggatagtggtagctttggctaaatgaggtattaaggaggagatgatttacggagagatgggaggaaaccaagggaaataatctcagaggtgcttgagacacatatgagtgaacatacaaatagccattctccttttttttttttggtcagggagacttgtttgtgctgattttgagcagagtactttctatgataaaatttcctcacagtgaacttggagttcccatggagtatgcaggacttttataatagtagtttgtgatcactgtgaagtcacttcttgagaatataataggcctctctagtggcatagtttaatggaaaaataagcatattagaattttcagaacgaaatacatgttttgctcttcaaagtaattgactatgattgtacaaagtattgcacaaatggtagaactgcctttttagaaagaatactactttatgtgataattatttgatatcccttagctggggtaattatgtgttcattaagggcagctttgatacttggaagtaggcagaattatccaaagcaactttctgaataatatggatgattaacttgaatgatactctggatttgtaactttgtaaatatttctgcatgccttgtaattaattctaaaggcaattcaaaaagtaatgagaacagtaacagcttccttaggaaagttgtgtctcctttcttgttgaccttgtgtgtatccttcatgttgaacttacaaattaaaagacttatttaaatttgagtggctttttcattgtaggtaaaaatatgcatctcaaactagattttaaactccttcagtagaagaacatgtttttattgcttctatttcatgcttcttctctatcttcatagtttacagtagagttttgtaaaatcagtagccacacaaacacctctttacattgtagtctacaacgtgcagagataatcaaggacattgtcactgccttaaaccttagaagtctgggccatgtaggattacaaataatcctcctatctgctgtgtttcagacttattttagaaagacaatttcacaccttgacaggtcagttttttccaggtaataagacttttgtagaggaaacacaatcagaaggacatatcacttgttagtatgaccctctatgtctctgccaggcacagagttcgtcctaaactcactttatacagacccttcagctaccatgattctgttcaaacttttgagatcttcagagtcattcgaatgtgactcagtccaatcacaaaatgttctaagtttcatcatcagtcccttgagccattcattcattcttcattcaaaattaatgcgaacattgtggccactagtgtttgtcagtaattgtattaccattaactacagatgtaaagacaattgtatgtcccaagaagagacacatattaaatgactggaaaaacaaaaaaaatattgctccttgaatttattatgcaatgaaacttctatggattctgggagcattttgatattggttaaagatgttttgctttttaaaaagtgcacatgctgcagaaagagaatgttatgttaataactccagtatctcatataaaatgtattaaattttaaacatgttggtgccatcttagaaaatgccttttaattaaagtcataatttagttttgttcagctaaattgcaaatatcattgcctataattgcaagtgactttttctgtgagttatggtatgtactgccttttctgaacattaccaatgataagttatatttcaaatgttttaaatactctataaagttaaattaacattttattatgtgcacgtgtgtctgtgtttgcatctgtacacacacatatacatgcagatgcacaggcaaagaaccttttcctctagggcactggttcatgaagaatcttttatcttactgaaaattcataactaacatttctagaaatattctttacaaggcttgttttcttttttttccctcttttgtttgtctgtgaacccctcatattgacttgtcttaattttcttttcttcttttgcttaccttggtttgttaaaaagattttttgtattgatattttcagcaatttggaggaaaacataacaaagaaataatgcctattattaccctttggatgctgctttataataatcaatttcagatattaaataaataagtaggaagttgataagtcatgtgagaaattgctatatttttgtaattcatgatatattctacccccttgattttttcattttattaacagctgaagtaaattgatcctttatttacattttgtactttcagattaagatagtggctggagttagcatcctcctacttcctattcaactattcaaaacatacataagagatgcagaatcatagtagctctataaactaagtctatcaaccaatgatttcttagaatctgggtagatactctcacaccttcagtgtgaatgtaggttgagatgttgttaagtggctggaatagattttgacctacgcatcagatcagtgctagtcaagttgaagataggaggatgctttcactcatgctgagtgtgtgcccctgttttagagaggcaagatgtgcagttagtggaaaaccaggcagcttctgctctcctaagtggaacgaactcagtgatctggcccttccctaggcaccacatagctcccttcatttctatttacagatttgttgtctggtgtgggctttcttcctggtttgcagatggccaccttcttattgtatcctcacatgggagagaaagagagagggctttggtctctttttcttcttataagggcattaatcccattatggaggctccacccctcatgttctcatttaaatttaatcgcctcccaaaggcttcacctccaaacaccatcacattgagatttaagccttcaatatataaattttgagaaagggacacaattgcaattgcaggtcataacaattgcaaagtattaaattctgtttcttattgtcagtggccatgccagtaaagtaggggaagatccactctttttctggcaaaatcatagggattgaatatttgttagacattgctaatatgtttagagacttaatgcatttgcagccctgctgtgtgtgagttaacagaagaaagtgtagactcatccaaatgcatagcgaggaggacaggcacatgtttttctaagtaccaggtttcttttcattcaaagatgagtataatgacaaaaaaaaggcgggggggggggaggttgtgagattctggatacccaataacaaaatttcccaacttatcttctaggaccccaattctttgataagccaatagtgtttcactggaaagagggggttcagcagttacgtgcacttgaaagtaccccatgttacattatctctgccttgacttgacaaagcatactaaagtctctgataagtcttatggcaaagaaatagaactttttcaaccctgaatatctcaaactacttggtcatagaaccattaagttttctataaaacatggtttgggaaaaagaatactataagagatgacaataacgtgaagatagaaaactcctacatttgagacataattcactgaaaggaacagtagataaattttgaaatcatttgatttgaaatctcagaatacaagaaagcacaaattctatgaaattaagcataaaaagcagcatgaaaaggcaattgatgagagatatcacttagtgatataaagagcatacttgagatgctctttggggagaaagaataatagattaaagtttgtgaggacagatgatgcacaaagaggagacatttctttgaaatttattagaataattaaatgcaagcaatagttaaatatgtagcataagaaagctttcctcagttcttttttatttttcaagaaagcatgcttacatttgcccttaatttttttatttgtataaatttatggggtataagtatagttttgttatatgaatatattgtgtagtggtgaagtcaggccaagccctcttttatattaatgtttaaattcgtgttggcagattgaaaatacagtgtttcaagcaaaataagtgaaaacatttatacctagggcatcttttcaagatattataatatcaaggaaaaatgaaaaaaattctgtgaacatccagggaaaaaataagttaatcacaaaagaatgagaattgagttggcttcagaattcttcacagcattacgtatcaaaactcaataaaaacatataaaatctttcttatttttctcataacttatttaaaaagttgataagtatacattttgcctgactgttgataaagttgataactgcatacttccacctaaaattactaaatgttaacaccttgtgacatttactttctccctctctctcgcctttatttgtatatctacatacatccgtgtataggttgtagatatcatgtcacctcaactttaaaaattttagcattagtatttatgtcttatgaataaggacactctcctacattattacatttccattattaaacctagaaaatttcagatggatacaacaatattatttattagagttcatactcgaatctctcccaatgtcctttctggttctctatttatttgctttttgatataatagatagaagtttatgcattgctttggtattgtatctcattctcttttatttagaagagtcaaaagccttcaatagctctcctttacaaacctcatacattcctatttaccttgacatttaagcccttcatagccttgctaaaagccatttcttgtctaatcgtttgtattactttaagttaaactatgctatgctatgacataagctattgcacgattaagacttgcacttcccatcttctaaacctttctctttactttctttgagcaaggtactcaagacatagcatggtgttttgcatgttgaagtgttttctttataactgttttcttataaaggttgaattgttttaataagaatggtactgttttttttcctggcctcaatttgtctttatatagaaaagaaattttcaaaactatttggagaaacactttgaactatttttaaccattcatttaatcattgattcatacatttactcatttatcatagcactttcatttgtgtttactatgtgacataattatgtaagcaaataaataggtcacactatgacaagcataataatcaagttatatgcaaagtgatttaagacccagaaaagagagcaattacttcttttgaagggatttataagggagggcattacaggagatgagacaacaaacaccattatgcttagtagagagtaaaagcaaatggaaaatagtggcacagaatttgtttttctgttaagacaatgtttattattaagaacctttcttactttgaaagagcaaaggatgaatgaaatgaaaaagttatttctttgaaaggataaacaaaatagactattagctaggttaactaaaagaaagaaacaaaaagagagagagaagattcaaagaagcacagtcagaaatgataaagtgacattatgactgggaaataaaatttttgggaaataaaattcccaaaatagaccaataatgaatactgaaactgaatcagtaataaaaaaatctaccaccaacaacaaaaatcccaggaccagacagattcacagctaagttatactagacatacaaagaagagctagcatcaatcttactgcagctattcaaaaaaattgaggaggagggattcctctctaactcattctacaaaatcattatcatcctgatacaaaaatctggcaaggataacaaaaaaataatactgtaggctaatatccctgatgaacatggatacaaaaatcctcaacaaaatactagcaaactgaattcaacagtataccaaaaagataattcatcatgatcaagtgggttttatttcaggaataaatggaggatgattcaacatatgcaaattgatcaatgtaactcaccacataaacagaattaaaaacaaaaattatgcaaccatctcaatagatgaagcaaaaacattcaataaaatccaacatcccttcataataaaaactgaacaaactatgcatcaaaggaacataactcaaaataataagagccttagatgataaacccacagccaacatcatactgaatgggaaaaagttgaaagcattctttctaagaactggaacaaaacaaggatgtccactctcaccactcctattcaatatagtactggaaattgtagccagagcaatcagacaagaaaaagaaataaaagtcatttaaattggaaaagtggatttcaaattgtctgtcttcaccgatgacgtgatcttacacctagaaaacctgaaagatttctccaaaagactcctagacttgataaataacttcagtaaagtttccagatacaaaattaacatataaaaattagttgcatctttatacacaaacagcagtcaacctgagaaccaatcaagaactcagtcttatttgcaatagccacaacaaaggtaaaatacctaggaatgcatttagccaagatggtgaaagacctctacaaggacaactataaaacactgatgaaagaaactgtagatgacacaaacaaatggaaaaacatcccatgctcatggataggaagaataatatcattaaaatgactatactgcccaaggcaatctacaaattcaatgcagtttctatcaaattaccaatgtcatatttcacagaattagaaaaaaaattctaaaattcacatggcaccaaaaaagagcacaaatagccaaagcaatcctaagcaaaaggaacaaagttggaggcatcacattacccaacttcatgctacattacaaggctataataagtacaacagaatggtaatggtacaaaagtaggcatacggatcaatagaacagaatagataacccaagaataaagccacatagccaaaaccaactgatcttcaacaaaagttgacaaattcaacaataacgaaaggacaccctatgcaatatattgtgctgggaaaattgtgtagccgtatgcagaagaatgaaactggacccctctctctaaatacaaaaattaacccaagatggattaaagacttaaatgtgatgcttgaacctataaaagtcctataggaaaacctaggaaaatatctttcagacattgacctaggcaaataatttattattaagatctcaaaaggaaatgcaacacaaacaaaaatagacaagtgggacttaattaaactaaagagcttctgcacagcaaaagaaacaatcaacagagtaaacaggcagcctacagaatgggagaaaatatttacaaattatgcattcagcaaaggagtaatgtccagagtctataaagaactcaaaccaatcaacaagaaaataacaactccattaaaaagtaagttgaggacaggaacagacattcctcaaaagacacagaagcaaccaacaaacatgaaatactcaacgttgctaatcctcagagaagtgaaaattaaaaccataatgagataccatcctacaccattcagaatggctactattaaaacatcaagaaataacagatattggtgaggatgtggagaaaagggaatgcttgtgcactggtagtgggaatgtaaattagtataactcctatggaaaacagtgtggacatttctcaaagaactgaaaatagacctactatttgactgagcaatcccactactgggtatttacacaaagtgaaagaaatggttatcccaaaaagacacctgcacctgtatgtttatttgcagcagtatgcacaatagcaaggtcatgtggtatcaacataagtgtcaatcaatggttgaataaagaaaatgtggtatgtattttccatggaatactatactaagaaagaatgaaatcatgttctctgcagcaacatggatggaactggagggcattatccttagtgaaataactcaaaaacagaaaaccaattatcacatgttctcacttacaagtggaagttaaaccatgggtacatgaacataaaaatggaaataatagacactggggactcaacaaaggggtaggatgggaagggagtgagagtttaaaaatgtatctatttaggtacaaagcttactatttgggtgatgggttcactaggagcccaaacttcaccattatgcaatatattaatataacaaacctgcatatgtaccccctgaatctaaaataaaatagataaataaaagaattggaaattgttttctgtgatgcacttttgaaccatttagcaaataaaaagatctgtaaattgttagtctattaccaccattatgcttgaataactaacaaagctactggattgtatatattatcaatttggccatgataaatccaatatggataatatttttggatagctagaaagtgccagaactgagattgactggtctctctgcttctcagaccgagatatcatgtagacataatgatctcaaattgaaaaaaaatgatctcaaacatttgagaagacctggtgcgggttttggattgaacaggaaattaaagctctttggccctggtgatgaaagtcagtcagaaagagggcatccagttcctctttcttttcactgggcttgagaaattaagttcagtttgtatttcaggtaaataacaactaaataaatgtttgaatcttaaggctgcctgattcttaaatcaaataagatatgtaagaaatttacttttgttattccaagtgacaaaaatatgttattgaaaaaataatgtgaaatgaagtccaagtagtgtatcgcgtatacaaacaggacactatgatgttgagtgctactcaactcttccctccatactcttaatttacatctgtgggccactggagggctttcactcaaacatgtgctccttcttgtggcatgtcagaagtaacacgccatcatgtagacaaaacatagaaggtttttgttaactttgtttgtttttagttttcatgacccattaattcataaaaagaagaatatctgattttagttgaaaacaaatgtacaatttaaaagcatttttagtaatttatgctatatgaaaccacttccatacagtagcagttttgctttatgaacgtcaaaaaattgaccaaagcttaatttttcttaatggtttaggcacctagtttttatatggtgatagttacacaaaatgtgttcatgatataaaaatgaatgaaataaacacaatccaatttaataagttattgtttctaattttaaaccatgtatctaaaatgatatatgcacattagctgctttataactatttatcagcatcctgtcaatcatgaagtcatttataatgcattttagaaacatgccttgcattatattattagaaaatttggcacagaaactgcaatctgagaaactattttgttgtcttaaaagcctatgcattgctggaattttattttcctatttgtttcagcagagcagggactttctttcaatcccctctctctgcagagctatctctttaccacctgcagatgtttgtaaaaaaggttttgtgaaaagtaaagtaagtaggaagcacaagcataaaagaaggaaaaataagcaaaaattatactttcatttttacataattatagtgaacagcactttctatatatctgttgtatgtatagtcccgaacaaagagatgatccatgccttaaagaacttgtgattcatttacaaacccatccattcattcatcaaatatttatttaatgcctactaagtgccagtaagtattcagagggctggactaaatggcaagcgatacagttcctgcattgtgaagcatatgttctaattggcagtagaggggtaatgccaactaaatgaaaagagacacccgtataggaaagatattaatttgttgtgttactctggtttttataagataagcaaatggtcaaaataaaggaaaacacttaattttatgtgtataataataacgagttagagtagaaatgaggattgctttcttatgtcttcaatttgtaagaaatctgaaagcagaattttatgctaagattatcttgattggaaggataaggtcatcagagctccaaatgggttctcccattaagagtattgcagtttatgataacgaactctgcagccagggtgcttgggtttgggttctttctattactagaactgtggctttaggcaagtcacttagcctctccatgcctcagcttccttttcagtaaaatggagataaaacatagtacctacctcttggtggtggtgtttggattaaatgagttaatgcatgaaaactgcttagaacatagcctggcacatagcgagcaaaatcagtatttgctattgtcattagcactcaagcctgagcaataaagaaccttcatagagcttgtcccatgattgtagcttggcatccatggcctatgaagagattgagatgctattataattgcctgtgggaaggaagaaagaaggtactgggtttgttcttttctctccggaatttgtgatgtagcttcagcattttgttttgtttgtttggataatttagtttgcaaaaaaataagaattaggcaaattaatggagctgctatcaggggtagaagggatgcccacagagcagaatcccagtgtcaacacacattactcgatgtataacccaccacatttccctggatgtgccttgtcacaataatgagtctctagaattttcagatttcatctaaatgtttgtggttcagttttctctttcagaaagtagagatcataatttttctccaccacgtttgaatgttatgataactttatttctgtaaaccttcttgctagaatcttagaagtagagaacttgaactgaagagatcacctctttaaaacactgttttcataactgaaggaattaaaggctagatagagtgttactcatccgtgctaacatgactagatgtgagcagatagctctaaaacaggatctgttgatattttttaaacattatacagaagtcacagtgctttctttgaaatgtcctgtattaatcacttttacccataaatctcagtggtttaatcaagctatataatggctgctggtttggtcatggctcgactgggctctgtctaaggtagacaggcctagggtaatctccatgtacctttcattctggaactcaggctaaaggagctgctgctatgtgagtcatgggtttctcatggcggagagcagaagactaagaagaagcaaaccaaattatttaaagcttctgtgaagacagctgtttgtcatggttgcccctactcaattcaccaaagcaagtcatttggccacatcctgagtaagtgggatggagaagaatgttgcatctaattgagagtcatggcaaaggctaggagagaatgaataattaaccccatgtttcacataaatagtcccagacataaatttgtacacatattaatggtataaaaatagcctcaaataactgttcccccccaaccaaaaggcaacatcactgtattgaaaagttgtctactataaaatatatgtataatataagcactcagcattctaatcataatgattttgctgcttgttgggagaaagtattgatactttcctctttatcttttttctttatctcaaaatcactccagattggaacagaagctctgggcatccactgcgtgagcctcagtttcatcatctataaaatagttgtagcatcagtcctgtctacgttattggttgatgagaataatatctacagagtgcttcccttgtgctagacactgtcctgaacatttctacatgttttagcatatttatttgaagtaggtactattattaccaccaatttacagtggaagtaactgcgtcatggagtagctgtccaaggtcacacagctagaaagtaaagaatctgaggtttatagccaggctatctgactcagaacttatgtggacatccaccccattgtacaataaaaaagaatatgtgaaaattctttgcaaactctagtacagaaatataagattgagatctcattcatcattccttttaaaaataaacattgtagcatttaaatatttaaacacattactaaaaattgtagttgcagtgttttgccctcaccgctgtctctatccttgtcttatatcttagtccctgaaaggaaaagtaaccacccaaagagagctcatgaaagggccgggcttagtgatgctatttgtgtggggttttggaaacaagtaatagtagttactatgcatggaacgctcaccctgatttaggtgtatttattataatcttcaccatgatcctgcagggagtgttctttttggctttacagtgaggaaactgaggcttagagaagatgaattaattgatttgcatgtaagtagcagatctcatttccaatccagctctctgtgagaccatgctcaggctcttccccaccatgctgcctttcaagtacaaggctcaggatgatgtcattgtaattgtcagatggtattccacccacaaggatgtgcttattgaagctttcttgaattgtgatagaaaaatgctccatgagctctctaaattaagatctccaaatgaagatctctaaattatcaccaaatcggcacatcgaaacaaatttgtttcaaaagttcacaacagaagtggatactgatcatgtgattcaaagtctaattcagaagctattggagttttttttttttttttaatctccccttagactttgtgtgaatggcagagggaaacaggtataggatatttcaactgagatttcaggaaaaaaagaaacaaaacaaaaaacaagaggaataaacatcaaaactcatggaacaggccatgttctgcttgggacttacttctgtagattcattattagtgcatccatttgtttatctacatatccatcaaacatgtgctgagaactcttattgagccaataggttgcagagcacagacatcaaactatttggatttcagtctcagctccatcacttaatagttgagtggtcttgaacagactgtttaagccatctcagcttcactttcccatatcaggactgatgtgagaattcactgagataatgtgtgtgaaggtcttggcaccatgtttgacatacaataagagctcaataagtgttagtcatgatgatgatgataatgataatgctgatttgaaaatttcgtgctaagtactaggataataaagaagacatggtctctacaatcaaagggctcaaagtccagtaggagaagtacagggtaaatatataagcaatgatgtggaatgaattcaataacagaggtagatacacagtggatgctaaggacgaagtgagctactctgctcgcttacactgggcggtttcataaaggaggagatgcctgagctgggccttgaaaaatgaattaccctgtaatatgtaaatagaatgatattctaccttaacagtttgtgaaaatgcacagagatagaaaacaccatagtacattcagggagcaataaataagcatttaaaccttgaggataagatgcagtggagaattctgttatggggtctgaactttaggcagtagggaaacacttgaagagctttaaaggggacagtaacaaggtcagatttgcattttagaaagatgatgttggtgactggaagatggacagtgaggctggagacatggaaaacagactatgagctactgaaacactctaggcagagaaacagcaaggtggtggcagtgcagaggacaaattgatagcgtataatgcccagccagaattaagaaggcaggaagagaggaatccagctttcatgtctgggtttcagaatagcagtgccattcattgagagagaggagtcaagatggggaggacacttggggaataagataatgtgaattgaaattttggtttgtatctgtaagactgaggaaaatagagtcatggtattagatggagaaaaatactgtaagaaggtaatgcgcaacctagtatttccctttaagaggtgtcagtcatagaatagactttatccaaagcattatcatcttgttaaacagtagctccaaggttacttgcttttggagctgtgagcagtgccttgtgatagctgcctaaaagtgcttgctggttgacaatagagggagatatgtagggattaagagtgtgggcttcagaatctcactacctggttttgaaccatagcactcatagatatttgctctgtatcctgggacaaattacttgatctcttcataaactagttttctccactgtaaaccccatcaggttgttatgaggattagacaaaatattacataaaaaagcacttagcacagtgcttgcttaggtcaggtgctcaatacaaattcaacagatttttttttttttttgagatagagtctcactctattgcccaggctggagtgcagtggtgcaatcctggctcactgcaaccttgtcctcccatgttcaagcaattcttgtgcctcagcctccctagtagctgggattagaggtgtgtgccaccatgcctggctaaattttgtatttttagtagagatgggttttcaccatattggctaggctggtctcaaactcctaacctcaagtgatccacccgcttcagcctcccaaagtgctgcgattacaggcatgaaccaccccaccaagcctctatagcttttattattactcataaagaatgctatgttttgcactgaaagatggagctgttggcccatctttcattggaatgtgtactttgagctgtttttctaggaatagtgatggataggactgagtaattcacagttgttcacctggttcactcctgaatgagtaagggtcattaggaagatgattagccagccttcaaagtgcaggctgtaactaaggggtggtttgtctttatgtgaagtgtttacttgtatgttacctgacctacatttgcaccaaacaatgacaaataaaagtaaacatagtctaccctctttaattgtattagtcaggattctctagagaaacagaactagtaaagtatatatatgtggaaatttattatgggaattggctcacaaaattgtggaggctgagaggtcccatgatctgccatctacaaagtagaaacccagaaaggctggcaatggtataattattcagtcagaggcctctgaaggcctgagaagtgggagagctaatggtatgagtcttagaactcaaaggcttgagaaccaggagctgtgatgtacaagtgcaggaaaagatggacatccaggagagagagtgaagttgcccatcctaccttttttgttctattcagggcctcagtggattgtaggatgctggcccacattgatgagggaagatcttctttactaattcaaatgctaatctcttctggagacatcttcacagatactcccagaaataacactttactagctatcaaggcatttcttagctcagtcaatttgacacataaaagtaaccatcacagtaacctttgtctaatccttgtttgaaataaacagcatgggtcctcattaaatatgatgaaatttccaagaaatagagctatctgcttgtagaaatgagaattaataattatcaaattaccaatagttttcttgcatatgtagaaacaaggtgaaaaaatgaaatacagtaatctgctatgaaaataaattagctaatacaaaaaatactcctttgtatttccaaaggagataaaaattgatttcaaggtattttaattaccgtttgttacctttctgtatgactttcatgtttaccctgttcaacatgtctactaattgctgaaattgggtggggaaaaagagaagaggaattgagtcctgagattttccctcattatggggaaggctttttgagagttttaggagagttttgagagagaagggaaagatttccctcagaaagctttggaacatataacatcctactgagaaaataataagttcttacctttttttctttgatcaagaaataggaaattagtggttaaatgtttctattgtttctactatcactcatatggctagacttagattccagctctgaaaacaactaacggtgtacttcagacctctagattttgtttttctcatcagtaaaagaaaaaaaattaaaccatctttaaaatttctgatagttcacatatcatattctcttttctccatttctttttcattaatagaataagagaagttgtgaagaatgtctagtctactactgtattgtctttgctgaggaatctctcataattcgaagcttcaaagctcccataaacaaaaatcctggagaatcagcctattttattgttgggcagttcagttctttagtaattctttcttatgtttagtaagtgtgccgtgtcatttgattatcttttcatttgtgcatgtatttccatatatctccaaaaggttttaagtcagcatataatgctgaaacataatataaaatatagctaaacataaaaaagacaaaatcaatgaaaaagaacagagatatagatcatgctgagtctctaacagaagataattatcacagtttagaaatcagtttagccaggggttctctggcaggtaaggcaaaaagggaaacacattgtgcttctcactggcttatgtataagaggagacacattataattttaagcattaagttcaaagagaaatgagttcatgagttctttatggaaagaatatcaagtatcataccagacagtgtcttcagcaaaatgtgcagacattgtctttaagttgttaattctcatactgcttttctaaaaaagctggaagcattatgtgtatgtttttattttaaaggcagtataactttattacagttggtttggaaagcagagggagtaaaacatccacaaatctgccaatctaacacaattattttcatgttggcaaatttaatcatctttgcccatatacaattatggtttccacaaggaacctcagctggattcctttagtagtacagggctctaggacacgtgagctgccagatgtatcctcatgtttccgtatgatattctcttaattttgtatcctaccatttcacttaatacattttacatatttttcttgctgctagataatttttacaattacataatttttaaaaacgactctgaattttcagatttgctacaatttaacagtcatttaatcctagaaaaatgctctagtgaacattctttgcaaattgcttttcctcttctgggtggtgaactgtgttgttgtagtttcccatacaaatacctttattgaattccctgttggtaactggtccgtcttaatggacattataagagtcagttctttgcaatatattagtgtatttactattaagaatgttaatgatgatattgctcattgtattttctgtgttttccttatgaggacataatgtgagaaatttctctctcattttaatatcagaaatatagtcatgcatgacttaacaaccaggatatgttctgagaaatgtgccattaggtgagtccattgtgtggacattaccaagtgtactcacacaaacctaggtgctatagcctactacacacttaagctctgtggtatagcctattgctcctaggctacaaacctgtacagcatgtccctaaactgaatactgtaagcaactgtaacacaatagtatttgtgtatttatatctaaacatataagcgacacagtaacaacatggtttaaaatattagaaatgttacacctgtataagcaactaaccatgaatgtaacttgcaggactcaagttgcaggaccctgggtgtgtcagtgaaggcctgtgatgtcaatgtgaaggcctgtgatgttattgtactttatgataaatattgtacagttagactacatcagatttataaaaaatatttttcttttttcaatggtaaatgaactttagcttactataactttttacattatacattttttaattttaaaaaatattttgactcttttgtaataacagtgtaaaacaaacacattttacagctctacaaaaatattctcttgttgtgtctttataagcttttttctattttaaaattcttctattttttactttttaaactttttttgtcaaaaacaaaggcataaacacacacacgacctttggactagtcagggtcaggatcatcaatatcactatctcccacatccacaccttgttctactggaaggtctttaggggcaataacacccatggagctgtcctctcctatgataaaagtgctttcttctggaatgctcctgaagaacctgcctgaggctgttttatagttaaatatgtttttataagtagaaagagtatactctctgtctgttttgcatgtatttttttttttttttgagacagagtctcactctgttgtccacgctagagtacagtggtgtgatcatggctcactgcagccttgacctccctgggctcagatgatccttccacttcatcctcccgagtagctgggactataggcatgtgccaccacactcagataattttgttcattttttgtaaagataaggtctcactgtgttgcccaggctggtagggtacactctcaaataataacaaaaaatatagcatagtaaatacataaaccagtaacatagtcattaattattgttatcatatattatgtattgtacacaacaaacatgtaataatgcattgtgctacaagtggtagcacaatgaggtcactaggcaatagcatttttcagctccactataatcttatggaaccaccatcatttatgcaggctgttgttgactgaaacatctttatttggcacatgactgtagttgtgtgtgtgtatgtgtttttattaatagtttattaatattttcttcatggaattaggtaactgaatgtgtttacttctttactgtgagcgctagaaaggcacagtgccaaatctggctcacatcgcttgaacatggattggcatctgaagatatctatgtaaagcataataggcaagttcctggagtcatcgtccttttctttaccttttgtcttatttccttcatctacttattttaaattttattatattttgaggcattttataatttatgcaaaccttcagacatttttagaacaaggtagggatataactaaataaatgcatgtaaatatttagattatttccttagagtaagttttgaaaagtagatacactgggtctcatgtctcattatatctttacccagtgaaagattttctgtaggaaactgggataatataatccaagtatgttaattcctggtgatttattgcagatataataccaagtgaggagttagagtcccaagaggaataaagaatcaagttatttctctgagcatttctctgcaatatgagatgctgtaaatgctgttttcatgggaaattgtacttttcatgggaaattgtaattttcaattaaattagctggcaaaatattgaatgttacaattatatattgttaattaaaaagatactcatctgctttacataccggatatataaacaataaaattgacatactgtactgaacacctaatagccagttttgataaggagttggtttattcccataagggattggactattggggtctttagaataagactaatttttctcaaaaatgtgatcagcatttgaaccaatgtatggttcaggctcacaatttctatgctatgccatatggaagagatagttaatttttgcctacaaaagttgttgattattgcctctaactataaagtaacctcagctgggcttcttgaccagtaacaaccctgatagaccctaggacctggcacctattagatgtatcctcaaaaagctcttttggtaagctttcttgagtcaactaatatagacacttccttaatggatcatgatctaattcagtctacagtttaacagtaaaacttactgaccaatgtctgcagcacacagaattttcatggttgggagccaagcgccctttgagacccataggttgagttgtatgcataaaatgaatcagctgtgtttgttctctttggtcttagtggatatttttccccaggaaaggagagaacaactcttctacgtgatggcactttaataatttagacagatgtactttcttctctcaaaataattcatgctggaatcctactctatttgctgtagaagagaattcagtgtaacattagcatgtgtcttgaactgtgttttaatgggagatacaacataacaaatcaattaatgttattcacttattggtgtagagctatcttagcatgatttctgaggcagtggtatagggagaatcatcatggttgtctttgtaatggttttgaaaagtataaacaaatctaaaaacaaacgaaataaacaggagtttacaagtgcaggagtttttgcacacagaattaatagcaatttcttagcttaatatgcttggtagccactatgttaagttgccattactctgtaaggagtagaaaatattactttggaactgcctctcttttgttgacaatgctatttgacaatactgatattgtgatacagtattcacacattgtacattagaaatatctatcatcctttgtgaacaatgacactcaaactatccctgtgggagtatatagataagatcattattctcattttctagataaggaaactgaaatgaaattccttgcctaaggtcagagaacaaatcactggcagaataagattaggggagtgagttcttgattttcattcctttgctcaatcaatgaagtcatattgttttactcagtatgggaagagattattatcagtcagtaggaataaggctatgcccagatgatgccagaagaccagctgaaaaacaaaaatctgcacaatcaaccatttgtttttctgtaaaacaccaaactaattgttataccaatgtttttcactgagccgacttgacgtctttgtgtcttgcagacacagcctctgactttatgtttatgttatattccaaacttagtttctggaatttctgtcttttaaaaatctaattttggaatatcctgaatttcataatagtttaatatgttctgaataatatgttacctgtgtggggtagaattggggcagagttctttgaaagtgctttatgataaaatctcacagtattcttttatatagtggcagagaaacccttttctacctcaaaggctccaaggtgaaaattactgaagttttatgaaaggactgcaaaataagaccttaccatgttagaagaaagctgggcttctatatctgtcaccaactatatattacataaatgcacttgggtttggcaaataggacggaaatcatcagaccccaactagatctcatagatcctctcccgaaccagttactctggatgtgagggttgccaaataatcaggtgaccggtggtatagtccatatagaagttaacgtgcagaataactgagttctttcaacatgcaaccaacatttattgtattcctgatacatacttacccacgtctccacaatatgtcctaattcttcgacatgttctgctagattcatcagttgacaggtgaaacatttctccctaggtcaaacaacatgtaaactcaggatctttgatcttttagctgagttcaatcataatgccagcaactttattgatggatgattccagtttattttagttaatcttatatattttttgcagctgaactactaaaatacttaactagtatgaactcatagtatttcacaaaaagaatggcacaagcattcacttatagtctgtaggaaatggaataggctcagttcaataataaagatcacaagccaggaaaggaatagaaaattcatttctctctggttctgagacacctgaattcaaccttcattaagaacgacaatttgcaagcatatgaactcaccactaacagatgaaaatacttttaaaaaacagttcgtattctgtatttgattatttatgaatatatgcaatattaaaagtgccttcatcctggctacaatgtattgaattttcctgatgtagcttttgttgtcttatttttaaataatacatatcttccagttttgttgagattgaaaacttgaaggaaccatatataaatgctcatgatgccagtaagagatgaaaaaaaaattctgcattatattttaaaaatcaagaaattagatattgacttgaatgactattctctagtagtgtttatatcctgaggttggttttttttatttttgccattttaaaataagattgcagggaagtcttgtaagtcccgaaagtattgccataattacctatttaatattgcagcagacatctcagaaatttatatttcacttaaaatacaagagttagtgatatcattcattcatttagtagatgtttatattagtgattactctgagccaacctctatttattggatgaagacagcagagcccctgccctcacagagataattctactgtgataaatagtatcacaattaaacaggtttatgtgatagaaaggaggagctcgagtggatagagaaggctggctctgaggatttaaattgagaggaaaggaaggggccagattctagaagattcacaggaaaagcattcaaatggggttcaaaagctccaaggtaagaattactaaagttttatgaaaggactacgcaaacagatcagaatttagggagagaaagcaatggtcttcagaaatctttgaatgctaagatggaaacatttggaaatttggagatttttttaaaaagcctactcttttattttaataataaagaaatcaaggcccatgagactgacatgtttttggttatatactaattaaattttaacctgggtctgccatttcctagtctgttgctttttccgttaagcaaaatacctctctttgtgcttgaaaactctaggtgctattgccaagcattgggttttacagttgaaaatttaaacctgcatcataaagatctggcaaatatttatttaggctttctttatataatcggtagcaatctccaaagccatatttatcactgtgatttgcatctcttattaagaaaatcacaaagcacactttaacccctctgccatctatttactttagtctctagcttggagactattagatcttttgtggtgcactatgaaggaatttgtaagtttgtgtttaatttccacgtagtccatttcaatttggaactagtagatagttcatcttgtttatataagggaaattctttttattgcttcccatcatttccaattacagacctattggcttgctagacatctcagctttaatttatggacttctctttttgatagatgtcaaggcttgaacatgtaggccaagaatttatgtaaatagcaagtatattttatatttagatatccttctacttcttatatttttataactttgtggagaaatgaattgggactaacatgatattgtttacagctgtctttgactttttgttggcttttttttttttttctgagactgtgtctcgctctgttgcccaggctgaattgcagtggcacaatcttggctcactgcaacctctgcctcccgggttcaagcaattctcctgcctcagcctcctgagtagctgggattacaggcacatgccaacacacccggctaattttttctatttttagtagagatggggttttgccatattggccaggctggtcttgaactcctgtcctcaagtgatctgcccaccttggcctcccaaagtgctgggattacaggcatgagccaccatgcccagccctttgttggctttttttaaaaatttttaaacattatactttaagttctgggatacatgtgtagcatgtgcagatttgttacataagtatacgcgtgccatggtggtttgctgcacccatcaaccatcatctacattcggtatttctcctaatgctatcccacccttaatcccacatcccccaacaggccccagtgtgtgatgctcccctccctgtgtccatgtgttctcattgttcaactcccatttatgagtgagaacatgcggtgtttggttttctgttcttgtgttattttgctgagaatgatggtttccagcttcaggaatatattatgagctaagctctatatcctgatagaagtcctctatttgatgattattatatagggcaattaacactggcctaagagtcatagccagtaggaatggtagcttgacaaatcagagtgcaaggatgtgttccagatacacaaaaaagtttaagaaaatgatattgctcttgaaggaactaaatggactcttgccttttgtattttaatgtaaaggaaaacattaaaattaatgaatgatatcactgctgaaagtaacacattttcctgaacacagatgacataatattattgtcgtgaactggaggtgtgtcttcttagacatttagatctgctgtgtgaaatctgctggttatagagcgtcttagagtcacaaggccccaagttgaatcctggcagtgccatctactgacttttatgagtagtaaaatggacctaataactaccttatatgactgttaaaagattacaacaaaataatgtaaaatcatgcttagcatggtgtttgggtcaatacatgtgaatataacaatgttaaaatggagtttttgattgaggttattaagacacaatagaagtagaagttcaaagtcagatctccatactcacagttgacaaaggaattggtcaaagataggtatggctgttcttggatctctcagcttgttaataatttagaaaggatacaaggagtggaatggaggaagaatttgctgatggcattttgcttttgaagaaagctgttggcacactatggaaccccctttattcctgggctaatgaatgggaccccaaacctagtgagagggtgcttcaggaaggccactctgagagctaactctccaccctctgcagttgggaggatagaacacaggtgcctgactcaggttgagaaggtgaaagcatcctgtggaagtaggatagaggtaacttagggcaccagcttctctctcctcctagtaattgtcagggcaagggatgtgtaaatattatctcaggaccataagtgggtctcctaatgagcaaaagtgccatggcactgtagatggacagtctggaggagttttgggttttgcccaggaaagcttctgctggaggataagaggagacctataagggagaatgtggtgggagaactgcccaggaaacagaagctgagaggcaattgggtgcaggcatcctagaaatgtctgcatcttagcagctgcagtgagggttcctttagagacagggaagccccaaagggcctgcatgagtgtcccagagaggagtcagcttcagtttctgccagcaggctcggagtgggaagttgactgagtgtggccttctccttctttactccctcttctctctgctcttagtctggatgctcagagcccagctgggaaggaaaagtggaggagcagctatagtagagaaacagagaggaaggcacccataccatgtttccactgctgccttttgcctgaagcgggccagaccgagctggggaaggagagaagattcgacatctgatcacgtagcagtagagtgttttggttatcatctgggactgggcatctaggcttgaattgagacactgtttgtgattttaagtggaagtaagactgtctaatacctaaaagtgggcagaaaaactttgctggagctttcatctagggacaggggagtgttattctcacagactacaaattaaagaccactgggaagaacatgaaaggtgtaggctttaattattagttgtgcttttctgtgtattgtttgcattattgtggttgatgctgtgttagaaaggttaccttcaaattcagtgttgtacacctaaagtcttgatttttgtttgatatttccttgcatttttctggcttatagcaaatactcctatagtgcaagtcaactcagttatttaggagggcattttgtagccaggtttctcacagtgcttactagaaaacttatttgcttaaagttaatattctacgtgtatgttactgagaatttttatacccagggtgaaaattaggtaacatttactttaataaccttccatactgaaataatacagcatgaaccataatatagcagtttggagactcgattccccatttgttcataaagagaagcaaaacactgacattttaaaagtattcttttaaattgaagtgtgatacacataataaaagtacacaattcataaaaatttagtttggtgagtacaaagtgaattcatccaggtaaccagcaccaagttaagaaacagaataaggttaacgtcccagtcactgacccctcatatcaatagttttgcttgtttttgatatttatttatttacttattttagagacagtcttgttctgttgcccaggctggacttgagtatagtggcacaatcgatcataactctctgcagccttgaccttctgggctgaagtgatcctcctgcctcagcttcccaagtagctgtgactacaggtgtgtgccaccaatcctggctaatttaaaaacaattattattattattttttgttgagacagggtctgccaccattgcgtagactggcttgcagacctagcctcaagcaattcttccatctcaacctccccagatgctgtgactaaaggcgtgagccaccacgcccagcttagccttgctttttaataatgagactatatatttgagtttgcgagattcattcactttgttatgtgtagctgcagtttttgtttatttacaaatttgcattccactagatgacaattttttagctaattcaattgttttttagttgataaacatttggatagttctatttatgtgttgatgaacatttggattgtttccaggtttgaacccttacaaatcaggcaactaaaaacattcttaaacacatgttttggtgaatatattgtgcacttttattgattttatgcttaggagtggaattactgtatgacatgtatgactgtgttcaactctagtagataaggaaaaacagttttccagagtggtggtaaaaattactcttccatcaactgtgtgtgggaagtcactccacttccttgttaatacttttttcattttagcttttctggtgtgtgccaattcctgtttttgaaaaaaaaaaaaattcctagctattggcatgccctcagtaaacctccatatgggaagtgggatgtcttctttcctatcataagagcattgcaccagcctgactaatcattgaagcataaagttatatatttagcaaggaatgcagaatagcattctggtgataaatgctgcccaatacttatcaacaactttgctaagtgaaagcataggtataaagtgcattagtcaatattttgaatgtaagtgcagaaatccctattcaaaatagtttaaccaaaaaggtaattaattgactcttgtagctgaaaagccaggcttggctggctcctgggattaagcttcactttccaaatcaagactgcctcccactgggctgcttctcttctcaggcaagcttgcttcctgtctggaggccaggattctgtcaatagctccaaactcccatcagtaaaccaaaaccaaaacaacagccacagcaacaaaactcttcctgtctttctggaactattaagtcccggaattggggttccttggttcttattgcactaattatgtcttcttcggctccaggtggctaccaggtccctctggaccacacgctttcagagaaacaacaattctctgaggaaaactgggggtgctgttaacagaagaagggtcaatggtaggtgggcggcaacagtaacaaaatagccactgcaagccagactaggtcaaagtaacacggtttagttattcctgtaggtcctacaggacttacccttggatgaagcaatactgctagaacgttgcatgtgtggactgcatcattttaggctctgtggaattgcttttattgaactgtgttagggcattctgttaccagtctgcattgaggtacaatataatgaacagtcctgtggaatttcatgcattattgtaagacggtattgagcacactgtttatttccaaagccacattataggatttcatgggagaaatttctccctggtctctgcaccaggaagagtcaaactgtttctaaaaacctttcatgattttatcttatggatactgtgattcctcaaaatggtaaggtgtccttctttgcattgctagagtgatagagtcaattttatggcttgttttaatcaagtatactaggctttgaagcatggattcttttagtgctagcctcacccctttatttttctatttccttcagtattgtttcccagttctcacactctctcttttgttctatatcctttgtaaactttcttaaatcttttctgagacaaagttgagaaacacatataattttatatagatttcattttatgcattgaaaatgtcaccacaaagtaaataaatctgcttggttttagcaagaagtttattaacaggaattattttgggttccagttttagatggagcagttgtaaaacactacagaattaaaagactggatgaagggggattttttctcacgcgaagaagaatcttttcaacactgaacgaatttgtgagccactacaccaagacaagtgacggcctgtgtgtcaagctggggaaaccatgcttaaaggtgaaaatgctttcaagctgtgtttttttattgaagttaacttttttccttcagatatctgagtatttttcatggaatatcagttcaggaaaaaaattgtcattttattacctcaggcgggtataggcaaaccatggcctatgagctcacactgacgtatgcttgtttttgtaaataagttttatttgcacagatgctcattcatatatgagttttctttggattcttttgtgccataacagcagagtttagaaggtgcaacggagaccatagggcaggtggtaaactagaatatgagttctaggaaggcaggggtcttgcttgttttgtttatagaaaagaacctagtcaattcttaaaacaattttacttactaaatgaatgagtaactaaatgaatgaacaaataaagaaatgaaaaaatgagtttgaaaaatataaaacatttaattatgcaaaaataggtgatacatataataaaactatagccaaagaatttgggaaggatttgtgggtgagagggaacttcagctgggccttgaaactgagaggatttagctaggcgaagaggtagggagaagtcattccagacctgagtgaggatggcattaggtatgggatcagacaggtagacaacgaggtgcctgacttcccaagatctggaagatcaatttgaagagttaacaaatgcagattctcccaccatactttttgtttttgaagtaattataatacagtttacaatattttgttttaagaagttttatttaaaagtacctagactattattttcaacaaaataatattaaatctacttttttttttttaacaattgctcttattattctatgaaacagatccaggtcccagctccatttgatttgtcgtataaaaccgtggaccaatgggagatagaccgcaactccatacagcttctgaagcgattgggatctggtcagtttggcgaagtatgggaaggtctgtggaacaataccactccagtagcagtgaaaacattaaaaccaggtgcgagaacaataaaggttaaatggcatatgttgatttttatgagctcaatttaacactgtaaatatctaagaggtcatagggtggctaatactggcagcaagcaggtgttgtggtcattgtctctagcccaggtgaccccaacctatggataaggcattaaaatataaaaacaagaacacacttcctggttcagctgagtcttaaaatatcgctgattgaagagtctgacaactcatctcttctctgaattaggattcagtcttccaatgtccttcttcccattttgttcctagccttagttaaaagatattgacttagctgaaaatatttaaaaaatcagaaggaatcttgatactattcagggaacaactatttttaaaagtattaattttgtatggttaaaaggcaaaatggtccatctaaagaaacttgtatttgaaaatgtaggaactttttttcccttccatcttcctttttcctgtgatggcaagtaaaattatactgaaatcagtatttattcagccaggctttattccctccattttaaagagggactaagtaactttccaaatatttctggtcatatgatcttgagcaaatttttgaactctatgcttcagttttgtcatttgtaaaatagagataataataaggccaacagagaagataaattaggtcattagtggacatgctttgtatagtgcctggttcacagtaagtgatggataaaaactattattataataaggaaaaagtcagtaaatggcatagctgggatttgaactcacatttattactattgcctcacgctccatggaagtgacagtctataaaagtgcaacattgctatagtagcctcatatatacctttataacagaggtaagaataatcaacataggctagattgtagttttctgggagacctgcattatttacctagcccagaattcttagaggtttggtaaacctcctggtggcagaacttgagctcttgggatttgttggctagcagcatagggtaacaccatggttcccaaactgtgtgccaaggctcatgggggcaccatggtgaattcacaagagtgctgtggaatacttaaaagttttgaagtcaacatcctgaatattgtacaagctgctaccttgaagtagttcatagtttcaactttagaacaacattccttttgttgacatcatatctttgtgaagctgggtttttgatagttgctatggtcaaatgcaaaatccacacaaaaatcaatatggaccagaaaatgggggtagcagtgcttcatctgattctaagattggagaaattgtgcagtgtcccagggatgcatatatcactttagtaagcacttgtagttaagaattaagtgaagaattatgttttcctttcaatttacctgtgttactttttcaaatggctattaaattgttaagataaatacttcttttttttttaagtatttctttttttttttaattttttttttattatactttaagttttagggtacatgtgcacattgtgcaggttagttacatatgtatacatgtgccatgctggtgcgctgcacccactaacgtgtcatctagcattaggtatatctcccaatgctatccctcccccctcccccgaccccaccacagtccccagagtgtgatattccccttcctgtgtccatgtgatctcattgttcaattcccacctatgagtgagaatatgcggtgtttggttttttgttcttgcgatagtttactgagaatgatggtttccaatttcatccatgtccctacaaaggacatgaactcatcattttttatggctgcatagtattccatggtgtatatgtgccacattttcttaatccagtctatcattgttggacatttgggttggttccaagtctttgctattgtgaataatgccgcaataaacatacgtgtgcatgtgtctttatagcagcatgatttatagtcatttgggtatatacccagtaatgggatggctgggtcaaatggtatttctagttctagatccctgaggaatcgccacactgacttccacaatggttgaactagtttacagtcccaccaacagtgtaaaagtgttcctatttctccacatcctctccagcacctgttgtttcctgactttttaatgattgccattctaactggtgtgagatgatatctcatagtggttttgatttgcatttctctgatggccagtgatgatgagcattttttcatgtgttttttggctgcataaatgtcttcttttgagaagtgtctgttcatgtccttcgcccactttttgatggggttgtttgttttcttcttgtaaatttgtttgagttcattatagattctggatattagccctttgtcagatgagtaggttgcgaaaattttctcccatgttgtaggttgcctgttcactctgatggtagtttcttttgctgtgcagaagctctttagtttaattagatcccatttgtcaattttggcttttgttgccattgcttttgatgttttggacatgaagtccttgcccacgcctatgtcctgaatggtaatgcctaggttttcttctagggtttttatggttttaggtctagcgtttaaatctttaatccatcttgaattgatttttgtataaggtgtaaggaagggatccagtttcagctttctacatatggctagccagttttcccagcaccatttattaaatagggaatcctttccccattgcttgtttttctcaggtttgtcaaagatcagatagttgtagatatgcggcattatttctgagggctctgttctgttccattgatctatatctctgttttggtaccagtaccatgctgttttggttactgtagccttgtagtatagtttgaagtcaggtagtgtgatgcctccagctttgttcttttggcttaggattgacttggtgatgcgggctcttttttggttccatatgaactttaaagtagttttttccaattctgtgaagaaagtcattggtagcttgatggggatggcattgaatctgtaaattaccttgggcagtatggccattttcacgatattgattcttcctacccatgagcatggaatgttcttccatttgtttgtgtcctcttttatttccttgagcagtggtttgtagttctccttgaagaggtccttcacatcccttgtaagttggattcctaggtattttattctctttgaagcaattgtgaatgggagttcactcatgatttggctctctgcttgtctgttgttggtgtataagaatgcttgtgatttttgtacattgattttgtatcctgagactttgctgaagttgcttatcagcttaaggagattttgggctgagacaatggggttttctagataaacaatcatgtcgtctgcaaacagggacaatttgacttcctcttttcctaattgaataccctttatttccttctcctgcctgattgccctggccagaacttccaacactatgttgaataggagtggtgagagagggcatccctgtcttgtgccagttttcaaaggtaatgcttccagtttttgcccattcagtatgatattggctgtgggtttgtcatagatagctcttattattttgaaatacgtcccatcaatacctaatttattgagagtttttagcatgaagggttgttgaattttgtcaaaggctttttctgcatctattgagataatcatgtggtttttgtctttggctctgtttatatgctggattacatttattgatttgcgtatattgaaccagccttgcatcccagggatgaagcccacttgatcatggtggataagctttttgatgtgctgctggattcggtttgccagtattttattgaggatttttgcatcaatattcatcaaggatattggtctaaaattctcttttttggttgtgtctctgcctggctttggtatcagaatgatgctggcctcataaaatgagttagggaggattccctctttttctattgattggaatagtttcagaaggaatggtaccagttcctccttgtacctctggtagaattcggctgtgaatccatctggtcctggactctttttggttggtaaactattgattattgccacaatttcagagcctgttattggtctattcagagattcaacttcttcctggtttagtcttgggagagtgtatgtgttgaggaatttatccatttcttctagattttctagtttatttgcgtagaggtgtttgtagtattctctgatggtagtttgtatttctgtgggatcggtggtgatatcccctttatcattttttattgtgtctatttgattcttctctctttttttctttattagtcttgctagcggtctatcaattttgttgatcctttcaaagaaccagctcctggattcattgattttttgaaggtttttttgtgtctctatctccttcagttctgctctgattttagttatttcttgccttctgctagcttttgaatgtgtttgctcttgcttttctagttcttttaattgtgatgttagggtgtcaattttggatctttcctgctttctcttgtgggcatttagtgctataaatttccctctacacactgctttgaatgcgtcccagagattctggtatgtggtgtctttgttctcgttggtttcaaagaacatctttatttctgccttcatttcgttatgtacccagtagtcattcaggagcaggttgttcagtttccatgtagttgagcggctttgagtgagattcttaatcctgagttctagtttgattgcactgtggtctgagagatagtttgttataatttctgttcttttacatttgctgaggagagctttacttccaactatgtggtcaattttggaataggtgtggtgtggtgctgaaaaaaatgtatattctgttgatttggggtggagagttctgtagatgtctattaggtccgcttggtgcagagctgagttcaattcctgggtatccttgttgactttctgtctcatggatctgtctaatgttgacagtggggtgttaaagtctcccattattaatgtgtgggagtctaagtctctttgtaggtcactcaggacttgctttatgaatctgggtgctcctgtattgggtgcataaatatttaggatagttagcctctcttgttgaattgatccctttaccattatgtaatggccttctttgtctcttttgatctttgttggtttaaagtctgttttatcagagactaggattgcaacccctgcctttttttgttttccattggcttggtagatcttcctccatccttttattttgagcctatgtgtgtctctgcacgtgagatgggtttcctgaatacagcacactgatgggtcttgactttttatccaacttgccagtctgtgtcttttaattgcagaatttactccatttatatttaaagttaatattgttatgtgtgaatttgatcctgtcattatgatgttagctggtgattttgctcgttagttgatgcagtttcttcctagtctcgatggtctttacattttggcatgattttgcagcggctggtaccggttgttcctttccatgtttagcgcttccttcaggagctcttttagggcaggcctggtggtgacaaaatctctcagcatttgcttgtctataaagtattttatttctccttcacttatgaagcttagtttggctggatatgaaattctgggttgaaaattcttttctttaagaatgttgaatattggcccccagtctcttctggcttgtagggtttctgccgagagatccgctgttagtctgatgggctttcctttgagggtaacccgacctttctctctggctgcccttcacattttttccttcatttcaactttggtgaatctgacaattatgtgtcttggagttgctcttctcgaggagtatctttgtggcgttctctgtatttcctgaatctgaacgttggcctgccttgctagattggggaagttctcctggataatatcctgcagagtgttttccaacttggttccattctccacatcacttttaggtacaccaatcagacgtagatttggtcttttcacatagtcccatatttcttggaggctttgctcatttctttttattcttttttctctaaacttcccttcttgcttcatttcattcatttcatcttccattgctgataccctttcttccagttgatcgcatcggcttctgaggcttctgcattcttcacgtagttctcgagccttggttttcagctccatcagctcctttaagcacttctctgtattggttattctagttatacattcttctaaatttttttcaaagttttcaacttctttgcctttggtttgaatgtcctcccgtagctcagagtaatttgatcgtctgaagccttcttctctcagctcgtcaaaatcattctccatccagctttgttccgttgctggtgaggaactgcgttcctttggaggaggagaggcgctctgcgttttagagtttccagtttttctgttctgttttttccccatctttgtggttttatctacttttggtctttgatgatggtgatgtacagatgggttttcggtgtagatgtcctttctggttgttagttttccttctaacagacaggaccctcagctgcaggtctgttggaataccctgccgtgtgaggtgtcagtgtgcccctgctggggggtgcctcccagttaggctgctcggtggtcaggggtcagggacccacttgaggaggcagtctgcccgttctcagatctccagctgcgtgctgggagaaccactgctctcttcaaagctgtcagacagggacacttaagtctgcagaggttactgctgtctttttgtttgtctgtgccctgcccccagaggtggagcctacagaggcaggcaggcctccttgagctgtggtgggctccacccagttcgagcttccgggctgctttgtttacctaagcaagcctgggcaatggcgggcgcccttcccccagcctcgctgccgccttgcagtttgatctcagactgctgtgctagcaatcagcgagattccgtgggcgtaggaccctctgagccaggtgtgggatatagtctagtggtgcgccgttttttaagccggtctgaaaagcgcaatattcgggtgggagtgacccgattttccaggtgcgtccgtcacccctttctttgactcggaaagggaactccctgaccccttgcgcttcccaggtgaggcaatgcctcgccctgcttcggctcgcgcacggtgcgcgcacacactggcctgcgcccactgtctggcactccctagtgagatgaacccggtacctcagatggaaatgcagaaatcacccgtcttctgcgtcgctcacgctgggagctgtagacaggagctgttcctattcggccatcttggctcctcccctagataaatacttcttaacttgtttggatctaacccagtaatcaaaataactgttagtttttttttttattttcacttagagacatcatgaaaaaagttatggagacactaagggttccacgaactgaaaacactgggatcctctggtgtaacaagtgaatagtgtcaaattcgatataagataaatctgtgtttaaacctggctctgccctctgtgacttcagacaatttttaaccttttggaatcttctcatctggaagtgggaatcataatagttcctaatttctagggttttatgaggacaaatggagtcaatatacgtaaagtatatgcagcaagttcttaataaatgttagcctccatggggctgctgacagatgtgtccactgaagtgcaaatttactagtgcaggaattcagtttcagcattttcatctggcagatgaagcaagagacaggcactttaaagtggccagatgctatgtgagtgctccaggtgaggacattctattctagcacctgagattttcacaatcactgtgtatatgcttttaaaccctaatcttgttaataaatggtggctgaactttattgtccaatctaataattcttttctaagaagaggcagctagctagccttcctaacgttgttctctaaggaagccctttgggaagtcaaaagacaacaaaaaagtcagatttctcatgttaaaaaaaaaccacgatagttttctctccaacaggaataattattattgatttacagtgtaatagccacaaacagctttagtgattggttaaatgtcttcacttcactggggccattaatcaatatgagcggctatttattgctgagcaggctactacgcaataaagatgagcctgaaatgaactcccacagtagctttgacaggcaaaaattaatatttaatgttacattactagctgagttgagattgggtttcctttactctgcagctggggagctataaccagcatggccatgaaggagtgctctgaaacagtcttcacctgcagaggcttctgacctactgtgatttcagttcttgtgcatagtctgatttgggaatgagtttgagtgtcctgtattgcttgaatctgatagccacacaacatagaaatttcattaacataaatatatattgtatatataattttctttttcctttctctttctttctttctttctttttctttctttctttctttctttttctttctttctctctctccttcccccccctctttctttctttctttctttctttctttctttctttctttctttctttctttctttctttcttctttctttctttctttctttctttctttctttctttctttctttctttctttctttcttttctttctttccttttttgagacagagtctcactctatttcccaggctggagtgcaatggtgtgatctcagctcactgtaacctccacctcctgggttcaagtgattcttctgcctcagcctcccgagtagctgggattacaggcacctgacaccatgcctggctaatttttatatttttagtagagacatggtttcaccatgttggccaggctggtctcttaactcctgacctcaagttatccgcctgccttggcctcccaaagttctgggatcacaggcttgagccaccatgcccagcctaattttctgtatggttatcataattactgctatcattggaagcttcttttttggggggggtggtagtggggggattccccactatattatatttgaccataggccaaactagttgtaacaattaagaacaaagtcccttattatgatttaggtgtctcttattctcagctccattttgtgactatgattccaaattttaatcctatttgactgtgtggagtaaaccagtggtagagatggaattgatggagctcagaaacatgtaacggaaaagagaatcggccattttctcctattctctctctttaagtccttgtcctttttcttccttagcctgtgaaatatacttacagctggtctgtttggtttttccaagactatgcatatcaatgataatataaataatgatcaacagtcattgaatacatacgtgcaggcattgctattatcttggtaatgatcttacaatgtcagtaaattattaggcatgttttacagatgaagaaactgaagtttagagaggtttgataacttgctcaagatcacacagggcactagtggcagagagttgagatttgtctagaatgcagagtctgattagtccagttctgaacttctgggttctcaaaggggagactgctcaaatgttttatgtgaaatgatgtgcaggtcacatgtaactaactcaacttcacattaataaacaagtcatagttttgccttagaatgtcaaagcttatccatgtctgggtttaaatatcagttgtaaagtcttcaacatcgagaggatgatgaatgtagtagtctctttgagcatcaatggaaaccatatttgcattattcatagtgaatactaagatgtgaaatgacagtattcctttaattacagtaatgcctctgaaacatcatattctaaaagaaaagattttaaaattactgatgaaatgtaaactccagataatcttcctcctcttagattttatttgatgtcaactacttgacaccttgcatgatgagtcagagtggatccattaaaatacgatttaattgcagacaagtcttctaaataggccttaatattgtctctcctccatttggccatgctattaaggctctgactgtggaagcagatagtacaggagaaaatattaaatatcagtttcgagttgaacatataaaacatgtgaaaaaaaccccattaacttttggggatggtcttggatgttttccacttggtctacacactatgttcctacagaattaaagacaaaagtatggcagaatgtcactgttttaggatttttgtccagctgttcccacagtgggcaccaaggacagggcaggtatcagtctctggttgcagtaattaaatattcagtgaccttcagcgctcgtgttcatagaatgttttccttttgtgttaagatgccttgttttatcagttagattgtcagtctctcctttttccttcatttttcatgtagatctgaatcaacctctcttcacctacaggtcataacatataaaccgtatactcctgatgcaccaacacatccagttactaggttgctctggctgaactgattctctttttgataactctgaagatttgtgatactgaggctcttactctactgagaagcaggaggcaatcttgatgattcccaccaggctgctgtgaggataggaatgcctcaataacataaagtgatttctccctcttcttgtttcaggttcaatggatccaaatgacttcctgagggaggcacagataatgaagaacctaagacatccaaagcttatccagctttatgctgtttgcactttagaagatccaatttatattattacagagttgatgagacatggaagtctgcaagaatatctccaaagtaagctaaagacttaatacaaggaaaaaaagaggaatttaatttagctagtcccataagtgtcaatttagcaagccttctgtaaccgaaaggatatttactatgtgtatgtctgtgagaatgaatgtcttaacactgaatggctcaactactatttaataggttatatattgtatattcaaaaggtggaaaatatttatgcagtggaagagaaaattattcacaacagatatattagggtaattgaatgtaacgtgggaaattaaagaatggatgtttagcatgatgctttgcatgatgctttatttcctacactaattgaacattatcagttatggaccaatattttctatggcacatagaattcggggacatggaatacatttggggaaaaagggagggaagtatcctatgtttattttatttgctggtatttgacaacattgtacttgttgctgtttaaaatacttccactgctaggcaacataagaattgtcagacaaaaaagcagaaatatgctattactttatttctctgtttgcttcctgtagtcagagaagactgaagggcattatgaaattttgatgtttattacaaatggataatttagtaaacaacaatacagtataatgagcattaaaatgagatgttcaaagaaggtgagatcaagtattgacaataattcgagcttgaaaaggagacttccataatttcttgaaatgtcagggtggaatgatagaatgtttagaggtaaagggaggtgagaatgatgaaacaaagatttcagaaagataagaatatcctctgatttcaggatgacttatgaagctggtaacattaagctacaaaacaagataagaataacaaagaacataataaggcctgttgaatgctgttaaaaacagaaatatactcagcttccttgcagaaaaatattgaatttaacatcatcagaatatgttacccaccatagaaagattaaactcagctattaaataaccccttttgccttattcccaggacaaagtgcagaagtggtcttgggtcatagctaacaaaaaatgctttataaaggtccttaataatattcacataattacatctaatggcctattccccatcctcagatctatcgacagcatttaattcaatagatgctttcttttcctggaaacatttccttcatttggctttcaggacacttcactcaatggcatttcctccttcctttcttggtggttcttttcaacctatgggatttccttcattcccagacccttcaatatcttggagttctccaagactgttcacaacgtcactagttcccttattaatttcatctaatctcattgtttaattttttatgtcctgacaattctccaaattttattccccctttacttgagaatcatacccaactgccttcttaacttctccacttgaatcttgtatcagtctgcataatgtaaatatgctgcaataactaacagtctccaaatcctcgagggcttaacacacatgtttatttcttatccatgctacattgcaaaataggttggctggtggctcagttcttttgatcaccctggcagagaaaggggatgagactaatctcaccctgattcttaaagcttctgaccagaagtgacagaagtaattctgttccctttccatttggacaaatcaagtcaaagaggatagggaagtacaattctctaaagtacttgaaaggaggaaaaaaatcattgtttgtgaacagccctaatttctactatagtagaaatgtctattagacatctcaagatgacatgccccaaactgatctccctgtattctccccagtaatctgctactcttgcagtctttccttctttgaccatagcaactcaggcctaataccttggcatcatctctacttttcatgtcccatctctaacctgctagcaaaatctcattggctggccttcaaaatatatagaggattttacctctcctcaatgctcctaccctgatccaggctgccacctgaattctgcagtagctcccggctggtcttcatcttctgcttcttgtctccttcagtttcttcttaacataacagctagagagatacagttaaaatgtaaatcagagcatgtgtaactcatgaagtcctgcatggcctggctctctattccctctcggatctcatcttctacaacttctccttgctcagtcttcgtcagccacactagccctctttactatttgtcctaccatccaggcatgcttttgcctcactcgttatttcctctgcctgaatttttttgttgttctgacatttatccacatgctcacttctcatttcctcaaaatctctacttacatgtttccatcttggtgagtgtttcactggtcaccctctgaattttaaaatttaatctctttctactgactcttaaagtattcctcttcccttgctttttattttatcttcttggctgttaagcatcttatactgtgtatcttatttatttggcttatttttagtatcctctgaatataactccacacaggcagatagtgttttctttgtttcagagttagaacagtgtctggcacataagaaagtatgggctaattaggtattgaataaatagattaagttgggaccatcctgaacctaacaagattgggacttggagtcaagcttgttttgagactcttggtattagcttgaaaagatcaacttggtacatggctaacacctttgacattgaggatttttgtggcttggtgatgtggtttacttagggctaagtatgaaccctatcagcttcagggttaggccattagggtcaagtttatcggtgccttcatttgtgaggatgatgattagtagccaggaggagtaatgaacaaatgctcactgcagatagccccttccccagtcaagagggttcacattcaataaagtggccttgggccgggcgcggtggctcacgcctgtaatcccagcactttgggaggccgaggcgggcggatcacgaggtcaggagatcgagaccatcccggctaaaacggtgaaaccccgtctctactaaaaatacaaaaaattagccgggcgtagtggcgggcgcctgtagtcccagctacttgggaggctgaggcaggagaatggcgtgaacccaggaggcggagcttgcagtgagccgagatcccgccactgcactccagcctgggcgacagagcgagactccgtctcaaaaaaaaaaaaaaaaaaaaaaaaaaatggccttaaaatggatgtaccactcttaagtagcccatcatgataaatattattaagatgaaagattctttttttttctttttttaaaaaattttttattttattattattatactttaagttttagggtacatgtgcacaatgtgcaggttagttacttatgtatacatgtgccatgctggtgtgctgcatccattaactcgtcatttagcgttaggtatatctcccaatgctatccctcccccctccccccaccccaccacagtccccagagtgtgatgttccccttcttgtgtccatgtgttctcattgttcaattcccacctatgagtaagaacatgcggtgtttggttttttgtccttgcgatggtttactgagaatgatgatttctaatttcatccatgtccctgcaaaggacatgaactcatcattttttatggctgcatagtattccatggtgtatatgtgccacattttcttaatccagtctatcattgttggacatttgggttggttccaagtctttgctattgtgaatagtgccgcaataaacatacatgtgcatgtgtctttatagcagcatgatttatagtcctttgggtatatacccagtaatgggatggctgggtcaaatggtatttctagttctagatccctgaggaatcaccacactgacttccacaatggttgaactagtttacagtcccaccaagagtgtaaaagtgttcctatttctccacatcctctccagcacctgttgtttcctgactttttaatgattgccattctaactggtgtgagatggtatttcattgtggttttgatttgcatttctctgatggccagtgatggtgcgcatttttttagacctaaaaccataaaaaccctggaagaaaacctaggcattaccattcaggacataggcatgggcaacatgtctaaaacaccaaaagcaatggcaacaaaagacaaaattgacaaatgggatctaattaaactaaagagcttctgcatagcaaaagaaactaccatcagagtgaacaagcaacctacaaaatgggagaaaattttcgcaacctactcatctgacaaagggctaatatccagaatctataatgaactcaaacaaatttacaagaaaaaaacaaacaaccccaccaaaaagtgggcgaaggacatgaacagacacttctcaaaagaagacatttatgcagccaaaaaaccttgagtaaaacattactcaagattcttgagtaatggaatataattgaaaatattttcttactgcaaatgtaaatcatcataggtttgtgaacttttacatcagttttgacctctgttggttgtattaaaagtatgtgttgatgtttacttaggcagtactgaggctactgcacccttcaaagtaggaaatgtgtgtcactcaatttcctccagtattatgcctgtcagtgcaaacctttttctatccattgtaataggattagatgtcatatgtgatagttgaaataacatacatattttttctatataaccttttttgtagtttctcagcttagctggataatttttgtaatacatttctccaaaatgagaaagatctgtaaaaaaactttagtattgagggtaattaatgacagatagatcttattacaatttaaagaggataaatatctccatttttaaaaagtttagtttggcttgtttttcccccagtaaatacttatagaacatctattataggtcacacaacttgttacctattcctttgagtaaaaggaattcctatgaaatggggaagaataattgcaatacttacttcatatagttgttcagagtattaaattaggtgattgactggaaataaactatatgaggtagtgataggagaggatcatgtatatactttttttctttaaaaaacactgtagtaccttgtgacaggcaatttctaagtcttttataaatattaacttcattcattttgttttcaattttttttattttttaagattatacttaaattctgggatacaggtgtagaacatgcagttctgttacataggtatacacatgcaatggtgctttgctgctcccatcaacctgtcatctacattaggtatttctcctaatgctgtccctccctttgctcaacaccccctgacaggccctggtgtgtgatgttcccctccctgtgcccatgtgttcttactgttcaactctcacttatgagtgagaacatgcagtgtttggttttctgttcttgtgttagtttgctgagaatgatggtttccagcttcatccatgttcctgcaaaggacatgaactcattcctttttatggctgcatagtgttccatggtgtatatgtgccacattttctttatccagtccaacattgatgggcatctgggttggttccaagtctttgctattgtgaatagtgccacaataaacatgcatgtgcatgtgtctttatagtagaatgatttataatcctttgggtatatacccagcaatgggattgctgggtcaaatggtattttctagttctagatccttgaggaatcgccacactgtcctccacaatggttgaactaatttacactcccaccaacagtgtaaaagcattcctctttctccacatcctctccagcatctgttgtttcctgactttttaatgatcccattctaactgacatgacatgctatctcattgtggttttggtttggatttctctagtgatgatgagctttttttcatatatttgttgactgcatgaatgtcttcttttgaaaagtgtctgttcatatcctttgcccactttttgatggtttttatttcttgtaaatttgtttaagttccctgtagattcttggtattagccctttgtcagatggatagattgcaaaaattttctcccattctgaatgttccctgttcactctgatgatggtttcttttgctgtgcaggagctcttttgtttaattagatcccatttctcaatttgggcttttgttgccattgcttttggtgttttagtcatgaagtctttgcccatgcctatgtcctgaatggtattgcctaggttttcttctagggtttttatggttttagttcttatgtttaaatctttaatccgtcttgagttaatttttgtacaaggtgtaaggaaggggtcccatttcagttttctgcatatggctagccagttttcccaacaacatttatttaatagggaatcctttccccattggttgtttttgtaaggtttgtcaaagatcagatggttgtagatgtgtggtgttatttctgaggcctctgttctgttccgttggtctagatatctgttttggtaccactaccatgctgttttgtttactgtagcattgtagtatagtttgaagtcaggtagcatgatgcctccagctttgttatttttgcttaggattgtcttggctatacgggctcttttttggttccatatgaaatttaaagaagttttttctgaatcatgaagaaagtcagtggtagcttgatgagaatagcattgaatctttaaattactttgggcagtatggccattttcacaatattgattctttctatctgtgagcatggaatatttttccatttgtctgtgtcctctcttatttccttgagcagtggtttgtagttctctttaaagaggtccttaacactcagtaaactaggtatggacagaacatatgtcaaaataaaaaaagctatttatgaaaaacccacagccaatatcatactgactggacaaaagctggaagcattccctttgaaaactggcacaagacaaggatgccctctctcaccactcctattccacatagtattggaagttctggccaggacaatcaggcaagagaaagaaataaaggtattcaaataggaagagaggaagtcatattatcgctatttgtagatgacatgattgtatatttagaaaaccccattgtctcagcccaaaaactccttaagctgataaacaacttcagcaaagtttcaggatacaaaatcaatgtgcaaaaatcacaagcattcctatacaccaataatagaaaaacagagagccaaatcatgagcaaactcccttttgcagttgctacaaagtgaataaaatacctaggaatacaacttacaaggaaacttccttcatttttctaaccacattatgaggtaagtattattagtcctacttcacagttgaagaaacaggtatgtagagattaggtaactcatccaaggcagaagtttggcttcatagttcatgtttttaactatattcatagcactgatgttatcttcctaacatcaatctgtattagttttctattgctgcacaaaagattaaaagattatcattgctcctatctaatcaagataaaacatggaacttgctaagctagagatacatatgaattacctacgtggaaacgactgaaggaagacaagctatgggtctggaactcaggggagaatatgcagcaagagatatagatttaacaatcataagttataagtgggagttaaaacagtaaaagtgggtgagattgctaggaaatgacagagaaacaccaatattgagggtgggcagaggaagataaacctacaagaaaactgaagaatcagccagaagaatatgagaagaaaaccactggagaaacttgtaaaacttagtggcttaaagcagcaaatgtttattatctcacagtttctgtggttaggaatccaggtgtagcttagctgggtctcctggttcaggtcctcttataaggctgcagtcagggtgttggcaagtacccagtcatctgaaggctctgatggaggtagatccacttttaaactcactcatttgactcctggcaggtgtcgcttcctcctgggctgttggactgaggaaatcagttcctttctggttgttggctgcaagatgccctttgctccttgctagagggacctttccactgggcagcttgcaacatagcagcttgctttattagagtgagcaagcgagagaacaacagggtggagattatctgtaaggcaaagtcacagcctcttataatttaatcttggaagtgatatcccacctacttctgccatattctgttgttaaacatgagtcactaggtccaggccacaattagtagaagaggctttcacaagggcttgaatatcaggaggtactggtaactgggagccattttagaagataccacatagctcacggttagtaaccaccttgtcttaatttccatacatttcctttcttattgagtgaatttgatatcaaaaggcctagctattttggctatcatagcagcaatgttttgccattatgctgcatactatttattttcatgcttacatcttgttttagactgaataatgtcagctgctataatatagaattcaaaactctctatgacttaatacaaaacaatagactttttttttgatatgggccagactgctctgctaggtggctttctctaaagggtaatacagggatttagactcatgtggctctaccattttgaaatgcatccctctagccataaagatgtgggagattttaagagccaggcttgtaagtgatgttcatcgtttttgcacacattgcattgcccagaactagtgacagggctcaactctaagggaagatggaaaatgtaatcttctgtgcgtgctcagggaaaaaagaaaggacaaaaggattggcaaggagttaatttcacctcacatcttattgagatatgctacttgccttaaaaaagtaaatatatatgtgtacacacacacacacacacacacacacacacacacactgtttaagtctttcccttaaaaaattcttttgactctatttatttcattttttattaaaaatatcatatatatagaaaacacataattatacaatattgtttaacatgtaattataaagcaaacaaataagcaaccattcagtcactgcccagatcaagcattagaatgtggccagcaccctagaaaccccctgaatactttgtcaattacaaccccacactatcccaaattttatgataactgctttcccattactttatgtttacctctaccagaaccttcttgtcttccttcttgattaggattttggaatttgccaccacctccttctgtccccatgccctccactcatatttagccctcaaatccttatacctgatctccagtcaaactgctcttcctatccccaaaatcaccagggactcccttattatattcgacaaatgtcttagtccttttcttcatggacttacttgtagaatttgactatgatggcattttctgtttctcaaaacctttgacttgttacaagtttctccagtggttttcttctcatattcttctggctgattcttcacggttttcttgtaggtttatcttcctctgcccaccctcaatattggtgtttctctgtcatttcctagcaatctcacccacttttactgttttaactcccacttgtaacttatgatcgttaaatctatatctcttgctgcatattctcccctgagttccagacccatagcttgtcttccttcagtcatttccacataggtaattcatgtgtatctctagcttagcaagttccatgttttatcttgattagataggagcaatgataataatagataggatttattgagttctttctaggtgccaggcactgctttaagtgctttacatgaattaattcattttaattctcattttaacaacgaataccataaagtagttactattatcattgtacagatgaggaaactgaggcataggaatgttaagctgcttgcccaaggtcacaaagaaatatcaggcatatccttgatttaaagtctggccctctagcttcaaaccaggtttcctggcccctgtaatgtatatagctgcctctcaagtcagggcttgtgtctaagcttttgaccatgagtctaatggaatttatgtagtattcagcttattgagacggggatatataagagtaatattagtttgagttgatgtgagattcttttaattctccagacatctaaaaacatctgtcaacagtatggcagctaaatcctatccagggatgactcaccccatttcaaagtagaaggagtcagtattattttgtgtacaaatataaaataggtaagtcaaatacaaatacaaatgagtcagtcaccacaaaataatgctgacccccctctactaacaacaatcaaactgattgtactatataaattttttatacttagttataaagaattagtagtgggagaaactttgcctattgaaggtatgtgcatgtctggagagatgagcaacctattctaagaataacagactaaggcagagaaataaaataatgtatcaagcttggtggtacaaatgtaatattcatactttataactatggatagacctttcatttgtgttagtgggctagtttttaaaaacaacatgatggaagaatgagaatttttcattggctcagccataaaagttagtattgttttataggctcaatgactaaaacaaattatgcagtgcttgaaagaaattcagtagcagttgagtaataatttccatgaagaaattagtcagtgacatgtggtattgaaatcatgtgaacaaaaagctcaacagcacttatcagtagacaaatgcaaatcaaaaccacaatgagataccatctctcaccagccagaatggccattattaaaaagtaaaaaaataacagatgctggcaaggttgtggagagaaaggaacacttgtacactgttcgtaggagtgtacattagttcaaccattgtggaagacagtgcagccattcctcaaatatctcaaaacagacctaccatttgaccagcaatcccattactggatatataaccaaaggaatataaattattttattataaagacacatgcacatgtatgtttcttgcagcaccattcacaatagcaaagacatggaattaacctaaatgcccatcaatggtagaatggataaagaaaatgtggtatgtatacaccatggaatactatgcagccataaaaaatgaaatcatgtcctttgcagcaacatggatggagctggaggccattatccttagcaaactaatgcaggaacagaaaagcaaataccacatgttctcacttataagtgggagctatgttcacccacatagaggggaacaacatatactgggtcctatgagagggtgaaggtagggaggaaggaaaggatcaggaaaaataactaatgggtactaggcttaatacctaggtgatgaaataatctgtgcaataacccccccatgacacaagtttacctatataacaaacctggaaatgtacccctgaacttaaaataaaagataaataaattttttaaaaaagaaaaaaggcagaatagccagactctcagataattgcagccacgtttggatcatgtgatgacttgttacttgtaatactcattcaaggaagagagggccttgccttattaacctttcacagcaaattaagttgtattaatgataaatatatatattttgctcaacagatcagtgccattgtacttaatctcactgatagctcatacattcaaaattctcagaattcactttcatagttcaaatgttctctaaggtaactttcttacttttctcttattacttagatgacactggatcaaaaatccatctgactcaacaggtagacatggcggcacaggttgcctctggaatggcctatctggagtctcggaactacattcacagagatctggctgccagaaatgtcctcgttggtgaacataatatctacaaagtagcagattttggacttgccagagtttttaaggtggatttagttttgttttaattagtttttgtaataggtcaaaagtctaacagttagtagaccaatagatatactgttattctttaaaacaatgtttctccaagttctgtagtccataaactacttcagtagtccaaagccttacaaactacctgcaccttcctatttcttaatcaaggagaaacaaaataaagaaaacaatgaccaaccagattggaaagtatgtacttaagtttatagttgaattaatgatctatttttcagttagtaccagtcacctctgtttgcctctatttcctttacaaaagcagtacactttgtgcagtgttaacctaaaccactattactcactgtatgccagattaatttgcatgctgccagaattcttcagcaatcattggctttttgatttccccatttttacctcagtctgaaagatactatataggagatataatattaggtgcttttctcttaaattaattttacatttccacattgtaccctaaaaatatggacatagggcataaaacaacaaataaatgattcccttttaatcttcatgaattcatcatttttttctttttgtaaattaattagtaccccagtgagtttatatattaatttaaaacacttggatcctacttttcattattagcaagtggttacatggtaattatcaaagtcagtggcttttcaatatcatcagtaaatcaaacaatagactttgcttcctttttttttttttttttttgctcaagaccagatgtgaagccagaatcatcatgtattaattctccaaatgtagtagaatgtttctttcagtgctattcttggcacatagtaggctcttaaataatattttattaatgacttcccacatatttttcagtcttgtatgcaagattcagaatttgctactgtaattgtcagttgaactaagctcattttgaatcttttctctctaaattttgaagtgaagcagattatagatgaatgaggttagcaaaaaaaaaaaaattgctttaactcggcctgattccttaatacatgaacaggtagataatgaagacatctatgaatctagacacgaaataaagctgccggtgaagtggactgcgcccgaagccattcgtagtaataaattcagcattaagtccgatgtatggtcatttggaatccttctttatgaaatcattacttatggcaaaatgccttacagtggtgagtaattaattctgaagtggacctttctgctgcatgtcacttacttaggtgtgattttaactgctttgcccagacttagagggcagagttatgaggctgaccataccatacctgcgggagcttgatagataaaatttgatgatgataatttgcattaatgaggtggtttattgcttccctctcctttgctagtgaattgcagtcttatagacatcacttgctgcaggatttagtttaatctgtgtaacctgagaaggggatggcagaccttaaatctttgccaaagaaattgacttacttagtaacctagagtataaatggctataagtttaagactctgacctttaacttgttttttttgttgttgttggtttcgttctgtattttcaaggtatgacaggtgcccaggtaatccagatgttggctcaaaactatagacttccgcaaccatccaactgtccacagcaattttacaacatcatgttggagtgctggaatgcagagcctaaggaacgacctacatttgagacactgcgttggaaacttgaagactattttgaaacagactcttcatattcagatgcaaataacttcataagatgaacactggagaagaatatcaaataataaagtagcaaaacaaattcaaataatccattccaaaatacaatgttatcaaccaactgcacaatcagtttatcctgacatattcaagtgataggataaagttggccatgtattatgaaaaagattatttgtgcattttattgactgggcaacactgcaggacagtcaaggtgatatataatttcctcactgcctggtaaaattaagcacactaaaccaagttatttttctttttaagagatacttacatttccatttattgtttgaaatgtcgatcaagagaatcaacagatgatagtccaatttttactcagtgactgttgtagcattttcctgtttactgattagagtggttattcattattcctcagattgctgaatcccatcaggctgttattatgaaggaatttgattgctttgctgcacagcaggacctgtgctttgagatttttttttctcttttaaaatatcctgtaactacaatgatggtaaagccatgttaaatgacttgattgtacttggagtaattgcacatttttttctatgcataaaaaaatgatgcagctgttgagaaaacgaagtctttttcattttgcagaaggaaatgatggaatttttctgtacttcagtatgtgtcaactgagagtcatatacattagttttaatctcttaatattgagaatcaggttgcaaaacggatgagttattatctatggaaatgtgagaaatgtctaatagcccataaagtctgagaaataggtatcaaaatagtttaggaaaatgagaggagaacagtaggattgctgtggcctagacttctgagtaattaataaagaaaaagaagtaccctttggcctacagatcagagttttatttattttttattttttactttttattatagtttaagttctggggtgcatgtgcagaatgtgcagttttgttacataggtgtacaagtgccatggtggtttgctgcacccatcaacccgtcgtctacattaggcatttctcctagtgctgttcctcccctagccctccatcccctgacaggccccagtatgtgatgttcccctccttgtgtccatatgttctcattgttcagctcccacttatgagtgagaacatgctgtgtttggttttttgttcttgtgttagtttgttaagaatgatggtttccagctttatccatgtccctgtgaaggacatgaactcatccttttttatggctgcatagtattccatagtgtctatgtgccacattttctttatccagtctatcgttgatgggcatttgggttggttccaagtctttgctattgtgaatagtgccacaataaacatgcatgtgtctttatagcagaatgatttataagcctttaggtacatacccagtaatgggatcgctgagtcaaatggtatttctagttctagatccttgaggaattgctacactgtcctccacaatggttgaactaatttatactcccaccaacagagtaaaagtgtaaatgtgttcctatttctccacatcctctttggcatccaaaacagcatcctgttgtttcctgactttttaatgatcaccattctaactggtgtgagatggtatctcattgtggttttgatttggatttctctaatgatcagatgatgagctttttttcatatgtctgttggctgcataaatatcttcttttgaaatgtgtctgttcaaatccttcgcccactttttgatggggttgtttgtttttttcttttaaatttgtttatgttccttgtagattcttggtattagccctttgtcagatggatagcttgcaaaaattttctcccattctgtaggttgcctgttcactctgatgatagtttcttttgctgtctagaagctctttagtttaattagatcccatttctcaatttgggcttttgttgccattggtttttgtgttttagtcatgatgtcttttccaatgcctatgtcctgaatggtgttgcctaggttttcttctagggtttttatggttttaggtcttacatttaagtctttaatccatcttgagttaatttttgtataggtgtaaggaaggggtccagtttcagttttctgcatatggctagctagttttcccaacaccatttattaaatagggaatcctttccccattggttgtttttgtaaggtttgtcaaagatcagatggttgtagatgtgtggtgttatttctgaggcctctgttctgttctgttggtctagatatctgttttggtaccactaccatgctgttttgtttactgtagccttgtagtatagtttgaagtcaggtagcatgatgcctataactttgttctttttgcttagaattgtcttggctatgcgggctcttttttgattccatatgaagtttaaagtagttttttccaattctgtgaagaaagtcaatggtagtttgatggggatagcactgaatatataaattgccttgggcaatatggccattttcacgatattgattcttcctatccatgagcatggaatgtttttccatttatttgtgtcctctcttatttccttgagcagtggtttgtagttctccttgaagaggtcctttgcatcccttgtaagttgtaatcctagatatttcattctctttgtagcaattgtgaatgggagttcactcatgatttggctctctgtttgttattggtgtataggaatgtgtgtgatttttgcacattgattttgtatcctgagactttgctgaagttgcttatcagcttaaggagattttgggctgagatggtggggttccctatatatacaattcatatcatctgcaaacagagacaattttacttcctgttttcctatttgaataccctttatttctttctcttgcctgattgccctggccagaactttcaatactattttgaacaggagtggtgagagggggcatccttgtcttgtgccagctttcaaagggaatgcttccaggtttacccattcagtatgatattggctgtggttttgtcttaaatctgtcattttttttgagctacgttccatcaatacctagtttattgagagtttttagtatgaaggggtgttgaattttatcaaattttctgcatctattgagatcatcatgtggtttttgtcattggttctgtttatgtgatggattgtgtttattgatttgcgtatgttgaaccagccttgtgtctcagggatgaagccaacttgatcgtggtggataagctttttgatgtgctgctgcactcagtttgccagtattttattgaggatttttgcatggatgttcgtcagggatactggcctgaaattttctctctttttttttttttgttgtgtctctgccaggttttggtttcaggatgatgctggcctcataaaatgagttagggaggagtccctcttttcctattgtttggaatagtttcagaaagaatagtactagctttgtacctctttgtacctctggtagaattcggctgtgaatctatctggtcctggactttttttggttggtaggctattaattactgcctcaatttcagaacttgttattggtctatttagggattcatcttcttcctggtttagacttgggagggtgtatgtttgcaggaatttacccatttcttctagattttctagtttatttgcttagaggtatttatagtaatctctgatggtattttgtatttctgtgggatcagtggtgatctccgctttatcattttttattgtgtctatttgattctgctctcttttcttctttattagtctggctagcattctattttgttgatcttttcaaaaaatcagatcctggattcattgattttttgaaaggtttttcatgtctctatcaccttcagttctgttctgatcttagttatttcttgtcttctgctagcttttgaatttgtttgctcttgcttctctagtacttttaattgtgatattagggtatagattttagttctttcctgattcctcttgtgggcagttggtgctataaatttccctctacacactgctttaaatgtgtcccagagattctggtatgttgtgtttttgttctcattggtttcaatgaacaactttatttctaccttaattttattatttacccagtagtcattcaggagcaggttgttcagtttccaagtagttgttaggttttctgtcagttttaatcctgagttctaatttgattgcactgtggtcttagagactgtttgttatgacttccgttcttttgcatttgctgaggagtgttttacttccaattatgtgatcacttttagaataagtgcgatgaggtgctgagaagaatgtatattctgttgatttggggtagagaattctgtagatgtctgttaggtccacttggtccagagctgagttcaagttctgaatatctttgttaattttctgtctcatttatctgtctaatattgacagcaggctgttaaaatttcccactattattgtgtgggagtctaagtctctttgtagttctctaagaacttgctttatgaatctgggtgcttctgtattgggtgtatatatatttaggatagttagctattcttgttgcattgatctgtttaccattatgtaatgcccttctttgtctcttttgatctttgttgatttaaagtctgttttatcagagactaggattgcaacccctgctttttttttctgctttccgtttgcttcgtaaatattcctccatccctttatcttgagcctgtgtgtctctttgcatgtgagatgggtctcctgaatacagcacactgatgggtcttgagtctttatccaatttgccattctgtcttttacttggggcattcagcctgtttacatttaaggttagtattgttatgtgtgaatttgattctgtcatatgatgctagctggttattttgcccgaaagttgatgcaggttcttcgtatcctcgatgatctttacaatttggtatgtttttgcagtggctggtattgattgttcctctctatgtttagtgcttccttcaggagctcttttagggcaggcctggtggtaacaaaatctctcagcatttgcttgtctgtaaaggattttatttctccttcgcttatgaaactgagtttggttggatatgaaattctgggttgaaaattcttttctttaagaatgttgaatattggcccctactctattctggcttgtaaggtgtctgcagagagatcctctgttagtctgatgggcttccctttgtggctaacctgacctttctctctggctgcccttaacattttttccttcatttcaaccttggtgaatatgacgattatatgtcttggggttgctctgctcgaggagtatctttgtggcgttctctgtatttccttaatttgaatgttgacctgtcttgctaggttggggatgttctcctggataatatcctgaggagtgttttccaacttggttccattctccccgtcactttcaggtacaccaatcaaacgtagacttggtgttttcacataatcccatatttcttggaggctttgttagttccttttcactcttttttctctaatcttgtcttctcctttatttcattaagttgatcttcaatctttgatatcctttcttgtgctttatcgacttggctattgataattgtgtatgcttcatgaagttctcatgctgtatttttcagctccatcaggtcatttatgtgcttctctatacttgttattctagttagcaattcctctaatctttttacagtgttcttaacttccttgcattgggttagaacatgctcctttagcttggaggagtttgttattacccaccttctgaggcctacttctatccatccgtcaaactcattctccatccagttttattcccttgctggcaaggagttgtgatcctttggaggagaagaggcattctgtttttttgaattttcagctgttttgcgctggtttctcctcatcttcctggatttatctacttttggtctttgatcctgctgatgttcggatggggtctctgagtggacatactattcctttctgtttgttagttttccttctaagagttagtgccctctgctgcaggtctgctggagtttgctggaggtccactccagatgctgtttgccttggtgtcacgagtggaggctgcagaacagcaaagattgctgcctgttctttcctctggaagcttcgtcccagaggggcacccactggatgccagccagagctctcctgtatgaggtgtctgttggcccctactgggagatatctcccaatcaggataaacgagggtcagggacccacttgaggaggcagtctgactcttaccagagctcgagcactgtgctgggaaatccactactctcttcagagctgtccggcagagatatttaagtctgctgaagctgctcccatatccaccccttcccacaggtgctctgtcccagggagatggggttttatctattagtccctgactgccttttttttagagttgccctgcccagagaggaggaatctagagaggcagtctggccagagtggccttgctgagctgaggtggtgggctctacccaattcgaactcccaggcagctttgtttagactgtgagggtaaaatgcctactcaagcttcagcaatggcagacggccctcctccctccaagctcgagtgtcccaggtcgacctcagactgctgtgcttgcaatgaggatttcaagccagtgaatcttagcttgctgggctccgtgggggtgggacccgccaagctagaccacttggctccctggcttcagccccccttccaggggagtgaatggttctgccttgctggcattccaggcaccactggggtatggaaaataaaactcctgcagctagttcagtgtctgcccaaatggctgcccagttttgtgcttgacacccagggccccagtggcgtaggcaccggagggaatctcctggtctgcaggtttcaaagaccatgggaaaagtgcagtatctgggctggagtgcaccgttcctcaggtacagtccctcatggcttcccttgggtagaggaggtagttccctgaccccttgtgcttcctgggtgaggtgacaccccaccctgtttcagctggccctccatgggctgcacccactgtccaaccagtcccactgatatgaactgggtacctcagttggaaatgcagaaatcacccgccttctgcgttgatctcactgggagctgcagaccagagctgttcctatttggccatcttgccagcaatcagaccagagttttaaatggactacaaaataggtcaaactctatttcagaactagaggctaggaataatgtccaaacttggttatgaaagtttttttttttttttggtctggtaggataagagggtttttactcatcttaagtttgaattaaactttgtaacaaagttattgtttttttaaacaatgcatgtatcaaattatctgtctcattagataactaggtagacttttccaagatggtttcaaaatcaaatatatattcaaagatcttccagtgtaaagcaataggaatgaaacaagccatgagaaagcagaatattttgagtatattctcatgcctttctttaaaggagaagcgcctatctaaacagttacagaaacccaaattcaaagtagattaaacaagaagtaaatttgtaaactcttttaactgggagacaggaagtagggagggctccaggcacaatatcattagcagttcaatgtgaacgaagacccatgtcctttccaagcctccctctgccatcagcattgccctccttcccagggtcacagatggctatcaatggcaaaactggggttccgcgttctcttctcctcatctggcaagagaaaatgggaaatctctatcccaagcttggattaaaaattattttcatttttgtgttccagcaaacttgggtcctatgcccagccatggaccaaaaataggcttaatgtgaatgttatgtgctgattggattaaaataagttctgactctgaatctgggaatgtggtcaccttcctcagagacaagttgagaggttggcttatctgaataaaagcagagaatatgagatgctggagaggtgttcattaaggagaacattccctgaggtgaattaacggttagaattatctatctctgtatttatctatccacccatctatcatcatcatcacctcatctccctcctttctctctctctaaatatatacatgcgggtatgttgagtgtgtatatatttatttttttgtgtgtttatatggtgtgtgtgtgtgtgtattccaggcagatgtgtgcatatatacccaaactttcctgatgaccttgaaattaaatgggtcatgtgaagctaaagattatagaaccccttgattcctttataaacagtatttctaagataagatcaacactaatctttcaaattagttgactgtgtatagaacaacttgtttatttaaagtcatctagtctaatgcaatcaaggagtaaattataaataaccagttagcataaatggaaagaaaatagttccttttctttgaattcatttcatgtttaatttttcttgcgcacatatagaaatgaatagaaatattcccatttcaatatgcaaattcagccactatatagtttgtttctttttggtagctaataataataaatttttaagtaagatctgattttgaaatatgaaaagaagtttatcctttcctgttttaataccacctgatacccgtttaacttactgtgtttgattcttggggacatttatgttcaaggttctgtcaaagcaatctattattcttgtttttacctgatggatcatggagaaaaataatggattcagttatgagaaacagtaatagatttttttaactgccataaatttctctccctgtattaaataaaaggatcaggaaaagataagttgaattttcctacaatgagccagctcttcttaaatttacctcccataaattgtagcaaagcacttttcatataatgttttatttatgtaattcagttatttggagatggtggtgagggatgtgagtacatcatttcatgttgtatttcaaatctcttttgacagaaaccctaagaatttgcaataaagaaaattcaatgttccattaagtttttctttttctttttttttaaaaagagggtaaggaaggaaataagggaatagatttaagttacctaaggtcaaaagaggcacagggtagactctgaatagttgtggaacctgaatattttgtcatcaaaaacaaagttaaagtcagagtgaccaggaatctgcaaactggctgtgggaatgggttgacttaaaagacagacaaagaactagcctgtggggtaacatcaggctaggctcaccctcagcttctacccacaatatctgtatgatgaccatgtggatctaatgaaccaggaggggcccaaactcttccgactctgtggaggcctaaaggaaactgttgccattggaaggatgccataccactacccagctggagcttcctgaaggaagcagagcccagctggtgttccatggtttgttaagcatatgccatacctacaatcacttttttcatggtctggttgagcatatgatttctgaaccaaatagcctttctggtattgtgtcattggtgactcattatgattctttaaaaagacacattatgtgagctagaatggtgatgatttgggtaccttattcaaattgcatcatcatttaattcaagagaaaggccattcttaaagtaaaagtaaatgaggtttgtacacctgggtattggaattgccagtgggctgatctgacaatgtttgattcttgttttttctggaattattatgtagaagattcagtctataatcttcaacatgatgcaaatattcagtgtcataggatcaaaaaaatgctggaaagtatctaaaaatcttttaaattcatatcttaattttcagtgttatcctcttactgcctacattcccccactaaactcttagatttttctctgcttttgttaagaaagtgatgttagtaggcctctcaagttatttatgaaatttagaaatatactggagaacaaagtagtatataaaccctgaatttcaaaagccttaacaagtttagcttcaatctacattcagatgacactatctacagagatgttataagattaaattacaagaaaagagatgcccaattatttccatttactcttcttgcctaggtagttaatttatctattattcatttgaagcaacagacgtcaatgtaacatctttttcattttcatggagaataatcagcttttccagaaaagggtgctatatctcaaacacacctcaagtgtccagttggaagtattaccatgcagaggattcaagtcatattacctaataaccagaagttgtatgttgggaaaaagtggttaaaagcaactaaaactgccctgtttggaagaaactaaatattgctttataatgattttctgatattttagaatagaggcttcaattatactatttgtgaaaaagaaaactgcttggtattaaccaagttacatttaatttttatggtccacaaaatttcagagtagaaatatatcatagcttttaatcaattttcaaaatctatatttaattattgattcaaaaaataagaaataaaatcaattagccagatttgtatactttaaagctaccacagtgagatttttctcttaaaaacatgcatgtttttatattgtattctttaatatttatattgtacagttacatgtgacacatattacatatgactaatttatatgtagcaacagggattaaagaagacctcttttaattgtaccacttgttataatgctattatttacccagattcaaatgtaactacttacaatttttaaacatttttatttctgtattctttaaaatattaaggcaatggtttttcttgaaattatattttgccctatgtattctatttttattcacactggatttattatgataattatatcaaagtgattatttttaccctgacttttaaaagtcaactgtttcagaagtcaagttgattgtggatctaaaatataaattcaatgtgttcatagca

SEQ ID NO: 362 - DNA, 2726 bp, Homo sapiens
  source 1..2726: mol_type = genomic DNA; note = NC_000008.11:144358547-144361272 SLC52A2 [organism=Homo sapiens] [GeneID=79581] [chromosome=8]
ccagcttccggggcgggacttccggtcgtgggccatgccgggggcgggcccggaaccgccacgggtgagtcgggtcgtggctgctgccgggtcctgcgcgctccggactgaggtggcgtccctgggccggacggcggtgtcccggcgtggcgggaagccggcactggagcgggagcgcactgggcgcgggaccgggaggcgcagggaccggacggctcccgagtcgcccacctgacggtaccgagagggcggcgcccctccgagcagagccgtcccggccactcccctgggatctgacttggctcttgcggtcgcgggcaccgtgaagccctggggtgtgcgtggctcctcctggtaggcgccctttcccggcgtccggcttggggtggtggtggcgttgactccagccccgcctctccctggagaggagggctccactcgctccttcggcctcctcccctggggccgcagcgactcgggccggcttcctgcttccctgcctgccggcggtcccgctgggtacgttttagccaatcctccccatctgcgctcctgcccggggctcccccagttcccctggtctcaccctgttctgactccggctctgcatcctatctgtttctctgtttctttcaagctagaagaagtcttcacttcccaggagagccaaagcgtgtctggccctaggtgggaaaagaactggctgtgacctttgccctgacctggaagggcccagccttgggctgaatggcagcacccacgcccgcccgtccggtgctgacccacctgctggtggctctcttcggcatgggctcctgggctgcggtcaatgggatctgggtggagctacctgtggtggtcaaagagcttccagagggtgagtgggagggaggtgcaggtgtgcccaagactcctgggctgcggtcagtgggatctgggtggagctacctgtggtggtcagagagcttccagagggtgagtgggaggaggtgcaggtgtgcccaggaaggtgggctttggcactcttcctcccttgggcatcatgaccctgacatggcctcctcccttccctgcaggttggagcctcccctcttacgtctctgtgcttgtggctctggggaacctgggtctgctggtggtgaccctctggaggaggctggccccaggaaaggacgagcaggtccccatccgggtggtgcaggtgctgggcatggtgggcacagccctgctggcctctctgtggcaccatgtggccccagtggcaggacagttgcattctgtggccttcttagcactggcctttgtgctggcactggcatgctgtgcctcgaatgtcactttcctgcccttcttgagccacctgccacctcgcttcttacggtcattcttcctgggtcaaggcctgagtgccctgctgccctgcgtgctggccctagtgcagggtgtgggccgcctcgagtgcccgccagcccccatcaacggcacccctggccccccgctcgacttccttgagcgttttcccgccagcaccttcttctgggcactgactgcccttctggtcgcttcagctgctgccttccagggtcttctgctgctgttgccgccaccaccatctgtacccacaggggagttaggatcaggcctccaggtgggagccccaggagcagaggaagaggtggaagagtcctcaccactgcaagagccaccaagccaggcagcaggcaccacccctggtccagaccctaaggcctatcagcttctatcagcccgcagtgcctgcctgctgggcctgttggccgccaccaacgcgctgaccaatggcgtgctgcctgccgtgcagagcttttcctgcttaccctacgggcgtctggcctaccacctggctgtggtgctgggcagtgctgccaatcccctggcctgcttcctggccatgggtgtgctgtgcaggtacacaaggacccccagcccctgtgcgggtggaactcagggctaggagccaggtcctggcgcagtcagccctgacattctgctcgctcactgcaggtccttggcagggctgggcggcctctctctgctgggcgtgttctgtgggggctacctgatggcgctggcagtcctgagcccctgcccgcccctggtgggcacctcggcgggggtggtcctcgtggtgagcacagggggacatgaagtggggtgggggggcgttgccctggagcaggcacatctcacgctcagctggtgctgtgtccccctcaggtgctgtcgtgggtgctgtgtcttggcgtgttctcctacgtgaaggtggcagccagctccctgctgcatggcgggggccggccggcattgctggcagccggcgtggccatccaggtgggctctctgctcggcgctgttgctatgttccccccgaccagcatctatcacgtgttccacagcagaaaggactgtgcagacccctgtgactcctgagcctgggcaggtggggaccccgctccccaacacctgtctttccctcaatgctgccaccatgcctgagtgcctgcagcccaggaggcccgcacaccggtacactcgtggacacctacacactccataggagatcctggctttccagggtgggcaagggcaaggagcaggcttggagccagggaccagtgggggctgtagggtaagcccctgagcctgggacctacatgtggtttgcgtaataaaacatttgtatttaa

SEQ ID NO: 363 - DNA, 2721 bp, Homo sapiens
  source 1..2721: mol_type = genomic DNA; note = NW_018654716.1:89155-91875 SLC52A2 [organism=Homo sapiens] [GeneID=79581] [chromosome=8]
ttccggggcgggacttccggtcgtgggccatgccgggggcgggcccggaaccgccacgggtgagtcgggtcgtggctgctgccgggtcctgcgcgctccggactgaggtggcgtccctgggccggacggcggtgtcccggcgtggcgggaagccggcactggagcgggagcgcactgggcgcgggaccgggaggcgcagggaccggacggctcccgagtcgcccacctgacggtaccgagagggcggcgcccctccgagcagagccgtcccggccactcccctgggatctgacttggctcttgcggtcgcgggcaccgtgaagccctggggtgtgcgtggctcctcctggtaggcgccctttcccggcgtccggcttggggtggtggtggcgttgactccagccccgcctctccctggagaggagggctccactcgctccttcggcctcctcccctggggccgcagcgactcgggccggcttcctgcttccctgcctgccggcggtcccgctgggtacgttttagccaatcctccccatctgcgctcctgcccggggctcccccagttcccctggtctcaccctgttctgactccggctctgcatcctatctgtttctctgtttctttcaagctagaagaagtcttcacttcccaggagagccaaagcgtgtctggccctaggtgggaaaagaactggctgtgacctttgccctgacctggaagggcccagccttgggctgaatggcagcacccacgcccgcccgtccggtgctgacccacctgctggtggctctcttcggcatgggctcctgggctgcggtcaatgggatctgggtggagctacctgtggtggtcaaagagcttccagagggtgagtgggagggaggtgcaggtgtgcccaagactcctgggctgcggtcagtgggatctgggtggagctacctgtggtggtcagagagcttccagagggtgagtgggaggaggtgcaggtgtgcccaggaaggtgggctttggcactcttcctcccttgggcatcatgaccctgacatggcctcctcccttccctgcaggttggagcctcccctcttacgtctctgtgcttgtggctctggggaacctgggtctgctggtggtgaccctctggaggaggctggccccaggaaaggacgagcaggtccccatccgggtggtgcaggtgctgggcatggtgggcacagccctgctggcctctctgtggcaccatgtggccccagtggcaggacagttgcattctgtggccttcttagcactggcctttgtgctggcactggcatgctgtgcctcgaatgtcactttcctgcccttcttgagccacctgccacctcgcttcttacggtcattcttcctgggtcaaggcctgagtgccctgctgccctgcgtgctggccctagtgcagggtgtgggccgcctcgagtgcccgccagcccccatcaacggcacccctggccccccgctcgacttccttgagcgttttcccgccagcaccttcttctgggcactgactgcccttctggtcgcttcagctgctgccttccagggtcttctgctgctgttgccgccaccaccatctgtacccacaggggagttaggatcaggcctccaggtgggagccccaggagcagaggaagaggtggaagagtcctcaccactgcaagagccaccaagccaggcagcaggcaccacccctggtccagaccctaaggcctatcagcttctatcagcccgcagtgcctgcctgctgggcctgttggccgccaccaacgcgctgaccaatggcgtgctgcctgccgtgcagagcttttcctgcttaccctacgggcgtctggcctaccacctggctgtggtgctgggcagtgctgccaatcccctggcctgcttcctggccatgggtgtgctgtgcaggtacacaaggacccccagcccctgtgcgggtggaactcagggctaggagccaggtcctggcgcagtcagccctgacattctgctcgctcactgcaggtccttggcagggctgggcggcctctctctgctgggcgtgttctgtgggggctacctgatggcgctggcagtcctgagcccctgcccgcccctggtgggcacctcggcgggggtggtcctcgtggtgagcacagggggacatgaagtggggtgggggggcgttgccctggagcaggcacatctcacgctcagctggtgctgtgtccccctcaggtgctgtcgtgggtgctgtgtcttggcgtgttctcctacgtgaaggtggcagccagctccctgctgcatggcgggggccggccggcattgctggcagccggcgtggccatccaggtgggctctctgctcggcgctgttgctatgttccccccgaccagcatctatcacgtgttccacagcagaaaggactgtgcagacccctgtgactcctgagcctgggcaggtggggaccccgctccccaacacctgtctttccctcaatgctgccaccatgcctgagtgcctgcagcccaggaggcccgcacaccggtacactcgtggacacctacacactccataggagatcctggctttccagggtgggcaagggcaaggagcaggcttggagccagggaccagtgggggctgtagggtaagcccctgagcctgggacctacatgtggtttgcgtaataaaacatttgtatttaa

SEQ ID NO: 364 - DNA, 19623 bp, Homo sapiens
  source 1..19623: mol_type = genomic DNA; note = NC_000001.11:206635536-206655158 DYRK3 [organism=Homo sapiens] [GeneID=8444] [chromosome=1]
acttcccagccggggccagtcgggagcgaaagtgcgctgagctgcagtgtctggtcgagagtacccgtgggagcgtcgcgccgcggaggcagccgtcccggcgtaggtggcgtggccgaccggacccccaactggcgcctctccccgcgcggggtcccgagctaggagatgggaggcacagctcgtgggcctgggcggaaggatgcggggccgcctggggccgggctcccgccccagcagcggaggtaacggcgccacggggtaacgggctggaggcgccacagggagcggctggcgctggcaagcgaagcttgggggtggggaggaggtagagtgagccctcagtaggagggacgagggcaggggtctgactgcctccccgggaccgcccccacctcctctctatcagggccccctccccccatccctgtctcaccgggcgcgggggacggggctagagcggagttagagcaagaagaatttccacccctggattccctctgaaaccctagatcggggtatatgttaagggattacgaaaatctaggactttttgtggggctttttattaaagggggggagcccgggagcaataccttggaaagaagccctgttgcttagagcggataaccaacggctgaactcttggggtttgctgtgaggggtgcggtctagcttcgaatgtacaggttatgggctatgctgggtacggctttctccggatcctattttgagagattccccaccttgcgttgtattttacacctaaatggagagaagagacccttgctccccgctttatttgcatgcagactcttgttaatttcctctggctgttagtcactaggcaattttgcacgttttctttttctttatatatgtggacgcctatcctggtttgttttatcaggcttatggcaaagggtcagtcacatccagaatatttggtttctgttggtgaagccattccctgttaaaaatataaataattctatcagaatgtgagcatgtttttaaaaagagcattccaaaaatatttgtagcggtttttttccctttatatttttataacacatctataaagaaaactctagaatgaatttcacaaaacagtttttaaggtgaccagaatattccaggatattttaaaagacgttaaaaaattattcctctgcaacatcatcattgttatattcatagtgtatcatgtaaaatgatacaatgaaatgctgatgtgtgtaactgggaaatccgtgttcttggtagcagatgaaatacattattcagggccatcttgtggattaaataaatcctctccgtcttttgtgttcccttacagtggtggagccacagtgttaaagaacagagaagtgatccttaatcatttagaattttgcctccaccatccaccagaaaatgaagtggaaagagaagtaaattcaatacattttataatttagagcatccttttagcgtttgctgtagtacttactgtatttttctgcaggttaggtagatgtaagtaggtaagtaagtaaatgaataaagagaagacagccttaaaaaggccttttatttcttgcctgtaagacccagaagtgtgaagactggagctagtcttcccattaacatggggaagacaggctcagaggagaaggtagcactggggaagacaggctcagaggagaaggtagcacagccagtgttagagctgagattagaatccaagtctctgacttgagaaactattacctctgttagttttttctggtctgtttttttctctgtgagcttcagtttcaaactagcctttattttcaagtagtaagttattatgagatccttctgatagtccttattgtgtttaacaacattcagaaggacttgtttcaactgttttaaaatacaaacctagaaatgctgtccttgaaaaacaaaagttggatttcctctgtacctcttccaaataccccagttgtttgtattcagtgccaaaatgtagtgtagacatttatttctattactgttccttgtagcagatatgaagcagttaagacataggattctatattcttcagttcctgacagattttgtctgtaatccttttaactaggttgggggatggtgtctatgacaccttcatgatgatagatgaaaccaaatgtcccccctgttcaaatgtactctgcaatccttctgaaccacctccacccagaagactaaatgtaagtaaaagaagtcattctttgtacatgaattgttttggaaaggaggaagtgctacttaatgctcaaggtacacttatgtatcactgacaaccagacttttttttggtttatttttgatttctcttgactttggaataacaatgtctgtggtccaaatttagcttttcagaatgatttcagtttggagctcacctttttatttcagtttccactgggataaatatatagcactaggaaaaaaataatatgctacttttatttaggtaatgcttatttttgtataggatgatatacacctagtattacaaaggctccttttaacaaaaataagaaacagaaaacatgtcagaattcatagatctgcaggagttttttttcccctgcacggtggaaatgcagtcttcgtttattagtatactaaagagaaccattttatagatagatgataactacaacagtttggtttttaatgcacttaatcattttggggactgcagacacttagcttttttttttttttttttttttttgaggtggagtctctctctgtcacccaggctggagtgcaatggcatgatcttggctcactgcaacctctgcctcccgggttgaagtgattctcctgccttagcctcctgagtagctgggattacaggcgcgtgccaccacgcctggctaatttttgtatttttagtagtcaggggtttcaccatgttggtcaggctggtcttgaactcctgacctcgtgatccacccgcctcggcttcccaaagtgctgggattacaggcgtgagccaccgtgcttggcagcttttttttttttttaacttaagataaaattaatttgcattccttcagcatgcatagagtggtaggcagagcagggtttggccaagttccatgacaaagagaggctatcctatgactttaaaatttcctgcatatgtcatcagatgaacaaactgaataattgaattgactcatttgtaatatttctctttcacgtttctgtgtttaagacctgaaattgtttctatatggaaaaatcacttctatttttcatagtccttcctgtggtcatcagtttttgcttaaaatcaacctttttccttttttttttttttttttttcctgagacgcagtcttactctgtcttccaggctggagtgcagtggtgtcatgtcagctcattgcaacctccacctcccgggtccaagcaattctcctgcctcagccttcctgagtagctgggattacaggcgactgccaccacacccagctaagttttgtatttttagtagagacagggtttcaccatgttagtcaggctggtctaactcctgaccttaagtggtccacttccctcggcctctggaagtgctgggattacaggcgtgagccaccgcacccggccctttccccactttcaacactagtagtatacaaaacgtgagctaaaaatattttgaaggctggtcaccctatttttcgtcccctttttggagtgtagtggggtttctttccattctttgcaagttgtttctttaatatgtcaaaatgtctaagaacttcagaaccatatacatcttgtgttgcccatcagattgcttggttacttgctgccaattggttcacctctataggaaactatttgcaattgggttgaagtgttaacatctgactttaagtcattttaactgattttttttttttttttttttgagatggactctcactctgtcacctaggctggagtgcagtggcgcaatcttggcttactgcaacctcccgggttcaagtgattctcctgcttcaccctcccaagtagctgggattataggcaccaaccaacatgcctggctaatttttgtatttttagtagagatggggtttcactgtattggtcaggctggttttgaactcctgaccttgtgatgcacccacctcagctccccaaagtgctgggattacaggcgcaagccaccgcgcccagccaagtcatttttactttgattcagagttagccgatgctatttaccttccagtaggttacttacattgtatgtttcaggatcaaaaattaatttcttactgcatggtgttaggcatgacagttttgtgagggagcaagaagattttagatgtcttactcattactcatttcttttttttttttttttttttttttgagaccgagtctcgctctctcgcccaggctggagtgcagtggcacaatcttggcttgctgcaacctccatctcccgggttcaagcagttctccctgcctcagcctcccaagtagctgggattacaggcatctgccaccatgcctggctaatttttgtatttttagtagagatggggtttcaccatgttggccaggatggtcccgaacccctgacctcaggtcatccacccacctcagcctcccaaagtgcaggctttacaggcgtgagccaccacgcctggctgtctttactcattttgctgaaaaagaaaataaaaataaaaaatgccttttgacctcttggtgccacttacatttcattatgccatgactctatcccgagatcctgttacttttttttacaaagttttctagcttcatttattcaagatgctcctacattctcatggtaaactataaatcatctgcccataggcttttattgggttaagttttgtgttacagggatttagggtttgggagctggggaaaaggtagggttttatatctgagtgagaaggatattcctttattccttttcaatttctcagcaagatttttttttttttttttttttaagacagagtctcgctctgtcactgaggctggagtgcagtggcactatctcggctcattgcaagctccgcctcctgggttcatgccattctcctgcctcagcctcccgagtagctgggactacaggcacccaccaccacacctggctaattttttgtatttttagtagagagagggtttcatcgtgttagccaggatggtctcgatctcttgacctcgtgatccgcccgccttggcctcccaaagtgctgggattacaggcgtgagccaccgtgcctggcctctcagcaagatttttaagacttgattaatacagtagaagattctatttaaaatgccagaagcccatcaaattagcagggtatgtgaagcattcttatgaaataaaacatgataaatatgacattattcatgtctctggatataattacatggttaagaaaatacttggtagagtcagtcatatacattgcttggttattgtgattataaccctagactagaaatatttagtgttttttttttcaataggtttttggggaacaggtggtgtttgggttacatgaataagttctttagtggtgatttctgagattttggtgcacccattacccgagcagtgtatactagacccagtgtgtagtcttttacctctcactcctctaccaccctatcccccaagtccccaaagtccattgtatcattcttaagccctttcatcgtcttcatagctttgctcccacttatgaatgagaacataccatgtttggttttccatttctgagttacttcacttagaataatggtctccaattccatccaggttgctgtgaatgccattatttcattcttttttatggctaaatagtattctatggtatatatatatataccataatttctttatctactccttgattgatgggcatttggggaaatatttagtgttttaaaacaattatagtttaatatgtgtgaacactgtagatttttttagaacaatggaaggaaggttttatttataacacatcagacttgatatgtaattgattcaggccagtatttgagttatttacaggaaaggaaagaaagttaagaagagaacccctccctgaaaggatttcctatttaatgtgctgggaaaactggctagccatatgtagaaagctgaaactggatcccttccctacaccttatgcaaaaattaattcaagatggattaaagacttaaatgttagacctaaaaccataaaaaccctagaagaaaacctaggcaataccattcaggacataggcataggcaaggacttcatgtctaaaacaccaaatgcaacggcaacaaaagccaaaattgataaatgggatctaattaaactaaagagcttctgtacagcaaagtaaactaccatcagagtgaacaggcaacctacagaatgggagaaaatttttacaatctacccatctgacaaagggctaatatccagaatctacaaagaacttaaacaaatttacaagaaaaaatcaaacagccccatcaaaaagtgggcaaggaatatgaacagacacttctcaaaagaagacattgatgcagccaacagacacatgaaaaaatgctcaccatcactggccatcagagaaatgcagatcaaaaccacaatgagataccatctcacaccagttagaatggcgatcattaaaaagtcaggaagcaacaggtgctggagaggatgtggagaaataggaacgcttttacactgttggtgggactgtaaactagttcaaccattgtggaagacaatgtggcaattcctcaaggatctagaactagaaataccatttgacccagccatcccattactgggcatatacccaaaggattataaatcatgctgctataaagacacatgcacatgtatgtttattgtggcactattcacaatagcaaagacttggaaccaacccacatgttcatcaatgatagactggattaagaaaatgtggcacatatacaccatggaatactgtgcagccataaaaaaggatgagttcatgtcctttgtagagacatggatgaagctagaaaccgtcattctgagcaaacttgcaaggacagaaaaccaaacaccacatgttctcactcataggtgcgaattgaacaatgagaacacttggacacggtggggaacatcacacaccaggacctgtcgtggggtgggaggaggggggagggatagcattaggagatatacctaatgtaaatgacgagttaatgggtgtagcacaccaacatggcacatgtatacatatgtaacatatgtaacctgcgtgtggtgcacatgtaccctataacttataataataataataaaaatataataataataataaaaaagataacccctccctgtgtggaaaaattacctcccagaattctccagattcactggagaagatgatattgatggtggactacactgaagtagcctgctctgttctggaaggcatgcttcaagagagacataaagtgcagcctatgttgagaatgtgaacaggagagtgggtgaggtaaggcagatgtagtggggatggtgaacctacagaatggtggaggcagggacagcacagccccttttaggtacccagagggttcctacttgaaatttggacacttctgtgtagttcccaaaggcaaggtacaacttattttgcaaggagagaaatttaggcttactttaaggaaaaaccatgagtcagggattctaagtgacatctttaatattattgtaatagttctatggaaattacatttctgatatgtatctgttcttattaatgttgtgtacctgagaccctctcattatcacaaacagaaatgaagaccttcagagccagtccagccttacacgtaagcagagtaggggaaattcccagggacagacgctgcaccacaaatacctttcctaacagcttgtcactggtaacttcagttcctagagaggcattccttttcattagggcattgatcttctgttgaagttcaaatatccatggagaggtaacacagtacattgtatagtgagtggaaagcatgttttatgtggggagaaagtgggtgaggcaattccgtgtatcctaagtgaaggcctattgtgggggccctcattgagcagaaggcatagttagtgctagacgcatgatggagggagatcaggctggagaaatggaggaagccgccagcaagagaagagagaaaaggggaaggggaagggtgtataggaacttaaactttaatgtattgagaattttgctgaattgtaaccagtgtcttttaaatattttatagttggtgaaattattatttttaattagaatttgattcacacaacatcctgcaagtagatattattatccacatcttacagataaagaaactgaggctcaggaaggcaacagggacctacagctttttttttttttttttttttgagaagtagtcttgccctgtcgcccaggatagagtgcagtgatgcaatcttggcccactgcaacctctgcctcctgggttcaagcaattcttcttcctcagcctcctgagtagctgggattacaggcacacactaccacacctggctaatttttgtatttttagtagagatggggtttcaccatgttggtcaggctcgtccccaactcccgacctcaggtgatctgcccactttggcctccaaaagtgctgggattacaggcgtgagccaccacacctggctggacctacagcttttaagtagtgtagccaggaccccaacccaggccttctgactccctgtttcttcaggatgtgtttcaaagacttaagcagtaaatatttagatgaattaaagttaggtagtaaagattttaaggaaaactagccaagatgcttgtagatgtttgtttttgttatgtaaatctaattaaaaccaaataattaaaattcttttcctagttccaccaaatttattccctaatagattgcaggctggaatgcagtggtgcgatctcagctcactgcaacctccacctccccagttcaagcaattctcctgcctcagcctcccaagtagctgggaatgcaggtgcgcgccactacgcctggctaatttttgtatttttagtagagacagggttttgccatgttggccatgctggtctcgaactcctgacctcaggtgatccacccgcctcggccttccaaagtgctgggattacaggtgtgagccaccacggctggccaatatttagattctatatgtgggcctgtttattttcttgaccagtgatagttttctattttggtatcagagagactatatgtacttgggcaatatctggcccctttattttaaaactaaatgccaagctgtggctacatttgaactggctccttgactttgtttaagatcatataatacatcatgtaactgtaagtgttctataaatatttaaattgattaaatgacttttaaaaaggagcaagcaggacttttataactgaattacgggggctgtctgaggtatgccaacacttaaatttttgtcatttatgttttttaatattgttttttgttatttatttttggtaatttataaatacaatttttgttttgcttaggttatattaaaatttctagtttttaaaggtttgactactttttagcttacatttttagagattataactgtagcccagagctcctccggaattaatctgttcctcttactacaggctctctgaaattatcaaacagataaaggacataattcttcagggtccattgagaaaaacagttgttcttttaagtatcctagacttccttttatttatcctagacttccttttatttttaagaacagatttaacatttttatctttccagccccttcttagtatttttcacttatttctttttttattttatttttttgagacagtctctcactctgttgccaaggctggaatgcagtagcgtgatcttggctcactgtagcctccacttcccaggttcaagcgattctcctgcctcagcctcccaagtagctgggattacaggcatgcatccatgcatcacatctggcttttttttttttttttgtatttttagtagaggtggggttttgccatgttggccagcctggtctcaaacttctggcctcaagtgatctgcccgtcttggcctcccaaagttctggggttacagggatgaaccaccatacctggccaaagtttttattttattttttattttattgatttatttttttgagacggagtctcactctgtcgctcaggctggagtgcagtggcatgatttggctcactgcaacctccacctcctgggttcaagcaattctcctgcctcagcctcccaagtaactgggattacaggtgtgcaccatcatgcccagctaatttttgtatttttagtagagacagagtttcaccatgttggccaagctggtatcgaacttctaacctcaagtgatccacctgccttggcctcccagagtgctgggattacaggcgtgagacaccacacgtggccaaaaaattttattttttaaggtgtccagtatgatgttttgatacacatagtgaaatggttactacagtcaagccaattaaatgtatctatcatctcacatagttaccctttttttgtaatagtaattaattaatattaattttacttaggtgtttggttgtttttgtccttcttttcctccatcttatttcaaaaaaccttgtttcagttcaaagaatcttaattcagaggtgtaagtagagcttttttctgtgggtcagtatcccttccaggagaagattgtggaaaacctggtgaaaggagtagtactcctttatcaagtaggctcttgctagggaagagttttataagtaccccagggaccttggaccctcactgttatcaggtacttgaagaattggtccagatgatctcaaaagttctctttaacttagagcttttgtgattcaatgaactgagttaaaaggctacagtaatttatatggggacctgggagtagatgattgagcacgttgttgattccaggccatagtcaacattcagccctgctagtctacaggtgctgggagaacctggtgctgagttatgttaatggcaagggcccttgaataggagccagaagacctattctggttcaaattctgcttctgtcacttgatagtaccttcttgtttacacttcagtatgcattattttcatcatgctatatgtccttaatatttgggaagatacttgaaacaattagtaaacagtgtaaggtagtgcatatattatacataatcaagtaccaaattatgtggcacaaactggagaagctgcagttaggatataagattaattagtatgggcttggcatagttctaagtggaagagagaggaattaaactgggctttgaaggaatgtaggagtcgaggggatgagggggtggaaggattctcagtacaaggacacatctgtaagaaggaacctggcatgtggggggcatggtaagatcatcttgtcttgaacaaagcaaggcatgtatgggggttagggatggccgcaatattcagggagtctgaaaattaatataacacaagttgctagagactcttgcttttcttatcttctttttgggtcattttaaccttaaagtaaacatgactggacatgttttgttgttattcagttggaggagggaggattcttccatctttctaatgtttttaatgacttatattcattttctctttcatagatgaccactgagcagtttacaggagatcatactcagcactttttggatggaggtgagatgaaggtagaacagctgtttcaagaatttggcaacagaaaatccaatactattcagtcagatggcatcagtgactctgaaaaatgctctcctactgtttctcagggtaaaagttcagattgcttgaatacagtaaaatccaacagttcatccaaggcacccaaagtggtgcctctgactccagaacaagccctgaagcaatataaacaccacctcactgcctatgagaaactggaaataattaattatccagaaatttactttgtaggtccaaatgccaagaaaagacatggagttattggtggtcccaataatggagggtatgatgatgcagatggggcctatattcatgtacctcgagaccatctagcttatcgatatgaggtgctgaaaattattggcaaggggagttttgggcaggtggccagggtctatgatcacaaacttcgacagtacgtggccctaaaaatggtgcgcaatgagaagcgctttcatcgtcaagcagctgaggagatccggattttggagcatcttaagaaacaggataaaactggtagtatgaacgttatccacatgctggaaagtttcacattccggaaccatgtttgcatggcctttgaattgctgagcatagacctttatgagctgattaaaaaaaataagtttcagggttttagcgtccagttggtacgcaagtttgcccagtccatcttgcaatctttggatgccctccacaaaaataagattattcactgcgatctgaagccagaaaacattctcctgaaacaccacgggcgcagttcaaccaaggtcattgactttgggtccagctgtttcgagtaccagaagctctacacatatatccagtctcggttctacagagctccagaaatcatcttaggaagccgctacagcacaccaattgacatatggagttttggctgcatccttgcagaacttttaacaggacagcctctcttccctggagaggatgaaggagaccagttggcctgcatgatggagcttctagggatgccaccaccaaaacttctggagcaatccaaacgtgccaagtactttattaattccaagggcataccccgctactgctctgtgactacccaggcagatgggagggttgtgcttgtggggggtcgctcacgtaggggtaaaaagcggggtcccccaggcagcaaagactgggggacagcactgaaagggtgtgatgactacttgtttatagagttcttgaaaaggtgtcttcactgggacccctctgcccgcttgaccccagctcaagcattaagacacccttggattagcaagtctgtccccagacctctcaccaccatagacaaggtgtcagggaaacgggtagttaatcctgcaagtgctttccagggattgggttctaagctgcctccagttgttggaatagccaataagcttaaagctaacttaatgtcagaaaccaatggtagtatacccctatgcagtgtattgccaaaactgattagctagtggacagagatatgcccagagatgcatatgtgtatatttttatgatcttacaaacctgcaaatggaaaaaatgcaagcccattggtggatgtttttgttagagtagactttttttaaacaagacaaaacatttttatatgattataaaagaattcttcaagggctaattacctaaccagcttgtattggccatctggaatatgcattaaatgactttttataggtcaatgcatctttgttattatcgtcagatgtatttcaactgatgtattatactattggtttaaatctctttctctcaagatagaaggtgtagcaaaagtatcccaactactcctcgcttctagtgtccctcggcatctgttctggaggggtaatttgggatgtggtgttagttgtggctgagagccagtgctaggtcccttgccccactaggccattctctaggctcattctaggtgaaagagctcacagcagactgtggggtgggggagcaccaggaagctgttggtgacctggacaactggtgtccctggttttcagtgactcgctcctcttcccttcagttctctgatgtttggtgttattattttatgttgttattttgcctctgatttgtttcctagtcactcaaagcattttacagaagccttaccactttactaaataaccctgtaaggtactgatttaaaaactgagtcatatgcatccctcctcctttcctctcccatgcccaaggaagataaaacagcttctctgccacaattgacccagagtggtaaagatagagaatcagcatgaaaactgcagttccccagctttgtggtactccacggaccagcctccttgctgcattttcatagaatctcttccttataaaagtaatcactctcggataaaccttactacagtttaaaaatgcttccctcttctctttacagctacctgccacttcaatgtgccacatttttccccccactttcacgttaagcttaatgctattccctagatctgagtgaacttcagttagaagaagaaaactaaaaatccagaaactggtgataatcaagttttccctttttatgtttcttaattttattctcttcaacagcttttctttttctctgctaagatttaaacagtgagggctgataataaaactaattgttaagccagtgtcctacttacaagggtggagacgggacagaagctaactcactgctactgggttttgtttgttgtttcctgtcccttgctctatttctgtcctcttccagaacaaaagtatgctcaagttctatcctaaatgtgtgctcttggctgggtattagtggctcatgcctgtaatcccagcactttgggaggctgaggtgggtggattccttgagcccaggagttcaagaccagcctgggcaacatggtgaaaccctgcctctacaaaaaatacaaaaattagccaggcctagtggcacatgcctgtaatcccagctacttgggaggctgaggtgggaggatcacttgagctgagatcatgccactgcactccagcctaggcaacagagtgagactctgtctaaaaaacaaaccaaaaaaagtgtgttctttaaagtagaatatttgctttttacaatatagttctcagaatgatccagttccatttattattctagaatgtggtgcaaactcaatgacattggaagagactctttttgttgggcagtgtaggaacaagaaaagaaaataaaaatgccatgagtatattatttaaggaacttttgttttatccaaaagtagtcatgattgctgtagcataggctgtgaaaaatgagagagtgcaaatctctctcatttaaatgtccacagtggctttagtctcccaagtacaagggccagatggcagagaacagcttaaactgagccttcagcctcattaataggaggaagtcttggtacttttggtgactaagaaactggattatttaaaaccttaattatctcctttactcctggtttacagaaggcaataaatatacaactcctttagatccctctaactcctgctgaattttctttctttttttctaagtctgcatcctatctcttgattccattgcctgaagaagctgtgtgaaattagtctggttattggttttcttgtctgatagtggcatcttgatctcttcagatgtcacactaaatgctgctcataacccatcctcctcttctttattcatcactgccttcttcaagggaggtcttgaaactgcctcatctacctcatgatctgctagtcgagatagtgactctttggaagttggtagtccaatgtctgcttccccgcattaaccacattgcgtaggtttgggaattttgcaggtgctaaatcatcatggccaggaagatgaaacaccttgagaaatgggaacatctcttcactgtgttcttggatcagccttctttcaactaccaagaaatggatgatttctctgccaactccaggaagtagtacagcatgattgaatccttcttcagtgaatcttttcattgtaacttagggtgtaaaagctcatatctactcaaaaaactcaaatctactctttcagtagatatgagcttacattgacttatgaatggttttcctgtaggcccaacagtgtcatgaccctccagttgaaacaaagcatgagttatttttatatcgagtccttgaactgctagccaggtagatgtttccttgaagtccagagcaggatccaagtcagatgaaggaggtggcacacctggcttaactgcagatcagggagcattgaacctctacaatttgctgcattggatttctgcatgggtttctcactgaatagtaaattagagaaaatgctacttttactattttgcattttatatcaacattagcagcctgttcccactcaggtgctgtccaaggcacatgtttccttgggatgtttggacagaatgatctggcttgatgtatttcttgggctctggtaccacatcatagagttggttaaatgtagccagcagcagtgtcaagacagctgacactgtcttccaagagtgaatgcattggcctttggaactgctgctaaagccatgtgtggggtggcgagcacatctttaggtggcagcaaggctatatctgattgacacagatctgaagtctctaacaccatattgctgttgtcctgaattttctaacttggagaaatttaaggatctcctgcattatctaggcagagcatatgttgaggttgttttgccagttgttatcagtgttgaagaactgctcctgtaagcaaactgttaaaagcattactaccccatatgcatctgatgtacactgtgttttggtgtttgtgtttttagtgagagttctagccagtactgtgcctgaacttgggagagaaaggggcctgtggctgaggttggtgcgtgctctatttctgtgtatcgaatggactacaaggttactgaaactgggctaagggaaagtgtatagacaactcattacactgtagacagattttagaaagctacaggaaggcaaatggatgtttctgcctcaatttggcaaccgagagagtgatgcagagcagagtcattgaagttggcatacctgtcttctgcaggccaattcaagtttgaggagagtgggctgcttaaaaacatggtgctcgtccacatggatttgaggaagtttatggttgggtttcaagcttagggacaagttgtggtttttagaggcagtaactctatgccaccttattggccactgttaaaagtttcacttggatccctgcccagccatagcaatgagtgactgaattggatcagagttagtacagaaattcagactgtctcttcctcagttactggattgttctttagccatttttcttctagtcatttcagtcaaactggttaggttaggtgacttactgagttctaaattgacaaattttaatttccaagttgtttctgacacggtgagagttgggttagaatttttatttcattccccaagtcattttttctttttctttattttttctttttgagacagagtctcgctctgtcgtccaggctggagtgaagtggcgcagtgttgtctgcagcctcaacctcccaggctcaggtgattctcccatctcaacctccagagtaactgggactacagtcacgtgctaccatgcctggctaattttttgtatatctgtagagagggggtttcaccatgttgctcgggctggtcttgaactcctgggctcaagtgatccatgtgccttaccctctcaaagtgctgggattataggtgtgagcgaccgtgcccagcctcattttttctttcaatatggaaaattggctaatccacctaatacctgctcatcttctagtattctatcctaccatctaccctcagagttattgatgtactctttcatcatgtgctatcatgatttctccttagattagaaagtaagcttcaaatgggagtgtgtcttcatattgttctgaattaacagattttgatgcccgctgatcatgtgcagatgatggaagctcatttccttccatgaaccaggagcatgctcgcctcttcttttaagttgacccacacaatctctgatgtcttctttttgggaaagggtaatgagataaggattaaggacattttcttctggtccagtgttagatacagttaccttgataataatgaaaaaaaaatgaataccaccaaaacctaactatgatgtaaggattctgcttctgccccacaggggctctgaaagagtctagcctggatcttctttcccagaggaagtttgacttatgaccatattagtatgctttattccttggtgtttaagggagttggggcagacaggttagctggctaatgtcattacaatttagtttttgtgacaatctgttaagaagggggcttattgcataatcaaaaaagaacaataaaaaaataaaaatttctactgtgaaactatttcaatctgtagcagctggtcatgttaaaacactttctgttttgcttaattcgtaactaggcataattaaagttaaatgctaaattttaggtagcagctgataaatggttctaagctttcctgacagaatactcctactactttggtgaatcatggaaaactctttctcctttatttttaattatttcttttccatctgttattgatgtcatcaacacggaagttggaaaggtgacaatgattgttctagactgcctctgtaatgctttttctcctctgagaattaaaaatacatacttacaccttgagccaggtagaattgccagaacatgttttcctccgtgtcttcggtctagatgaccaatctgtagaacgctataacttactatgcgtagagcagcggcaggcattcatgctatggaaaacctggagtcagtacaaataaggagtaagaaaaggccagggattggcaaatcaaagaagagttctcttctgccagggattagcctcctagttttaaatatatttttaatatccccattttaacatactccattttcaccttcaacctatccttcctgaagcccaaacttttaaagaatttacttccagacctggccttcagcctaatatgattagggtgtttttctgagtgtctgtcaaattatgctggctaatttcaatgagaaaagattttagagtcacagtgaacccatccataaaaggactaaaagctctctctggtccctgagatccacaacccctgagagaagccagaactacaaatgcatcgtctagactttgaagaagcagggtatgattcttaatatagcccacccatcgctaagtcaagcctagactctaatatttttctataacaggagaagcctccctgactggagactagagtctcacatcttctgccaccacatgaatagactaaaaagaaaggagagtcccacatcaggccaagtggtgacctgtggctatttcagctcagaatgtcagcctctgaagcatcaggtttgaatgactttggtgtcatgggattctgtccattgtccgtttgagtctgctgacatgcttcctctggaaagtgcagtttggcatggatgagtcagtggttttttattttggggtgttttttaaaaaataaaaatgaattgctttgagaa

SEQ ID NO: 365 - DNA, 61862 bp, Homo sapiens
  source 1..61862: mol_type = genomic DNA; note = NC_000012.12:c16610233-16548372 LMO3 [organism=Homo sapiens] [GeneID=55885] [chromosome=12]; note = NC_000012.12:c16610233-16548372 LMO3 [organism=Homo sapiens] [GeneID=55885] [chromosome=12]
ctgctaactagggacctggcgaggtgtttaaatactggaggagcagctctggcccactcaggttttgtatgcagttcgggaagaaagtgagaaagggagaggcacacaagaaagacaggaagcctgaagcagaggtttctttcatttgtgttgctgaatttcgaagagtgatggtgggagtgtgtgtggtgggggcagtatcaacctcatccttcccttgaccgagacctttcactgctcctggactttcagggtgtgctatcctttgcctccccccaacaacctgtctgctgccctaaaaaaaaaattaaaaaaaaaaaagacggcaacctaaccggagcatctctgggacgccacagaaatcgtaactgaacacccgcacacaaaagtaatctgtgaggtgtgttttaaagaaagaaacagctgaaaacttgaagacgtgtttagaaatatacatatatacacactattttcttgtgggagatctcctttgggcaaaggtaagtagtatatatctaatcaccccctcagcaccctcctccaccccattttgtcattcccctccccttttcccctcatcaaggtatcacaatataagacccctgaagaagacagtctgcctttttttttcctttaataagtgttgggatgggggctggatgaagtaaattctctcatcaaacgtctgatgatgagttgcagaaagagggcacaggcaaaaggtaatcggaccaaaaagatctggctctttatagcaatcctttcgcaaagatttccaaaggatctgtaattaaactgggtagtttactctcaggaaatgaagaaactgcttgcctggctggatccaacctttagcttggctgagtaaacaaaagcacaaattcttctttcactttttccctcgcgggaggggtgagactttggggttggggggagccaggaaaacagggagtttgctgagggttaatggtgtttttcgcaaagtgtcagcagaagatgattaaattccacctcttgttcaccagatcactttgtgtgcacttgtatatttcattgtcggcaaccgctgatgatcacatctgtgcagtacattaagtggcaagcctcttcatctgcacggggtttttctgatgattttttctgtgaataattcatatgattatgaagagaaaaactgctattttctatctctctcccttctgtagcacagattaaaaaaaatcttgctgtaaattgcgtgattggggagatagcctgctttcaaataatttaattcatgacaaaacctaattactgtcaggtaataccctgtcagctttaatgcatttcatcagtcataatgaaaagaagagcattttatgacccatctaattatcattacattttaggggaaaatgaatggcatggagctgaatgttaactattccattttattcctttacacatgtggtttggcatattattcgctaagttcctctctctctctctgtctctctctctcctctgtctctccttctctctctctctctcctccttgcttggcagtattacttgcttataagtgtgggggaaatggtaaaattgagaggaaaaggaagattggggaaaaaggaagaggatgggatgcacttagagatctgggtgtttgtcccttaagaaaaaggtgacaaagtggttaatgtctttgcaggttggtgttgatatcaggaatcttactgccacagtccaaatagagtactaattaccgcgaatgatgtcaccgtaggcagaggaataatcccatcatttaattagttgaatgatttaaacaaagatttgcatagatgcactaatcagttgccatgaattacagagcagcagttgccagcgaggggtaacagatcatacagttggagggaaaaaaaatctcatctccttgaacataattaatttaattgtcctcattagctgtaccatttgttttgattttatttctccctttccccacacatacttctccctccctccctccctcttttcttcttctcagtgcattggctgagacagagcgcacgagacacacacacatgcatgcacacatatgcacacacacacactcacacatactggggtgttttcagagtggctgtagcagagaggtggggtagaacagtggggagctgtgcggatgggtgaagtgcatgtatgcctgcctagacgggccagaaaagccaaacttaagaaatctgcctatgtacagaacaagtcaactaaggggttctcattaatctaccgtctgtgaatatcgttatttttcaggttagttctgagttttgttgccttttaaagggagaggaaagcaaaccacaggctattttattatgagccttcaaaagggagggggtaaaaactagttatcaatgttgtgcctttattctttatgaagaaaaacaaaatttagcttaaatactcatggggggggtgctttgattttttttttaaaactagagctagattaaaactgatggtgaagagaagaaaaaaagttttttgtagttcaacaattgaatatttcttggctcttaaacatttcagtgagtgtctttcaaatgtggaccatttttaagcttgacctctgacaaagctttgtaaaatctggtgagggtactttaagagcagcccaaacagagggtgactttgaagtttgaaaacttagaaaaataataaggtattttaaagctaccagtggcctttatagatgccaaggaaagttaagaggagaggaggttagagagaatgggacctattagaaaaaaaaaaaaaatctgtcaaggccttaaaacaagcctgtgaagacaaagcagtaatggtgcagaaactatggttctttgaccaagttagtcctgaaaacatgtttctcagtgctgttggctgtttttcattggagcgtgtgagttttaaatagtaaggaattcaagtaattgcaggaagtgtgtttcggggtggtggtggtgggggtcagcattagtgaatggagaacaagttcacagtttgggtcttgggccattagaggaagggaggaagggaggaaggagagtgtgtgtgtgatcccctgaaccaggcttgtgtggcggacttgcggagcagcgacttcagagagttcatgaatggaagtcacagacagaccagcgactgcagccacctccaggcatttcttaaaggggagggttgtgtgctttttccagggtattctggtagcagtttgattctcttgcttttattttaatttccataattggtagcttcagaaatggctttggaaggcaatttgctttaaatgtagccacctattccaaaatgccctggttattttaggaaccctacccttttcctccggagctctctcgcaggagttcttcttttggactggtccaggaggtagggtccttcctcagtcgactcctgcagaggtcacattttgtgtgcgggtttgtccccagcgtttgtgagtagcatatgcatgtggttgtgctgactgcactcgcaggcttgtaaattttcaccctgggaaattagcaacaaagcccgatctgtctcgtggctgctttgcactttccgagggcggctgtacttgactgagctgcagaacaggcacacgagagcgagcgagggagccagcgagagagggagggagagaaggaaagaagaggggaggggtgggggcgagaggtaaatagtcttaaatcggaagggagctgcttctctgtggtcttgacaagcgctgcctgggctccgccggctcactaataactgagtgaccttttctttggctgtattatgtctggctgggaagggattgcattttgcagctgagagccggagcttccttcagctcggctcctcgcacgctgctggggtaagttgtcttgaaccaggacggagagagacagcctcggactgcagttgcctaaaaggaggacacctgtggctcagatgcggtcaacaccattgcttggcgtatccttgaggacctcattattttaaacttaaaaaaaaatagacattccctcccccgtcttttttttttttttcaaacaatgcttctttttgacctttcccaaggagaagcgctacaaagcagccactgtgcttactgaacggcctccccctgtatcgcttaattgagaaggtaagtgcagcaactgtgtacacacgcgtcggcttatttgtggtgtgtgtgtctgcgggtgcgcgcgtgcgtgtgcggatgtgggtatttttttcttccccaacctctgctaatgaggcataaactggagctgcaacccagctccgcactgcaactttcactcgggctgcagctctactgagacggttttgtttaaatcatgtgaggcttcattatttttatgatgagacatgaaatagatgcaggcggaagatgttgatggaaggagggagagcggctgcggcgcggaacgtctcaagtacgactcgagtggataatagtcaaagttcaccatgaactgcagtatttccacacccctgactcccggggagagaggggcagggagagtttggaattaggaagtgtttgctcccagcccataggaaaagaattcagtcctgggtgggtttccggacccctcccccttacttgctggaattcatgaacccccacttcttaaagagttgatattacaatcttttggtccttgttgacgcttctgcctctctccacgcagccataataacaaaatgttgttcctttgccgtggaaaagtggctgtgtttgggcatgggggcggggggggggggcaggcgggtaggggcagaagtggctagaagagggaaggtccctggaccaaggtgcctatatcctaatagattgagattcaaactgatgcagcacattttttacggggactactcagattgctgttatgaaatacaagtcagatttatgatctttttcatattgaacatgatatgctatgctaacgctgcatgtgacagtttaatcaaatccatttgttaccaggaagctaaaaggggccgctgggattttaggattacgggcagagttagggaagcatgtggctttgtcattcgccatcattttgcacactgcgaggggctccgtgtgtgcgccctgtcttgtctggccgtcctcatcccttcccccaccccctgccgccactccgacccgctcccaaagtggcttcacaatagtcggtcctcggcggtgtaggctgcgcaccaggtccacacttaagcgaaatcaaggagacccccttctacttctacctttgggtttggtgctcaatgcgaagctgctgcaactcagacacgcctaagtcaactcatgcagaaaaaggagaaaagttttggtaaggttacagtctatcatagatgcactttgctggcgctctgcactcctggccgctcaaaagcctttctgcttttccgctgcttttgtgtctttctgaaagaaccgaaatattattgttgtaactgctttgaaagactgctgcttaaaccaattaatcttgctagatgcaacaaatactgctacattctttgcaaaccatccctgtgtggctgcaaagacacaaccacaaaaggctggagcataaactccgcaagggattctttgttagagtgtatgtatgtttcttattttttttttttattttgcatgtgagctgcatcaaaattgaactcagtcttgcaaatctcttgttggcctttgccaagcactagcactttgctgccatggtaactgtaattaaactgataagagtggaaaaatgtcagtatctctgagccttgcagctgcattggagaaaaagggaatcaaattggttcccagctccattgctcaaaaaggggaggggggtgaaggatagggaagggggctgggagttgaaggggcagaacagagttaagcagctccagtgcctgagatctggggacatctatttgcattgttgtcccttagggggctgcagcctgtagggatgctctgggccagtgaacagagagaaacaagcttttaggcccaatccagttttccaacctgggttgggggctgggaagaggatgaagatgggcaggaggagagaaaatcttttgtctggtgcctcttggcaatcgaatggccatgttggccaaattcttttaatctgtgtcaatgctcccagctgcagaacctgcattcccattttagcatctttctgaagcacctcatctcttccaaccccctttatgtattccctcttcctcttccctctcccaaattgttctctgtgaattttccgacggacaaaatgttttctattcactctgtgtagttagtccaaaaatgtaagactgtgtctaagtgctgcaaatctttcattattattattttttttaaacccctgtgtgttgtggagttgtggttactttgttgtgttaactactgaagctgagactgtgcggatgaatggtacagaacaagggaacataatggaggcaatcaaccgttaggccgcttcacaatgcaatccaggcaattaaaagctcaccagagtttaaatgaaatggttctacttatttctgcacaccacactgcacaggctattatttatgtcttttttttaattatgatttcccttaaactgtcaaataactcagaatggcagggtctcagaggcaataagaatttccctcagaacaatttacatgccaatctaaaactagttatgagttctgatgtgctatgagcaacttgtgaaatgtttcttagctacaaacacgtaactctacccagacatgttcttctggtggaagaggggagactgctgactgctttatgccttttaagtacacggtaacatggtgactacaaaatagttcttttgctacaattgttaacttgcatggaattcaagagattccattttcaagagaattgccatgatgttcttcaaataaggtaccaggatggagtgtgaaatatcaaactccttttatgcccaaggccaaacagaatgtaagagtttcaaatattaattggcctctgagtgctaaattaaaatgtcaacacaacaaaaacattttgtgaagacaagtagggtagtgttacttgtgccaaatgttggtatcccctgtcttggttgcaaagcattttgaataaaacagctgaccttctatgcttgatggtagaaacacaactgtgggaaatataacttagctgctactgggatttttttttttttcgatttttcatctttgagctttgtgataaataaaaataatagccttacaaatttaatagaatggccgttaattaggatggcttaattagaatggcttctcttaatatttattatctaggtgttttcagtaacaccatccagaatttcactgagtaaatcaaaacttccccttccccctagatatgtggttaacaggcacttggatctgttgttcactgtaattaatgggattcactccttgtggaaccttgctagaagaggataactagttctgatcaaagaaacttcatttgttagaagttctagagagtgagatttagcagagctatcaagggttatgattaatctacactaggcccttagctccttcaaaggaaaggaacagaaagcaggctatagggataccacctgctcttcttacaaatccagctgttagtctgcagctccggtgactacagctatgcttatgatgcagaaagaaagaacagctactctgctttatttcctgccattccctacacaactctaccagacgagttattttctaatgaaagttcaacatcctaacaatattttgtgcaactcatgtattatttgtagttagaaaagttattccgctctgcggatgccttgatgtctcttaccagtgggattttttttttaaaaggttgtgaaagttgtgatgggggtgaagccttcatcataagatatcagaggaaactggaggaggtttagctgttttggagaaggaaaatgtacaaaagtgcagattatagcttgacatttcttatcctataatgcatgcacatttggtgttttgtatccttctacatgcaagtttaaaactttatgcctaggagagcaaacataatgcagcagaagggtctctggactgtaagaaggccatttggctggagtctatagcgtaactgtctttcagctttgagcaagtctctgaacctctcttgggcctcggtaacataatttgtaaaatgagggaatttggaattgatgatgtctgcagtactttatagtgcttaaaatgagttatttgataaatatgaggcattggatagttggtccagcttcttgctaaagctgggtgttttaatacctaggaaataagaagacactcaaggtgaatgtccattcattcaaaagatttcaatcaaactgtaaagcccatggaatccagctggattccttatttatgatggatttatacctttaaaatatataaatgtttctatgtttagcatagtatacatataacatgtatatatttacttatatatgtttgtataattgtatatatatttagatcttgccttctattgttttttctttcctttataaaacaaataattgcatgtttatggtaataaatggtataatcatatactttaggtttacataaaagcatatagtatatagttaagtaatctgccattaatataggtgctgactgatgcttgtgagtataaatgttatatttgaacacaatgaatactttgaaatatcaaggacatagaagaagtatttggatgcaagcaagaaatataggattggtgagctttttgggtagctgttctgtgtacttaactataaacacctctactgctgaataaggttagtgtaaccccataccaggtgccctctccttccaccatcaagcacatattaagtgaaatttttaaacagttaagcaaaactcatttttttacttgtagggactgtgcatagattaatttgttaaatagctttcttttcagattgttatttactcacattttctttctaaaggaactgctctatggggagaatgaagatactataaaattatttaatgttattgaacttcatatttataatgtcaatttaccatggtcaacatgaatttattattattgtcacttggcatgtgtaactttttgaatgatttaataagcacttgataaagtttgagactttttgtttccaaaattgggtttgatttcagtatagccctaaacaagaaaagctaacactcctagaataaggaaatattaaatatttaacttgtttgaggtctttttattctgtctggtagtctcagctctcttttttgcttttgtcttcctttaggtatacaaatgctctcagtccagccagacaccaagccgaaaggttgtgctggctgcaaccgaaagatcaaggaccggtatcttctaaaggcactggacaaatactggcatgaagactgcctgaagtgtgcctgctgtgactgtcgcttgggagaggtgggctccaccctgtacactaaagctaatcttatcctttgtcgcagagactatctgaggtaggaattatccttgcacaccagtgatgactggatgccttttaaagtacttttgtaagtgtattttttgtttgcttgtttcatttccttactgccagcttatattcctgaaagaagttacctgtcagccttcaaagcgttgccctgtgtgtgttactcaaattaatgcttaaggaatagccaacaaaccacaatatttaaagtatttcaatttggcttgcctgcacactcaggcagttggttatggcgctgcctatgttgaaactgccagttaatgtcaaggatgtatttggtcgaaatcagcattcaggttgatttacttattttttcttttttttcttttttttttttttttttttttttggagcttaagggggaatgggggttgagcataacacaaagaaattgatcagccatttggcaaaatatcttaactatttttaaaaagttcaacttgaaaaaaatggactgtgtaaaagagtttaattgttgcctctaagttggacctgaatttagtcttctaaagttattcagctgtcttctctgtttcaggtgtgtcagaggaagtcaggtgcaaatccttggttaatatctattagtgcatttattgtagagttttgaaaactttccccaagtgtagatacatcttcctctcgccccacctcatgacattctaaacgggaatctcaaaaatacaactaagcaattgaaccgcctcagacttgccagtagttttatggataataacaaagtaaagacctccatcattataggaaaatgacagccactctccaacctgtaaacatctgaatgctttcaggacaaggcaggtgttcttggttatggagctatgaagcctactaaagcttgttttccagcattaagtactcaacacagaatttctgctgaaggaaaattattttgcttttcaggcaactttgtgacttacttcagctgcaaattacttatattaataaagtaggatctatcaaattagagaaatgatatatggcatcattgggattttcatatttaatacaatttatcatttttctggtctgacattaagcgatttatttggaattttttcccttatgacaaaatttatcaatcaatggtaactcctttagtaccttggtcatttgatgaggtgttttctagggaatttggtcgttcttagtatataattcagctattttcagtcagatccaatctttagatataaaaatatatcatttgattaatggtagttacaagagggtgaaagcggtactgtttatcagattctactccttctcgctcttaggacggcctcatctgacagcctcctgactaattatggccacttgttactacttctctgtgttccaagtgcgtaaaacacatgcaaggtgccaacaatgagaagtcactctctccagccaggatttccctcattgtgttggcacaacgaatcaaaattaatgtacaatgttcatttttttagaactctccggtctttgaactttcctctttgaaataaaaatttctcttctgcccattgtgaattagagcctcatttccacataaagcatttgtatttgcttttagtgatttaatactgctttttagttttgctttatctgtactaaccaatagtcatagctttttgactccttttgacttttacatttgtttgtaatttcagtatctcaagtggatttatgttaccatttcaaataaggagtttatatagcccgggcaatgttaaggtgttttaataaaccaaaggacaaaaattaagtaaacttgaaagaatgtcaactgaaatatctggggtttttgaaaacaaaaataaaaatttgccaaggaaatacctatattgtgagtataacatgcttcttagctgtcaacatagcatcgagcaaagacagtaatcttagatttgttttgttttctttttccttgtggtagtaaaaatatatttgatagtctcaagtgttttgctaaaacgcatttatcaaaaatagttttcatatcagaagtttttgtatctctataagagtgtatgtggctttttgtagaataactttcagttacctcctgataggctcaaacttttaatggtggttaacttattaaaagtatataatattctttcaaatataaaccctggtcctgattgccaatatattcatttctcagagtacgatttccgcttaaattggtcattaccacattaatggccagttgttatgttaacagcctaacggttgttaacatttcaaactaagttgttaacagcaatcttgtcccttatttaaactgaaagtttgttgtatataatgtgacttatttggcaacttcatcaacacttaaaattgcagaagtgaagtggagaattggtgtgtgtaaaacactgtgttacgtgttatagattatgccgcagatgtggtatttagttttatgtggaaagcatgtgtctcagtgaaattgtgtagatgttcaactgcatatgtctctgattggcaaattaaaatagtctgattctgtatggtaaatcaacaaatatagtcaagcagattttatttacaaattaatttctttgattagatacaaatagttgttcaaaaatgtttattaaatgcttactgtgtgagaggtatgatttcaggcaatgggtgaaattagctaaaggaaaaaggaaggtacacctaaagttgccactatctaattgtttatttaattacatagaatctgtaatataatcagtgaacaagtaatattctgtggttattttcctgagctttaaaagtaatttttctcattttcctccaaattcagcatacttccattttgtattttatataaccaatgtttaatcacttaagttctattttaaaagttgttttatttttggccctttgatattatgtaatttctctgaggcaccaaactgaacataaataacttacatatttatatttcatgtctaaattattaagaacataagtaagaataaggaaagtaataaaatagtaatttgcctgtccacatatattgttggttacaagtattgtcctgggccagataattttttacatacagtgaaaagtaaaatatttttgccaattacatttagcttcttaatacacttctccctccataaacagaaagaaagaaacactcctaattatgagcaatgagacttaaagatctgtgttttacttgtgttactttgagtagtgataatgatgatgtgatttataagttctttgaatgatgatttgagatattaaataatatgaaaatataataatttagactgtaagatattttcttaagggttatagaaactattattatggaaaatttgatgtctttccattttttttctcctttatggcactagtagctatatttaagagaaaaagaaagaaaaatcttccatagtttgtacactaagtatcaaatcttaacagtggaatttttcactttccagaactggactggcatatcattcatttagctgtggaacataaaatgtacatatctgatgagacagaatttgcccatttgtgggattgctttcctcctttggaaactcattagctaaagaaagagaaggactgactttttaaaacttcctctaacatgtttctgactgaaattatgaaatctacccagtcaatatttatatgccaggcagaccaagaaatgtatctgttaaaaatctatccaatgcatttataattatttttatttttttgaagagtaacttatgacaaattagatatagaaacatctttgtactttaagttggagcttaaaattgatattgtctaaagtagattaaaaatgactgtgtaaaaatagcaaagttgtagtgataatgtttaaggtactcatcactgcgatctatccgccttatttcagtttgaaaaaatatgaataaagtagccagccagtgcataatcagagtcttagaattaggaattctacatgcttttatttaatgttttgcagcaagcattaaatagaactaggagaaataccaaaatactttctttttcaacttgaaggcaataaaggatgtcagaatgtaactggaactcaacttctgggcaatttttttgttgttctttctttgaacctgcaactttttgtgacgtactttaagcattaagtctatataggctgtatgtatcttgtatctctatgaatgatatcttgccagagtttattcaaagctgtttgctgtggtatgtgccatggaagctgcttatagcttttcctatataagaagctgtaaaatgtcttatataaaatttaatgcaatttgctatttttatacgtgaggatgatttgtttaaaatgaaactactgggaaagagtgatgcttcatgcttcaccatagttgctaattaactaaaatgatttgaagcttgctatgctgactacaaattttataggctttaatataataatataataactctaaaagagaaaataaaaataaattgccacatagggcataaatctagctgtaactttatctcacgctgatcaaacctggtgcttctaaatttttatgtaaggtcagctttatattggtacataattataagtgtaaaggtaaataggaatatgttgttaatattattttatctggcaatttatagcacagatgcttttttaatgttgatacaatattcattcttttttctttcattgtcatctttttaataatcatttggaagtatttttccaggaaagcaatgtattcttattatttgaaaaaccactttttactgttctaaattctgaaagcataaacttttatatgaaatggaactctacaaataagctttatttctataagcttcatttgagcttttaaacaccatattattgtcataatttttatgtttgaatgtctaagttaattttagtattatgaaatattttgacatgagcatattgaactccatatctgttacaaaaatactgttatattccttaaaaattatcttatttgcagctttataaaaagttacaattttaagatcatttttccctttattgtagaagaagcattattgaattctgttttaaatattttagcgtttatactaccctgaaccaatacaaattaggagtgataatttttttggataattcttcagaagagtgcccctcattctggaaaatagtaggtgaattcacattagacttcctgagcaaaaactgcccccaaacaacttctattaaaaatatttactgcacatacagaatttcttctcattggtaaatttatctgcaatatctttctatctttaattctataatgcattcattttcagtaaatgagtatttaccaataatataattattttacttttgtggctttttgttttagtttgttttgtagacttgagatagtttcactggaaatttcacgaccccccagagtattaaaaatattttataatgtttctgtatctttatagttttttatcttttaataagtatgaaatacttcagtcaggatagtttttacatgtaagatggataagttagacatacctgacttagcagaaaaatattctgtttctacaagtgtatttaggattaaatgcatctggaaaacctacatttgagaattgctaaaattgcttattttgcactttataaatacatagaattctgggaaataatttctatttttggttgctcttagactatatcaaagtaagccagcacttcatttataaactcaccattaacttccattaagtgactaataataaattttaatggtgtgttttgactacataaacataatttgttaagcaatctcatttttaaaatatgctgaaagtagtaattttgtaaatggttttgatgaatatataaattgtagaaatgtattatgtagttccattttctgcctcacataaaaatgaaatagcctaaaaaaagaattgcaccaacctaaatgaccgttgtatttcccttcattacactgtggggcactgaagtcttattttggtatttggtttgaaaacatttttccaactcgtatgagaatgtcttctattattcaaagccatgtactgcatcctcatcctatcttctgaaaaaattagccaatgtttctcacttttatcaataaaaaatacaatatatgaagtgtaaatgctggacaagatctggaaaacaaagggaataaaaataaaaatagcaatactctgttcaatttgctaggtatttttataaaactccatttgtattagccatgtctctataaatggcctttttctttcttttttattttttagtttaattggcttataaaaattggtttgtgtatatgattacttctgctgacacatggcacttcctcttgttaagcatttgaagaggtgtggatctatatacatacatgctgcacatacagagattggaatctgtgtaaccttagaatggccattaccttttgtcatcattgactttagccaacaaatcaccatagcttggtaagctttaaaacttgtaaaattcaaacacctgacgccagctaattcgttaatattgcaaactatagcactcatctattcttacaggatattaatcagtctaacatgtaggacaacttttataaaactacagaatgcctaaatttatttccttgtgattttaaatatctaattctgtttttcttagctccgagggagtttgatactgcctgttctagttctgtttttactatgataatatacttgttttgatgattaaccatgtatttcccttttcaaggtgcttacacgaagcttattttgaagtggaagtttatactgtgaagcaagaaatgtggcatttagcttttcatttctaactttaaaacaattcctttggcttatgcctttcccccctttattatcagtattaatggataactttctctaaaggaattaggacctaagcatatcctcttattatagaagccaaacgttttctatcttcacaaactaactacatcagccaactgtgcatttgcttgtgccattttttgcttctgtgctgtattatgaaatcttcttgataaacctttttcttctcaacagtatttttgtagttatgtaatgattctcttttcgccgaattcctttgcgctatcatgttagtgttttctgatgcaaaaatctctagttgtgggctttacaagtttaaaatgaaatcacacttgagatgaataatcatcttggaatagtcaaatccctgatttgaaggtggaaaattaacattaagctgcatgtattaagttagactctaatcagcatgtgttgttatgattcaatttaatattaaaactctccaactgggctactgggaaaataaaagactcttaggaattgaaagagtatttgcagaagagcacaccaaagcaatatttaagtaaaattgttatcactaatgcagtgaagcatcgtccacattaaacccaagctattaataaaaagagaaaatcaattttagtaaacataaatatcagatatgacaaggactagtaagcaggcatggaacttcataaaatgtgctaatcctaatgtttaacagtaatccagataccacagagaaaaaataaattcctgtctcatttatgctgtgggatcccaacaagcaacaagagggaaaagctaattttagatgtcattactttactcctagtttctaaaacttttagaacaatgttatgtttttattttagcagttctaacagagatgtttatttacctgtttttgaaattattttattctttttgtttttaaaagattttgaaatctctttagtaattatttttaatgttttttaattttccatctctaggatagtgttttttgacatactgctcacatttcaccaaaaaatagaagaatcaagactgttacattttaaaataccttacaacattaagcataccacttattttttgtttattagctgctcaataaaaatatattcttaccaatatctatgtataaagttggtaacatgagtggatcagtacctgttcctttacctgggtgggtaggagtaagggaagtggatggaaaaagcagttgtaacttcatgcaagtattagtttccatgagcaggttatttgcattttacaggtgagatgctcacttatactgtgaatgtaattttagagtctataaatattgcatgtgaatatccactgaggaacatttgcactttgggagatacaaagaaattataagtaattgccttcaaatttataagccagtattttctgtgaccatttattaggaaaaatattagaaagttcctgagctagaagaatctcttctttcacggtgcaacccttgctgagaggcaggattggggtttgtgtttatgattacttgctttgctatctctttaaaagttctacaatgaaaccatttagtcacttgacaaatatttgagtgccaatacttcgttcttataaataatgaatgtgaaatactacatttctaattaattttgtataatatataaagtacaaagttatacatactttcttttgtgaagaataagctatccagtctgggaaaattggaaagaacttaagagcaagttatttttcaaattttctacacctgataaacatagtcactattattgtcaaataactaagtagaatatataaagagtttcactccaattaagtcccatggaaccaatatagagaatgacaagaggtatgatcaggagagattagaaaatattctgaagcagggaggttataaagtatctggacttcataaaaattatttcataagccagtggtcctcttatgaaagctgagctttgagcttcacgggttatattttgggtgcagagcaagacagacttagcttgtaactttcatgctatttgtattgttccatctcttatcacagatatcagtaagttatcaataattgacaccccttgcaaaatgcttatctttccttgtacaattgatacctcttgcaaaacaatcatccccattcccattttttcattcaataaatgtgatcattctgtatattctaggtactgtaaaaggccttgacataagcactaaataaaacacaaaaatacctgctccccttgtagagtttatattctacttaggggaaataggtaatcaacaaaataagtatagggcatgaggagatgataaacacaatgaggagaaaatgaagcagtacaagaggtttgtagaattttggtttgtgtggagggggtgcagacagcctcactgagacggtgacttgagtaatgacctgatgaaagtgaaggagctagccatgatcacgtatgggaaggacattctgggctcaggaacatccagtacaaaggccctgaggtgggagtttttctcatatgtttgaaggacatcacagatactagtgcagctggggtgtgggagagcaggaggggcaagaataaggggtagtcactgtgtaggtctatggtaccacctatcactgttgcaacaaacaatgccccgtatacatttctaaatgtcccctagaaaagtgataatacttcaatttgaaaaccattgtaaagcttattcagtgaggcagttgtgaaatcaatttcatttgggattatagaattcatctgctgaattgaatgagattatttttcatttatttactggaagtttttttggatgtctttttatttggccccattgatgaccctgtgtgattaagtaatagttgtgaaatatgaatttgaaaataggcttctggatttggtcacgtgatgatctgttgccaatctaagggggatgatatagtcgcatgtttgattttaaagtgatgcatctacattcgtctattaatatggcaaatggaatatctatacatcatagtatttcaatgtgaaattcaaggaaatgcctatattgatgagctaggactgccaacacagcatttatgagagtaagatcttgaccaaagatgtcatcaaactgtcctgatcacaatgataccgatttttttttttaattcttaggtaatacaaattgcaaagatgtggatttttcaaaggccattaattttctactcttgaagtccgctattctaggtctgaggggtgatattcttgtatttttttcactttttaaagtcaagccaagccctatttaattatcttatagttacaaaacatgtaaaataatatatttgctctagttatgataaatgtttctaaatccagcacttagagaagatacattaaggacatattgttatttaaaacaatttcgtgaattacattcttgatgagacaaatgttacatgagagtttgtttatgcttatatttctcaccactaacctaacccactaaccttaatcctagctcactaatgttagttttgcttcaagaagagctaagcataatcctcaaagccaaaagttaaatattaatttctatttataacagtgggatttgtatgtacaaagtgtcttttaaaaatgtttaagtttaaactttgggtacaaatcaaagttctcgagcttgcatgtatatttataaaatgggctgggatatcttcatgcatacttggctaagaagctatgcaaatgtgctttgaatcttataaggaggtacaggatgaatgggtgggctttcaaaaacggtggcatttatacttcatgcacaaaaaaatccaacacatacttcccagaaagctagacggagacagtagccagagagctttacgaggcttaattcctactgtggtctgcatcttgggggcttttttctgttacaatttctaacagtccccctctgttcttcctggcagatgcttttcttgtccagattgagttgaggaacctatattcctaatcacttggtgatcctcgtcttccaaggcagatcaatttgagcttgatcttaaagaaaagttgcttgatcttgacctgatagtttgcttggtgtttaaataatctgaaataatcttgtcagtgatagttattaaacaaaccactgtctttataatagagatgatgtgcttatttgattaaatatgttacattccttgtcttcttggttagctcttgacttctgcagcaacctaaaaaagacataatttttcaggagattttaaattaatttttcttaaatttttccttcctaatttatacggaggctttcatctgcactacgacctaattttttactgtgaagtcacaagtaaaagtaaagccacaagcttatactgcactcatagtaatatgtacagtatattttaaatgtctcatcatgtgtttctcattattctactacattaggtattgccccttctccatcaatgatcatcagtggcagataacttatgtattcctattaggatgcattcatctactgttgttataatcttctgtgaatatcacttcattaaaaaataaaaagttacatgagttcttgtcacttccctaaaatcttccaaactgggtgaggttacatctaattcgtagatcttagaggcatgtcaggttgcatcacggtgaggtatccagacctgacgtcgacccccttctgctacaccccagcttcacattcctaggcaacttactcaacctctccaagtctgcgttttcttctctagaaataggaatcctattcataaaatagttaggggtgacagtggaccacagtagggaaagagcggtacacattggctgatactcctccaatgtcagcttctgttgttatgaagggagaatggcactgagttatgaagataagataagggagaaattaaacatgaggagaagattgaagaagaggtttaagagtgattaataatgaagaatatgaaaggctactagtataatgaggtcgtttaccaacttttcgtgtgcaaaggagatgggtggagaaatgtctaaatatgtgcactttaggctgtatggaaaaaatatctcaacactggagattattggaatttggaatggattgttaaattaagattgtagtgtgctttatataaattaggatgaatttggatctttgggagaattactgaaaattctatttcctttgtaactgaggtgatagttttctaaaataccttatatatccatgctctccctgttttaccttataaaagttctatggccttgtaaagcattatatttaatattccatagagtagaattatattataaaattttaggttgttttaggttttctttatagtgttgattttgcatctttttctcaggtggcaaggaaattgaataccaacttttttactcacattatttttcacagtgttctttaaacaatttgattatatatctttattcttaaagaaatttgagtgcacaccttcaatttgtatatttgtatatatttataaattgtaaatactttattatacattttaaaaattatgaaaacaatgtttaaaggaaaaagtagaaaatgcatggaaatgctaataattttttaagcatttcttggagtattgcaccttaaatttggagagcactatgtcttagtagctttttatgtttaattgaaagttgtttgataaagatacttgtgaataaaagggggaaaataccaaagcttgggaaagaagtcgtaagagaaagacagggtaattatctgaaagaaagggactttttaagcatgaattaatattccttgttttgttcatttaaaattaaatcaaggttttctttcatgagaaatgtagcaatgcttgtggactttttctaacactataccatagctactggcagcattaatatgagacaaggttcctctccctccccctgaaaccccccattcaggacacagtgagatttttagacagataaatgctaagagaaccctgtgtaccaaaggcagtgtttactgcatgtaatacatatcattgtttgtctcctgtagtgaaaaatacttgtgtcgtgctgttaaaatgcactcctgacagaccagtgcttgctattatagggtccattgcttaaaaaaatgatacactgacagaaatacaatttaagaaaatttaacaccaagggtagtcaaccatgtaggctactattaaggggccaaaactcaaggccaggggtttatttaaaaaagaggcacagtttatttgctagtagtaggcaaagtaaaagaaaaaaaaatcgaacttgaattccttgctctctagtctgtagaaaattaatgaaagcaacagttcaataagattttattgcagaaatgtttaagtgaaacgttttaagaatgctttggaatttttaaacagttacttaccatttagaaagctgtaacactgcagtgcgtaacaaattgttagcattggatcctaggcacacccagtgattttcttaaaatggatagtcagagctgtttaatctgaatcactttgttcatttcattttcgtgtgtgtagcttatgaatatatttgagattgacaggtcagcagcacccacaattgctataatttaaaatgtaagccattgtccaagtacccttgtgggcatagtttggtagttaaatgcattagatttgtaacaagaccttttgagaaggaaaataaccaaatatgagatgtgacgagatatgttggatttttagaggagtacagaatgttctaatgaataaactgctactgaatgatgataaagcatgtgtttttaagctatcacatgactctattattagaggggagaattccatgaatttagatgagacgtattgtctaattttaccattttaaaaacaaatctgtcatccagtaatatttgatgccaactgtgtatggcttacatgttcctttgggagaaaggttacaaaagtaatgcaataaataatctgagccacaggagcttagctcaagtaccagagaaatggaaaaaaacatcatctactgcaatggggggtcaaaagatgtgtatcttgaaatctctaccccgacggtatagccttattgccacatcctaggacaggctttgggagacaagtggtcctgccaagaaaggacgtccaaagatgaaatgcagtgtctttgcatatgtcctccagaattcagttggcctgaatctgacaatattatacaacagatttttttctgtggacgtagaagataatgcttagcgtgagatttgtccagacacattgtccagggcctctgtgactcagctgtgtgttggaggagaaccagaaagccttgctggggaagattaggatcctccgctctccttgccacagccatgcagtggttctccattcatgcacgtgttttagttgtttcttagttgttccgtatgtggacttcatcgtatcatgacatcttaacactctgtgttcttgccagagattacaacttcaaatgctgcttttccattcttatgttttaagaagtcatctgaaggaaatagtatttatggcagattacctgaaaaactggatgttgaattattccttgtgatggtttttaatttatccttccctgtgtctttgatcttgacccctattgttttggcccctcaaaaatttttatggaattgtacatcaaggttttgctgttttcctgtgttgaagattttcattaacagctgcaaaaacatcagtgtcctaaggatgctattggggactttgtttactgtatcacacaatgtcctaccgcctcactggtgaaatgtcgcccagatcttaggataagcaagatttctgagactataaatgactaaatgatgttttacttgggcctgtgaatcatatacatgttgacattttccctcttttctttgtttcctgggaagcccagatcaaatttactttctaacaattgtttagaagtatatatgttaattgattctccagccttttgtaatttctcacccatattttcctttctattattatatttggagctgcttacatcacctgaggattagttttgacatcattcaaatgaaatcacttaaataattggaatgggtggacttcaacggaaagaaaatacaggtgggaacatagggcctgatgcatgagagatgctcagatagctgagtgagaggaatttaggaaaggggagattgtgatgaaattagttttctaatctgcaattatatgtaaaattaggtgaatttgaataatatttgggaacaatatttgaaacaacatttatgctcactgtgtaggatgaagatggtagcaaaaataacctttaatataggttaatattaatctttgtggccaagtgattgtttaacataaagttaatccactttttaaaaatatatacacaaatatgcaaatcctttttcttgaagcagtaatcaataacttgttttctaccatgatacttgaatgtaaataaaataggctgaattatttatcttgccaagggctaagacgggaattacaaactcaattgcctccaggttccggagtctggaaggaaaaataacgttgtgaactggggcttgcatgcgccacccaaagggggaagccatgacttaattccagcacactgtacgaatgtgggcctaatgttgctgatttttctggataaaccagatattttttctagatatttcagtaaaatctcttgtatataagacattggcaactaactctaatgtggcacacagctactagtatgtaactttttggtcagaatcataaaattctggtttcagataactgatcaggccctttaatgtgtacagttcgctaaggtgtttgaaaatatttcctcgcatcctgaattcttgaagagaggatcagagcccttcatccaatgtataccagttacactcctgcttcagaaatctcctgggagctttcagcctaacaaggagtcttggcactgctttgtgaggcgagaagcagcccgtcctgataaaagaaatctcttgctgtttcttgaacttcatggcagccattgcaatatgtttggacttaagtgggatattttctgggaccctcactgtgccaaagctaagacatctgaggccatccacctctaaacaggcctcttaccccccccactcctccacttgccaatgttaatctaaaacgtctcttgtttccattcctttcctcattctctgtatatttctgctgttacgttcactcaacacttttccactgggtcctccagaaacctcatgtccttgtcaataacttttgctgtgtccacaatcttttggccagatgcctttcccatcaaaatattgttttaactgaatttcatctgttgccttacctgaaacttgcctctcctttaaggaggcaacttttctttcagctgtcaacaggtgcaaggtactacttactcatgtaaatcccacattccatgaagccaagaggagaaactggcaatcttagatacacataactctccccactcactactaaaaaatgcatcctccaacaaaactcgtacatctaattatactaccttttacccctactcactgctgtcatttccctcttaccacaattctagggattctaaaaggcttagagatgactcacttgaaaccaagccctaacttgttgagcctccttgaccctactgaacatcagcctgccatcccagaattatatacagtgtcttttccttatggaaaagtatttcatctcaggaatcttaaactccacactgtagtcctgtttcacttgtaatagcactgatctttgatttcagacattcagctctcctgtcatgtctctttctcctaatttggtcaaacctttaagacttctatctttcctgcccactatgaacccaactgtcaatcaggcaagtccccttcacttccatcttctgtgtctcctcccatgcctgtgctagctcaattttcaccactgctccagtctaacaaattgccatgggtatgctaccctttttcaatccattcctacagtgtggttaagcattgctagaaacaagcaaataacatacagattgatattccctgatgttttttatcaggtttgatataaatcagcctcttacattttatctgcttttccatttatctttaatttcttttatcccatctatgggaatgaggtcttcctattccttctaaggccaattttatgtccttggctccattccctccagtattctgtgtgtcttcattttatgaggtaacttgtttttcttcagtctttagtatcttcttttctacaattacttgactgtcaacatatggctgtacccaagatttttctgttctgtaaaaagatgctttatccctcaaatttatgttactgttatcaattcccctattgtctaatttttttaaaaaaaaagaacagtctgttgttgtcatccatactccctcaacctcctttgcactccttacccacttgtgatctggcttctgtctctcaccactctgctgatactgctgttactgacatccaattgctaaagccaatgggcattttatccgggatcatcttacagtctctcttctcttttaatagtgttgatcatttattctctttaaaagctttctactgtcttggatgccatgaccctacagtttagattttttttttttttttttttgaggcggagtctcgcactgtcacccaggctagagtgcagtggagtgatctcagctcactacaacctctgcctcccagcttcaagagattttcctgcattagcctcctgagtagctgggattacaggtgcatgccaccactcccggctaatttttttattttagtagagacggggtttcgccatgttggccaggctggtctcgaactcctgacctcaggtgatccactcaatttggcctcccaaagtgctgggattacaggcatgggccaccgtgcccggcctagttctgattcttttctgggcgtctcatcccaatcagatacttaaaagagtgagggaccgtacctaggaacggtgatcttgttgtggtatacttatttttcctaggagatgttatttgtcctcatggtttcaatccctcctcttattgtgatggctcaatctctacccgtagcccattactctccaacaagcttaagcaatgtatatctagccacttccatagtatccacaattaagtgttacacaggaagcttaagttcaaaatatgtaaagcagcttatgcaaaactaacataactctaatacagtaccttgacctgataaagacaatataaaatataaaacactaatgctatttttgcatacagatacaaaaacttgaaagatattagcaaatagtctgtcactgtctaaaatgaataatactataggaacaggtaagatgttttctagaattcagagaatgaacaccaggacatatctcaatctaattcattgtattatcaaactggaggaagaaacaccatagttatggcagtctgtaccaaaaaggcaattgataaaattcagccatttcaaaacttccaaataaagagaaacaggaagaaaccagttaaatatgattaagaaaatttactgaaacctaactgcaaatttataaaacagctaaatactaaagtaatttccattaaagccaagaaaaagccagggatactcattattgtccctcatatttaatgttttaaagggtctagccaatgtaataagataagaaaacgaagtaaataaatataaatagtaaaaaagataattattttatctgcagaaaatcgagaaaactcaagaaataggtacatttagcatagcagctaaataaaaaagtaaatcaaatttatagttttattctatgccaaaaatagcttgttaggaatataaaagaaattaataaagagtagtaatacaattattaaaatatatatgctttagagttcagcattcatatgaagaaatctttttaaaggaaaactctgctgaaaaaaaagtcctctatttttctgttcttccctgctagataagtatcacagaaaaatctcaatgagactgatggtaagcctgttataatagcaatggaattttgagtgtttgttttaacattgtgaaagaaagtcaacagaatgaaactcagatcatggcaaatatttcttgaggatttactctataatgggtagtgttataggaactgaggctccagcagttaaaaaaatggacagaaatatttgcctttatgtatcttatattttagtattatttttcaggtattctcaatgagttatatatgtgctaagtgctgtacagatgtaatctcctctagcccttgggaactacagtattattaaacccattttagagaagaaggcactgaggctgagggtaattaagtcatttagtcaaagttcccaaggtgcaagtgatggagctaggattcaaatccagacagtgtgactgactccagaacccatccttatgagctgtactctagtgtttagtgactgaggacatggcttcagggacttactccgaggtccccataaattgatcctgtcatctgtaattgaattttcaatcattcaaactcaagcactgatgaacttcctttgtttctctccagataaccaatggttttcttgtacctaactatttacaatgttgattaattgtagattagaaaaaaatttgttagtggctgcaatttcatcaaaacattagttataaaatagcacaacaaacataaacttgagggatgactgaatgtctgtgttgtatatagcatgtccaatacacagtatacttattcataatagatttaaaacaaataaggtgttaacagtggtcaattctgtttctttgtataattaataaaagcttttattgcaaagcaactataagaacatcgtgaaaaatttaacaatagagattagcaaaaatgcagtaacaaaatcaccatgattctaccagaacctactaatgtttgctctaattattcatcattccaaatctttttctacctgtatttatgcacatgtatgtattttttatcaaattgagattgtatttacattctgttttgtaacctaattttttagactatgatctacatttttccatgctagtgaaattttatataatctactacctgatccttgttcagatttctctagttgtccccagaaaagtcctccaaaggttttccaaatcaagatccaatccaagatttcactttacatctgatggtcatgtctatgaagtttctcttaatcttgaacattgtcattttcatgacattcacttattaaagagaccatagaagtggtcctctaaaatttttcacctacttcatttggttggttgcatccttgtggtgtctttgctcttgatccttctattcctagtgctcccagtaaaacagaagttgctttaaacattgacaaaattcagatattgccagaagcagtggcatgcacctgtagtctaagctactagggagattgaggtgggaggaccacttgagcccaggagttggaggccagcctgggcaacatagagagatcccatctctattaaaaaataaaaataacgtaggtgtatattttgttttagaatacatgataaatgatatcatattgtataatatcaggaaatacataatatctgttatctcactatttgtgacacttaaattgatcatgagatgataaactgatcctgcttttgtacagttacacctttctcattgtgaccagaaagcaccctgtgcaacattacttaaataccaacagatacctggttctctgttggcaattaaacctagtgggtataaataacaatggataatcattatctaaatcagtacaggttgaaaaattagattgtcatcctatcacttctacatttataagctggtatttttctgtaaagtatcgcattcactcggccactgaatctattggtcattctgaaatgctatttctactggaaaaacaagataaaaattttctgaattcttactgagtgcctagtaggctaggtggggttgagagagaagaggcagcctcagccttcctactgagtaagacttcaactaaaggattccaccaacgtgatctttctttacttagagccattaccctggctaagattctaaaatctttttttcaaattattaggccataatgccgacaaataagaagcaagggaactattcacttatacatctgcgttggcttttaagctactgatataccatcaccaaattgttagtcaattaaatgtaaacttggaaggttatgtaaatcctaccaaaaaaattgtttctcatcagtggcatcaggcacatttgattttacttcttttctgaggctcaccaaagacctccttgtgaaacacagctattgtttttctggtaataattatctgaacaaatttggacaattcttgttcttggtttcctaattctattggaaaacagccaaaccatttaatgacggttaccctaaatatctaaattatgtgtatctaagggaatatatatatacaatttaatgctagaagagaaaacatgttgttctcttcaaaaaaaaatccctgtggaagtttatgacctttataatcagtgcctttttaaaaaactaagctctagagagtgtttgggttggaaaaggtcacctatttgcaatgatacagtctgtcaagagtgtgtacaaatgtaatatactagaccttaacaatgcaatatacttcattagaataaagaactttttcttttctttttatttcaagtgagactttgttaagtatagaaccatgaattatttctccttgaatatattcttctagtgaattaatgttttgttgttgttgttgttgttgttgttgttgttgttgttgtttgagacagaatctcgctctgtctcccaggctggagttcagtggctcgatctcggctcactgcaaactccgcctcccaggttcaaggaattctcctgcctcagccttccaagaaactagcattacaggcatgcaccaccacacctggctaatttttgtatttttagtagacatggggcttcaccatgttggccaagctggtctcgaactcctgacctcaagtgatccacccgcctcagcctcccaaagggctgggattacaggcatgagccacggcgcccggcctaatgtgatttttattttaatactttgaaacttttatacctaaggtcagacctgagcatgggccagcctgagaccatctactccaaagagagcacaactgcttcttctcttccctgttcctccatcccttctacctgacccctcccctttctccctctaccccatgtagagttaaaagtaggaagttatttttaatttatattgttcaggtaagctaagtaaaatacaattgttctcaaacttgagtagtttatacaagctttggaagaaaaaattctcttagaattcccctaaacattcattgtacatgaatttgagaaaattgcagtactgtcactttaggtagttagttaacattttctaagtttcatgaaactatgagtttaaagaaaaactcagtctctgttgcctggcaagacttctgggaggcgatgaggtgccgtgagcaatgaggacagaatatatttcttatgaaagttgttgcctactgaggactggagtccattgtacatctaattccaaatgagatggtggaattagttgtagtgttgccagacaaaatacaggatacccaggtaaactcaaatttctgataaataatggataattattttagtctaaaaatgtcacataaaataatttgtgatcctaaatctggcagccataattaggtgacacatttagaagaaagttagaaagaactgtggccctgttaaattgatccagagaaccatcatgggcaacctgaatattattatgttggtgagatggagccattgtaagttattgaacagatgagtgaaatgaggaaattactgccttaaggaaaaaaattctcctctagatgtgtgcagaatgatttgttatgagatgagaatgtcctttctgtttgtttgttattattcttacttgtcctcttccaaaactataccacaaacgttttgtgaacaggggaaattcttatttgttttattatatacaacatctagtagaaaatctggctgataataggtactcaataaatattgactggagggtagaaggagggagtggggtagaataatatatttaggaatgctgaaataaatgcaataagatgacaacctatatgatgaaaataatgaagaataactgccaactacttaggaaaatgtgattttaataactcagcttatttaggaggccttcatggaagaattgtgataagagatggtcctagaagctgaaaaggaaatttaggagatgatcctaaaaagaagaaagtttacggcctttcagaattcaggtgggtgttggtgcaccttctgactgtctgcctaagttaggtatataatatcatgctgtttgttaactctttagagtaatggggtaatgatggtaaagaaatatcactagatatgagggatacagatgttaccagtcacaagttttctgcatctgctaatattagaattctgatgtgttggcacctaaaccatcttgagtgtgatcaaagacagatggaattggtgctaagtttcagcaagtagattctcatgttgcctagcaagcttccagtgtagttttactcatatagctttgcccttattgggttatttctaaaatagatagtttaggaaagaacgtggggagggtggtataatcatttctttgtaacagcttttaagtaatttatttttgacttccacctacaggtcttatgtccattgtacactgaatttaaaatggtatttaaaaatagatggtactaatctaggggtcataagtaaaatccctgtatgcagtctatatagttggacaatgcaagaatgttaatttccatttatatatctctacattctaattcagcagttatggagcatatgaacatcacatgtgttaggtgcagagtaaaggagaaggcaagttttcagggagcttattatgtagtgagaaagagacaaacaggtacgtaactgatacagattctgaaagatgaagtagtatatgaaaacaagtgcttaaatgtctaaagaagtgtgttatttattctgcctcaaggaaatcagagaggcttcatagatccattgacatttgatctgaatatgaaaaaaaagcagcagtagtcttccaggaagaatagatttagtaggaactcagcaggcaggagtggtaggacatcaggtgtgaaagtagatgctgagtccagggagtagacagcacattggggctgaggctcagtgatgggatagaagacagaaaagaagacagacaggatggacctttcatgcttccctgcatctatcctgcatacagtaggggagctatggaaggttataagcaggatcaatgggttggagctgtgttatagaaaggctaccggctgcagagtggaaggcggacagcagggcagggcaggctggtggaaagatgttcagctgggaggttgtagtatgagtgcaagggagaagcgatgcgcgctagaagtagcttactgagacaaaagaggacagatccccttttaacacagcggcagggctagatttgggggtctgagaagaggaggcaaattcaaagttaagttcaagacctgtggctcgagggacttgcaaatgttccgacattcatttctacgtgcattgaacatggggagagggagggtaatgtagtctgcagaagagaaggatgtcacgtagggagaactagactgtaaggccctggtgagtagaaagtgaagaatttagctttatgtataagcacttcctacaggtcaggacatgaaaagtgatctttaagaggtagtagtgaatagcctctgaggctccttctgttgttctcttgacacaagaggggaaatcctaaatggctcagtgtgtggagtccagctctcctattatctatctatgtgacgctgggtgtattacataattctgcatgcctcattttcctcatccataaaatggatgaataaacctgcctcattcagttgtcctgaggattaatgaaataactcgtgtcaaatgcttagaacagtgtctggtacagagacagggctcaataaacattagctcttatacactaagcccttacataattgaccaaatttcgtattgatattgatttcagatgtttctttaaaatgtaagcaaagggaaatctttggactaatttgtctaatttgcggaggtatcattatcagagaggacttggtcttttagttgctttttccattaaaaaggcttcgtagacagtatgacgtttagtgtgtggaaattgaccttatgcctatatttttgaagataaacaaagcttccattttagtggggttttattcatatgggtttatttatgaattttgagctgcaaaagagaatagggagctttttataaaaacatgacggacatcataatgttaagtttagattataacttggaagtcagtaccaggttacataatactgtagattgccctgttatgtttttctaggtaaaaataaacaaacgaaaacaccttttcttttgtgtgttttgtgtttgtttctttttgttactagtttgtcatactatgtatcatacttcaattgagggtaagaaaggaggtgccttatgtagggagcacccttctaggtatcagaacacatagactcggactcggccagatttctatcactgctgttaatgactatgagatcttagacatgtcactgctacctctctatacttctgtttccccactcacagaatggatgccacctaccacctctcaaaatgtatggtaaggattaatttttctattacagatttatagaagactttcttttctaatggccgataaatcctttgcggttggaaacaagccatttttcttctttatgtgtcttgcagttaacagagcacagataggaattagctccattgtgtcagtaagaaaactgagatttaaaatttaaaaagtggtacaaatagggggaaagttcctaagtcaccttttatcccctacctaaaacacatcattggttaagtgctttgaacctgtcagaaagactataagaaaaaataccaagtaatatcagcctgctagtctgggctgttgggaatatctattatgccatctgtcacaggagattttaggttggagagcagcaaatccgtgactggggactcaaagttcaaaagcagaaggtctctcctctctgcacaccgtgtggtgtctaaatcactatccgagagacaggcgttttcgttgatcagacatcctgcatctgcaacttcatttaaaaataaaaggtttaaagagtcatcgtttatacattgttccaaggtccctgtaatttaaatcaatgtgatcgagatatgtaatacaaaatttctagccctactgtcttcctctaacttactctgggtcttggtggtgttgcatttttataatggagcaaatcggcagagtaggtggaggaaggttggttttccaaagggatcaggtaagctgcaggtccacgtggacacatttgttacttcggggaagcggggaagcggagaagcagcaattaggcagtggagtaatgctctgaggggcacggactccagttccgtaatacattcctttcttaatgtgacttgatgtagatagagtgagggcctatcaggtgtgaaaagccctgctgctcctggcgtggagtggcctccagacggtgatttggcgacgtcaatctagtcatgcttgatttcgacacttaacgtggtaaagcaggatttctctacccccgatcaacttctcaattagcaagctgccttgtgtaacggccttgttttgcaatccctcagggctgcttcaggggtcattagggtgagaaaacttgagcactcgctccagctcgagcagagcaggaagggagcctcagagatttcctaaatacgtataaccctttttcaagttgtttgctttcatgggattgattcttggcacattaagaagcttaaggctccagtatcttcttttaactgccccccttatcgcctttgcagctgacaggtttttttgacaggctgagagtaaaaagagataactagtaggttagtactttatttatacatgtggacacacaagcacatagaaagacacgcacacacgcgttcaaatatcttttaagttgtcttttcagggccgctggttaccactgaatatcagctgtcaaatgattccagtacctcatgtttttaatattcaatatgtctgagttcaaaatttttgtttcaactatatctgacttcattcactaatgattttaaattggacctgccttattcaatattctctctaaacccccaaatagtatttatatgaataatatgttaatatgaggtttttgtccggggcacttatgaatagacattggaatatatttatttaatgttttttcctatctgtgatttgactgagtggcttactcctaactttcataggaaaaaaaaaaggtattttttctttccttttataagatgtatctggatagagaaacacataataaaaacaggaaaattttaagaattgcactcctttaaaaaaatctctactttcaagcattgtggatttcatatttataatttcctattttgatgatcaattttatatccacttgctgttatcaaactgttaaaaattaggtgaataaattcatatcaaataccttagcaggtttggccttaatgtagtatccttagagcaaattactttaacctatattttgtgaacaggttttcccaaagtggttggtctctgttttttacaaaaatatttagtttattaacagtgagcagagcattatatggtttataatatatttaaattatatataatatatttaaattatatatataatctatatatttaagtcagaggtaactgacttaaatatattttacaagttagaagttggatatacgtggatattacacaccctaacacatactctatttatgaagggtttgacatccagttttagatctgtttgagaaacagttaaaattctaggcactttggcatagcagcttctaagaagtacttcaaataataagtcctaaaggtgacccaataaaggaaatagcttagtagctctgttttttttttaataaagaagatagatacacattctaaaatcgttaattaaagtcagcactgtagaaacagctctttacaaaaaaaaaaaaaaaaaaaaaagagtttggaccactatgcagaaaacatagagaatgtttatgaacaatattgtatgtgaacatataaatatgtaatctacaggttttattgtaattccttctgtagagctttactacgtaaaagtacaactttagtatttctccttcttaatactggattgagagttgtggtaatttattatggaaagcatcaagttttaacaaattaatactaatgaaatgtacctttttcttgcaggataccattttgtctttttgaatctctttccttttgttaatttcttattccaaaaaggagttcatctaatcctacaaataattgctttcatggctttattttgataatgtgggatttttctcttaaatcccactttgaggcaatgcaaaaatccttttaaggattcacaaatttaaaaaatgtgtatgtattttaaatactagcttatattaaataaaagttatatgccttcccttttcaatgagttttaagacaatgttacaagttcagtctgaaaactaagtcagattttctaaattagtgttagctgaatgatccagttacactttgattagaatgaagaatcacagaattttataattacataaatatcttgaaagggtatttaattcaatctgcatatttgagtcagtgaaggaaccaaagaacagaaattgtgaaacctttgagttctcattgctctttggctattactagggttgccatataattttctacccaacccaggacatttttgataaagataacatgagtatatagactaggcaacaggtttatatccaggattgtcctagaaaaatggtgacatatgaatacccttgcttttagagatattcaatctatatattttttcaaatgattgtgtttagagtaccttcttaaagaatttgaaaacaaatatttatactatttatactaatgagataaatggtgttggatattaaatttgctttgcagaaagtactttaacaaaagtgaccaaatagaatatgcttcatgaatcttaggtgcttatgtcaaagaaattcagtacaataaaatactgatgcctttgtaacgtaatatccttagttaaatacaaggatgaatatctgtgataacactttttgcatcccttttctttggaaaatttaacttatacaataggtgacacaatgccccaaaccctgctacttaccttaaaagaaaacattagtagttaggttgtttcttcaacgaggtaagataaaatattaaataaaatttcaaactaaactgtagataatagatttttttaaaatttattattattatactttaagttttagggtacatgtgcacaatgtgcaggttagttacatatgtatacatgtgccatgctgataatagattcttatataggttgacattattctcctacacagcactttttcttgaagtaagtaataataattaaccctagaagaaatgtttgatcatctgaaaatttactggctagctgcaagaattaaataataccttacctattcaaggtaagtgatttgataactttttgtgaataatcaggtgactgttgtcactaaatcacaatctctggatataaaagatatcctttacatcagaacaagtgagttttgcattgcagtccagattacaccaatcactcgttcgtgtttcacagtggagctttgctaagcctgtgttagtgcctgagtgagtaagtggctcttggaaagatggtgaaattgacacatgaaaacattaaatggcttatttgacaaagatctaagaaaatgtcattcccaggattatttcccaactgttcacaaaatgaccatgatcattttcctataatgcttcttttcattttctttatttttcttttctgttgaaaatttcagtatttgaagtgccttaattacgagatgagtaaaaaaaaatattttcaaaccagatacctctccacttaatttcttgttcacttttatatatagtgtatggaaagaaaaggatgaaaaagaaagatagaaaagaaggtaattatgagtctctaagaagtctgtaaagatatcaaaagacttcaatgccgatttttaggaaagtattacttacataaaaagtttcacctagaaaaccctattcaattttaagtagacaaagctttctgaaactcattatagaatagactatcacaaaaaattcttaaaagcttttattatgaaattgtgtaaagcatattccaattagcattaattgtactgtggctgaaactagcagcttcctgagctatatcaagggagagatgtgtagtatctaaatttcccacgatatctaaaatagttgtagatttttatgctcgtataattgtggctgattggcctttccttcattataaacttaccttaaaattagaacaaggagctatagtgattagataaaatatttgtttctattactttaaagatatagttaaaatatttctgttttagtacatatgtgttatcctttattttactgtttctttttcccttctcccttttaatactctagttctttccataactatgtctaaaagtttgaaaaatcctgtcttttaaatatcaaaacaataaatagcaagcttgacacatttcttttattctagcaacaaaagattcttttcagatcgaagattttgtgattctatgaaatgttggtacaattgccatatttgcctggaaatatttttctcatcaaatgttaagggaaaaacattctattttacttttctctgcatagcttctcccagtaggctgctgtgctgatcataaatagcagtaacacctgctcgtaaggctttggaaaatgggtatgagaagaaattgacaattatttgttgaaagggaaagtataatgtttaaacactgtttgcaacttttaagagtcaggtgtagaaagagacatgatgattctatgtagaccagccattaccctctgtcagtccagaaacctagagacttttattcaaaacaaccccttcttgccccatttttgcagggaaaaacaaagaagtatagtgagaaggaaaaacaaatttggataagggatataggttctcttgctagctctgacactaaataattgtgtaaggttttgtgtgtagacatgggatattttctgctctctatagcagagctaagacagggccaattagcccaagcgtcaacccatttttctttacatattgttgttgctgtcttcatggagcaggaaatggcaagtttagaaaggaattaacactgagtaagcctgaaactggaacaataggtggggcattgtcatctatttcagattatgagagagctataatgattcacactattagcatacatatttttaagtttcaagttagaaaaaaatgtctctggcctgtattttttcttatctttaagcttagaacattataagagagatttctaggatggatttcagttagaaaattttggatctccatttgtttcaaagttataactgtcatatatccagggatgtaaagaaagctgaagctatagaccagcactgtccaatagaaatagaatgtaatccacatattaattttaatatttctagtagccaaagtagccaaggaaagtgttttaaaggtgaaattagttttttaaacaacgtatttaatgcaatgtatccaaagattaccatctcaatgtgtaatcaatattttcaaaaattattcatgaaatatttttcttttttgtgctaagctttggaatctggtacatatgccccacttagagcatctcaattcagactcactacatgtcaagtagtcattagccacatgtggctggtggctaaaatgctggtcagcacagcaatagacagtaagtgaatgggtacttagcttggattatgagtggattggaggttggggagaaaccagccatttggtaaaactgaaagatccacatccagagtatggagggtattgcttttctgttttctatgtttctctgagtatctcaagtctaaaacaatctattttgaatcacaaccttcaaactggaatggattctgtaattgtttatggcaggtattttatacagattattcacagagcttgacttgattcttctgtaatgctaggttcttacaagtcttgtgtagttctaatgggaaatcaggtttccattaacatacaatacccagagaaaccgatgacaataactttcaccaagatctctttcctcacctttagtattcctttttattttctattgttgccagtgtagtactaagtctagatctcaagaattccaaaaaatcaaacagttaaatattctttctccctcctgttcagggataatttttacctgtaattttattacccccaccatgttgttaaaatgggtcagatcatgatcgctactcagtaagtccaactagtggttggcggatcttaggagtgagccctctgagtgggcttgagcacccactgctgcctggtggtgttctgtctgattgaaggaagtgtggagttttgcctgagtgtaggagagggatgatattctgaggattctcttaaaataccaacttaccaaacatgaagcttctatcatccaagctgtcatcacccatccaggctgtgtaggtttctctacctactccacctaacctccaccaagcagactactaccatattggtcatttaaaaaatagcctttaaataaaccctgatcttgaccacatagaggcttctgctcaccctctaacatcatcccacgatgaccttctttcagctccccgcagttctctacttgtgaaatgccatgtcattcaagtcctgcttcagctggtttgtcttccccagtcctccagcacaagcctaccaagtgatgtaccatcctcccctttattgtagagcacttctcgtattctatccctgagttatccttctcactggttgcctggcaacacacacccatagtccactgaacatttcccacaaagtaccttgcacgtagtaggcatctactttcattaaaaaaggttcattgaacctcagctttctctcaataccatgaattattgctgggatttcaggtaccaagttgtagttttttgtttgtttgtttgtttgtttgtttgttttgaggtggagtttcactcttattgcccaggctggagtgcaatggcacgatctcagctcactgcaacctccgcctcgcaggttcaagtgattctcctggctcagcctcctgagtagctggaaatacaggcgcctgccaacacacccagctaatttttcatatttttagtagagatggggttttgccatattggccaggctggtcccgaactcctgacctcaagtgccaagttgtagtttttaacatatatatatatgactatgtagcatgggcttttggtagttttttactgaaattgtagttaggcacttagtaagtttaacttaattcttcttctctttccttttcattcagtgtagtatctgcctattatgtgtgtatgtgcatgtttggagagagaatgaatatatgtactatacatgtatatatttatacgttgaactttcagcaaatggcttttatgtttctgttttggcatgatctgtatgtgttaataaagaaaaatattatttacaaaggctgaactaaataagctagagttaatatagatttaattatgaaataaataatctctaaggttttaaaatagaaaatgtcttttctttaatatatggtcaacttttaagcttttttgaaaatttctttttttaattagcaccttataatggtacatatttctagggtacagtctgatgtttcaatgcatatatattttgtgtaatgatctaattagggtagttcaaatacccatcgcctcatacattatttatcatttttttgtgtgttgaaaacattcaaaagcttctcttctacctattttataatatacagtaatttactgttgcccatagtcaccctactgtgcaataacagaacaccagaacttatttctcttaactgtcattttggccccattgaccaatctctccccttcctccttccctctctgctccctttcccagtctctggtaatcactatgctactttctccttctatgatgtcgactttttattttagcttccaaatgactgagatcatgaggtatttttccatctatgcctggcttatttcatttaacatgatgccctccaggttcatccaggtggtcacaaatgacaggatttcattcttttttatggctgaatagtactccattttatatatatatatatatatatatatatatatatatatatatatatatatatatatatggcacattttcttcatccattcatccattgatgggcatgtaggttgattccatagcttgactattgtaaatagtgctgtaataaacacgagagtgcagatatctcttcaacatactgatttccagtagtgggatttttaatccagtagtgggattgctggatcatatggtagttctgtttttaatttttttgaggaacctccatactgttttctgtaatggctgtactcatttgcaatctcaccaacagagtgtcagtgttccttttttcagccttttaatcttaacttcaggaaaattcaaaatcatccatgaaaatatttaatatgtggtagacctaactgcaacaattagaaacacagttcaaaataatgttaaacatttatatttttatatgtacattctaaaatgttcagtgttttcttttttacttttctttaactttcataatacatttatctctatgacagtggagcacatgctgagaacccaaaaagagaaagaacaatagactcaactctctacagcctgtaatgggctaactttttaagttgaaaacaaaagaattgaatgtttaaagtgttttcattttctatcactaccttccttagttgaaaaagtaaaagaagaaagtagatgagaagcatgtttgtaatagacaaaaaagcaattgtccttcaatctgtgaaaatgttcattccttcccacaaaacatattcaataaaacttttccatccaacagtcaaaagttaaaaatcttttcaattgattgcaatttcatagtcttcgaaagccaaactttcctttctctgttcatctgtagttattctatagttttttttaaagataggattataactaaactagtcttatccttaatattttaacaaatactagaccgggcatagtggctcacactataatttgataactttgggaggccaagttgggaggatggcttcagcccaagagtgtgagttcagcctgggcaacagagagagaccccatctctacaaattttttttttaaaaattagccaagtctgttgatatgcacttgtggtcccagctacttggggagctgaggcacgaagatcacttaagcctaggaggtcaaggctgcagtgactcatggtcacaccactgcattccagcctaggtgacagagtgagactctaaaataaaataacttctaaatttatgcatatttatctcattaaatgaggattgcttgactactgatctgatctttactcagaattaaggtttactgcagtgacatatttgtgcattttcctcaaatattaaattactttgagtcaaatactatgctttacatagcttggaggaatttgatttagtgacttgagccactgacctggttaaaaaaatctatagaaacatctggtgctgtgaaataaaagacactaatacaatgaacactcattttcccctgatgcctgtagtaaaccacattcattattgctatgttaaatgagtatatgtcttgagtttttccctacccccagtccgcaggaacgttagaaatggatatacactaaaccataaagagtttgcttgctttatggcaatgttgccgaagctgttgaacatttagtaaaaatgcaaaatgttctggcacctttaaaaacatctaaacttgttttgtcttagttcttgcaatgccacccatacacaaaagttattaaatatttctctgtgcatgctcactacagtgtggcaggtgtaatacagcatacaggtaggccgtgttcttacccctaagaaagttagaaagttgtctgtttgatttttatattcatgtctgtttttagatagacaaaatgaggtagtgaaagcaaaaaaatggaatagaaaggggacagaaacatctctgggatttctacagatattaatagttatatgcactgatattgtatggccggtacttgtcaccttttacattataagcctacttttggaagtgtgtcagaaacaagataaaggtcatattgcttaaggcctactatgaacataaatgatagggaaaaatctagcccataaattggcaaattaccatgtatcatgatttaataatctataagacatcttaaaatgagcaaaatagatcaatgagcttatttttttccttaccgtaaatgtataagctggtatgctgtgattaatttagatcaaaatttcaaaatgacttcctttttaaaataatgctttgtctgtctcagtgtacgactaagaactcttaggccctcttatctagaggatgtgactgtacaagcactacaaacaagaatttacaaggatctccagcttaaatggaaaagtggatctatgataactttataaacgagtgtgggagtaaagagtgcagaggaagaggttacaagaattatcaggattatgagtactcaaaatgaattagatagttaagagactgtttttaaatatttcctaggcacaatctgaaaaaaaatcttacaaaggagaactatgcctgtcttatgcttaattgacatatatgaaaattcttttgcctcgaaacccaaatgtcatgtttggaaaccaaaggataacattatacatttgaaaatcccattttataaaataatactttgtttattttcccagagaatcctgggtttgtcccactgagaaaaaagagaactcgaatgtagctatagaatgatctcttgatccttggacaaaactgaggaaaaagtctaacaaatgcatcgctttgcagtaaattagatcagatttccgcatctccacactcagtctgtgagctgacagttcagtaaaatgttcccttgtaagattcgccctcttaggaaaaggggcaataattcatcattaggatatcagagtccaggtgtagatggaaactgatggagcctccagcgaggcagggaaagtgcgtggaagaagaaaattttatctgaagcctaattccctggttacagcagagaataattaagataatattgcttcaagagtcctttaatgattaaaaatcacatatgcagaatccataaattggagggcaacaaattggaaggctataacgtcagagaactgttttgtgcacattgtagtggaaagtacactggtagcagtgcgccgtacgggcagccatcagagactcggaccattccaaggactttgtttagatgcaacaaatcatttgtctgttattaacccagagcttgtaattatgcagattgccatagattttcctgggcctggaagtgagattgagggttgttcacagtatagcaggcagctcagggctggccatgcattactgaacttgccacatttatcatgttgactgatggcagcagaagcaggtctcaggtcccagtggttaatgtagtgggtaattaactgtcatttgcctagtaataggctgatgatcaatggtttgtgtggaaacaaattctaatcaggtagctgataaatgctcagctagcgagagcaattgaaatgggggaaaactacgtccagaatttcaaaatggcattgtgtgtatgtttattagatatgaacaaactgaataattcttaaaaacggctttatcgcatgttaaccagatgttatatacacaagtatatctatattcattgaataaagaacttttaagtttttcttatttctcaaaaataataaagaacagaagaaacaatggcacatgtaagtgatctcctaagcagatctcctaagcagatcatgttaagtacactgaaaaataaatatgaaatgttagaatgaactaaaaaattctccttacaaatgaataggatgaaagctttagttggtgatggtttcatttttgatgatgccagtaggaaattaagatattacattttcgagcaagttctttctttttaaataaatattatttatcaaaatacagattacaaaaggagaacatgaaggttacttgggttatagtccttaaaataagcatactaaagtattttttaattcattaaggaaaataagtgtctaacaattatgaatttgatcttcttgaatgtaaacttcgcttactttttatcaagtgcacagactatgttagcaaagtctttaaaatgcatttattgtttctaccttcaaggcgcttatgctcttcaagagacaatccaacaaaaatatgagcataaacattcattgcacattttgccagacacttagaaaccattctcacaactgtttccaacaactgtcattatcctggtaaaaggaaatagttataaacttgaaaatgaatatgcatgccttaagaaaagacttctctttggagtctacagaaagtaatgagagacttcagcacatttgtgcctaatccttaaattcaataaaatgaaaggctaaggtttttaaaagtacatttttataaccaaaatgagttttctctatagcacctttgaattcattagtttagaactgcttttaatttggtctttcccatgagagccattatattttcctcctgtcagcctgacactggagaaaaaagaaaactggcagatgtggtgtttttcatctagtttgcttcctagtaaaaaagtgcattaactactatgcatggaatattatttgtaataattcttcccctccattatcaactttaaagaaacttggtttaaatattgccagtgcaaatggataaaatatttcctcacgttatgaaatgagagacattttattttgtacttcttttaggtcattacaataacgattctcaggaatctgcagcaaataggaattttttttaaatcctagacaattccagtggttctgacagtatattatccttcaatttctggtctagctatatatagtttacagcctcatttactttaatgtgctacttgaataacataatcatagctataactatggtatagagccataaggtgcatgcatgcgcctctatgttttttgactatttaaatggcttcttcataaatgtatttttaataataatggcaaaccttttagtaactaaatgtcaaaaagtagtgaatcattcattagttggttcctttcccaactaaaatgtttaatatataacattaagagcaaagttatattgcttttatattttctatatactctaacccagagatttttgctatgaattcacccccattgacttctgtttatgtgcagttacgtaagcttcctaatgtatttgtcttttccttttcttctcaaacaagatgtgattttcatcaaggaaggtcaacggagaatatattgcagaagaatatttatgcatacacctaggataaaatccacttgtgtacatcataaagcattgtgtattgtagctttacagagtatattaacatcatctctcttcacgatctcagatttctctgtaagagtttgtaaaaaaaaaaaaatgtttcttattctaggctctttggtgtaacgggaaactgcgctgcctgtagtaagctcatccctgcctttgagatggtgatgcgtgccaaggacaatgtttaccacctggactgctttgcatgtcagctttgtaatcagaggtaagcaggtctctttttggtctctaagaaatggttaacctctctgtgctggctatttatttaataggtggaaattatattcatacatttaaagcaatcaatctcagcgtttttctgttctgtaaactttaatcccatgccagagacaagctactaaggagaagaaaggtcttaagacttacttctacctgaaagaaaagcatcatataagagcaagtaacagaaaatggaaacactaccgtaaactctgacttcttttactcattccttcttttattattttcctgtctttttaaaagtagttttaaatatctacttttttatactacttatgtgagtaaataaattggcaatgaagcaaatatacaggaatttgttgcaggtattttatattcttattattttttatattttaaattccttatccctcatgtttttgtttttgcttttttaaatacaaggtctggttctgtcacccagcctagagcgcagtggcactaacatggctcatgcagcctcaacttctgtgctcaagcaatcctcctgcctcagcctcccgagtagctgggagtacaggtgtgcactcccatgcctggctaattttttttttttttcattttttatagagatgatggagtttcactatgttacccaggctggtctcaaactcctggcctcaagcaatcctcccacctccacctcccaaagtgcagggattataggcatgagccaccacccccacccaatctagctgtttaccttaaattttaaccctgtcctatatgtacttttgcagttacttcaaatatctttgagaatcagtccagatatagctaataattaaacaattattatcattggagaggagcatttgaaaaagtgttgaacagggaacctggaaacctaaattctaatatgggctctgccactaataagctgtgcgatcttaaaccaaacaaacaccttccctctctggacctcaggtttttcatttgtaacatatgaagctggattagttcatctcagagaattctttcagctgaaaagtattatcacttaattccattttttcttattgaaagttatattttttatttctgtgaaaactatatactactggcacctgttttatatgataaatggagaggattttagaacattaaaatgtacgtattaaaaatacaacatttcaaaaattagaacacttgatagattttaatgaaaatgaattcactgactttctgtgagaacacctggcagagtatataatcaataaatattagttgcatcaagttctcagttattgtaatttactctgaaaggtactatttgatgcagaatcttcttatgagaccctgtagaatagtagaaagaatgtgacatttctagtgagaacgggattcaaatttcagcaccaccatatattagctgatatattagctgtgtgatcttgagtatgttacttaatctctctgaatttgattcccacacccataaaatagaaacactaacacctctcttgcagagtttgaaacttaaatgaaataattaatttatattaaatgtcaggaacacaacaggttctcaaaagttagttatctttataatttaccaaataatattccattaacttgactttcccacaaggcatgtatcacaatagtgtttcttgctaaatgtagatattcagattgttgcctaatgtaccttataatgtaatagttacccagacagtcatgtaagatgttatcttacaatgtcttgactcttcccagcaagtactgagaatcaaagtaagttcattcagtctagggtaacatttagacgaaaataaattggcaaatgcacatgtttttggtagggataaggatatacaaacacaaacattcccacatccatacagacacctttatgtgcatgtatatatgtattttatacattttaaaggtgtcttagtagtaaatttagaatacttttgttgacttgtcatgttgatcaactaatagcagccagtaaccatgcagttcccattatggaatcataaagtcattgcttttctacttataaaagattacatattcatagtaggaaatttagaaaatagaaaatgataaaaacaagacattgtcccatgtctcattcttctaaaagaaaacattttaatattttgatatatagccagccatacatgttcctatgtctataggacaaatgacattgtataaatattacactcacatttaagcaaattaaagttacaagggagaatcctaatgtttgatatttggactttttcactcaatttatattttgtgccttttttacctgccattaaaaattcttttaagatattttaagcttttctgagttcagctttatggacagagcttcacatatgtcttctatcatcagatatataagttgtatcttcaaaagtttttgtgctgtaaatattatcagtattatcaatataaaaatggaccttatgagaccctgtagaatagtagaaagaatgtgacatttatagtgagaagagattcagatttcagcaccaccatatagtagctgatatattaactgtgtgatcttgagtatgttacttaatctctctgaatttgattcccacacctacaaaatagaaacactaatacctctcttgcagagtctgaaacttcaataaaataatttatgttaaatgtcaggaacacaactggttctcaaaagttagttatttttataatttaccaaataatagtccactaacttgactttcccacaagacatatatcacaatagagtttcttgctaaatgtagatattcagattgtataaaaacaaatgctcatatctctatctggttaaattcacagagcatgattacttaaacaaggtatataacagtttgaaggcatatgctgtacattgcttaatgatctccaggaaagttataccaattattctcctagcagaaatctacaaaactacgcattccctcacattcattctaaaacactaggaattacgtttaaaaaaaaaaaaaaaaaatccttgccaccttaagggatgaaagatagtatttcattataatttctaactggcatttatttgatccctggtggtcctttggtattccttcttttagagaagtaggcagtttatgtcctttgtccattttcttctattaagtagggttacctattttatccatgttctacatagaaaataaaaacattcaagtgctaaacccagcctaaattctattatgatgcaaagtaattgtaggttgttaatgctatttacaaatcatatatctattttatttcaccattgaaataaaaagttgcattcacaattaagtctgtctcctcaggagaactcagtcaagtaagacaaacactcctaaattttgactctaaaactgttcacattcttattgctgcgaaatactattctagtatcattattaaagtacctaatatatttctgtgttcgcttcatttattacatgccataatgggactgcatatctttagtgccggttatgcacaattagcacttagttattgtcttgtcacttcagcccctacaagacaaactaatgcgggaagtcagctaatcttcatcagtcaagcaaagcagacaaattttgttacccaggatacagaaggttttcatataggagattctccttttactctgaagtttgcttcagtctcctccaggaaacccatatcccacttccagtagccaaatcattgtcgcaatattgcacttttcaagtgaaacacaaggcaaataggtaattcataggcattttctcttaagcaaactttattgacgtctaaagttgtggaattacgcgtttgtgaattgtattcagcagtcatttcatctttacctttaaatcaaagtatcattaagatccaaagcatttctgaatgttttaaaaagtagcagtaataataacctttcaggattgattgtcccttatatatagatctcctctgccccttttagaggcgtatagctaaaacgtgaatcctgcattaaaattcggctagtttctctattttaaaaggtaccgcaggagggttatttaagcttattttatgatatcttgaatctcattcagaattggaagattctatataacaggttaatttcttaaaggtgaataagccccttctccttagaaaacacaataaaactaaatgatagttttgtaagaaaaggaaaaataaaaagcttgtgatgaaattttcccaaatatgtaaaattatgtaacaattaattaattttcttttttttaagaataaagcactgtgctaggctctgtggaagctgaggtggataaaatctggtttatttcttagaggtgtccggagctacgggagagacaggacatcaaagactcacagaagagtgtaatcgatgctaaatagagctatactgagggaagagagagccatccttcttgaagtgttagggaagcatcaaaggcctgatatgctgggtcttgaaaaaagaactccctagaactggttgacttacaggaagtgtgtctgctcggggttggggaagatgagggagccagggagcagtgaggaaaggaattttcaggcaaattgagcaacgtgcaaaggcatgcagatgtgaaagcatttgacgtgtttaggaaatgaaaagcggctcagtatgttcagagattagagaagcggtttggtaggcacatggaggagtagaaagagagcaagcacctagaggaaatgaaattgtaaacttagtctttgaaaagccattaaataaaagtcaaaatgaatacaaatttaaattagtcatctaaaatacatttgttatttaaagctgttggtttctggaataaatctaccttaaccaatttttattgaccacacaccttaagtggtagtacagtttatgatggttctgcaaagggttcaaaagaaatataactcgtggtcatttaccgcagaactgctgactataatggcaaaccagttacacattcatgagaaattttgaaacaccaaaataaacaatacaccaataaataagtgctttgggaaacatcagaataagcaaatttacatggtcagaagatgttgatggaggcaatgggaactcaaggattgttacaatttaagtagacagaaaaaggggagaaatatttcttgctagggaacaacttaagtaaaggtgaaaagattatcattaccaaataataatgatagcaaattctgataaagtattagtcaaacaccaaacaccgttctgagtgttttacatgtactcattcgtttaatactcaaaatatcccataaataggtagttattagcttcatttgacagatgaggaaagtaaagtataggaaatgtaagtaacttgcccaagattacagttagaagaaagtggtagactcaagatttaaacctggccgggcgcggtggctaatgccggtaatcccagcactttgggaggccgaggcgggcgggcggatcacgaggttgggagatcgagaccatcctggctaacacggtgaaaccccgtctctactaaaaaatacaaaaaaatgagccggtcgaggtggcgggcgcctgtagtcagagctactggggaggctgaggcaggagaatggcgggaacccgggaggcggagcgaatctggtctccctctccggagtcaggcccatttcaagagaggtattttattttctgactaagagcatataaatgtgaatagatatagtggacttaaagtaaggtaaactttgaataatgtatagcaagatttggggtgtgggtagtgtcatttgatacactaagggttgttagcagtgagatgtataatgacaaccggactgtcagtgggaaagacagtaaatttgttcacaggtgtatagtggaggaatgagtacacaacccggacttcttattgaaaacagtatagtatagaaatctctaacttacagttaactgaagatgtggaataggaaagtatagacactagaaatatggattggagctccctagctaagtgttgtaagatagaaattaatcataattgtcagtcactaacattagggaaagaagatggctaggctaacatttttatttcttaaaagggatgttaccagtggaggcttcttagcataggcttttgataacctgcttaaaactaagcactatattttataaggatgatttactatttacacttgtttcatatacttctcaagtctctaagactatatgaagtcagctaaatcactcaaaaatatctagaaattacatctcatattaattccaaaacatcagaattagatggtttaataatctaattgggcatcttcttattccttaccataatttttttaaatgagggtaaaattaattgaactgagcatactacaagtaattagggtcagattacaagaaagattatgtttatttttagtaattgtagcctgttaatatacttacagtatcctctggctatcactcctttcataatgcttttttttttttttcctgcaaatgctgaatctcataagaagttggttaaatcacactggaaattagcatttcttacaaaatcacagttacagattaatttgttaaatacatactatctgtattgctgtctctgaaatttctttatatttatatatgaagcattttttaaagaggatgtcaaccttaattgcataccagtcgtaatctgctcttaaccacagctttcaaggctgttttgtttgagtcatatgtgcaagtgtgacatccctcatccatgttcgtttcatcttgacctttaagtataaattgaaatgcatataaaatgcactttatccagttgataacatattagtaataaaatatgtcaggtaggaatattttagaaaagttctgtctctctctcgctctgcctctgttgctctatatataccacttaattgaatagtaggcagacttttttaaagttatgcaaaagaaataatagtaatacaaaaaacacagttacaccctgtataaccatttaatcttcacattattcttgtagcctgcatgctttactgccctcaggtaaaagcttgagtcttgaatccaaaaaggcctgggttatttttcttcctttactataaacgttttaactacagaatcttgggcagggctttgaaattctggcacggagtcttaggtttttcttctgtaaaaagccatgacaatgcttactttctaggttggatgtagggaataaatgtgatcatgtacatacatgcttagcatttagcacatggtaagcataaaaaggtggctattttacctatgtttcaaacattgaggtaagattttagatatttcatttctactccttgccacaagcctacaaagtcgactgatgtcacaggtattaaaaaccaaagttttattttcaattatcataagtgggaaggtagagtttggaccctactggttgcagtatacctctctgcctttcagacacttttcatttgataaggatatcaaactggcttgcacaaacaccattattgaagtgcaacatttaaagtatacaggttacaactaatacaaagaaaatatacttaaagccccaaacttgaatgttcattgtatccagtagctttgaccacaaacaaccctaggatttcaagatcagtgcatagtctgtgctttcaatcaacatcatcagcaggcagtaatcctggggaaaaaaagtaaattccacaaatagaccaattttcctttaagaggaaagctaattcttttcagtctactttttttattacactattttcctctctatctacttagctagtataaggataaatttccaaagctacccagttggaaaaaaataggttcactgtttgtctagcattccaatctttgcaaatgtaaatcagtccaactgctcctcatttaaaccttcaacttcacaaaacattaaagggtggctttcactacacaatttaatctatccactaagatttctgctggaacatcatttgaaattgactatctgataaagagagactactatcaaaggtcatagaggtcaacttgtataattacaagtagttttactgggtcaactctaccagacaccactatttgaaggttaaattgttacaattaaatatatatacagatctccccagagttactttattgttaaatgtaccagaaacagaaaaaacatttatttctgaccttaattgtgtccaaagtgtcaccgtggggaaatcatacagaaagaacacttattaaaaacattgcagtcttgcacattaaacaatgctttatgaaataaaatgcataattagctattggaaactagtttagtttatcacatcaatattaagtagttcatttaggttactccctttggttgaattggaagtgctctaagaaatgacatctactatttcatgttggtgaacttgccacaaacaaaggaaaatggctcagcatcagaatctgatgctagagcaactttcatttcagaatgatcacttctagattactaacatttaatcacattttaataacagagtaaaagaaagctttaaatgggaagctttaaaataggctattttctaattgtttgattcattttaatgccttttacttttttattaagtgcctaaatggccagagatgaaatcatccataattactgcagtgaaacattattatcattctttcttttattttaatgggtgtaaatacagatcagttctttttattttttttctttccagtgtggtttaaaaaaaaaaaaagcaagtcatctttggtgcccaaagtgtttatctcaatatccttagaatttttgcatgcaaaggcaagatttcaaatgtgtgcaacatttcattaaatgaagtaaatggtaaatggtctaattctgataatgaagacaactgtctaagccaggttttcagattcagggaattaccatgcgaaactattaataggaaaataaatcttcaaatttctagatccaagtgaaatggtcttaaccacattttattgtttaaaatattttcagattttgtgttggagacaaatttttcctaaagaataacatgatcctttgccagacggactacgaggaaggtttaatgaaagaaggttatgcaccccaggttcgctgatctatcaacatcaccccattaagaatacaaagcactacattcttttatcttttttgctccacatgtacataagaattgacacaggaacctactgaatagcgtagatataggaaggcaggatggttatatggaataaaaggcggactgcatctgtatgtagtgaaattgccccagttcagagttgaatgtttattattaaagaaaaaagtaatgtacatatggctggatttttttgcttgctattcgtttttgtgtcacttggcatgagatgtttattttggactattgtatataatgtattgtaatatttgaagcacaaatgtaatacagttttattgtgttaccatttgtgttccatttgcttctttgtattgttgcatttagtacaatcagtgtttaaacttactgtatatttatgctttctgtatttaccagctattttaaatgagctgtaactttctagtaaagaattgaaaagcaaatctcactaatgatacacagatagataaagcaagtctatcaacattaaaaatactaaaaaataaagacacacacagagcattttagtgacatccactacttattgccgctatgagttagagtctatcagtgttcttgttataaccccctattttcagggggttaaaaatcagctttaaaaaaatacataaaaatttcatcttaaagcactttcattttataccaacgtgaaaagtgccatttttagaataactttaaagcttaacaggtttccttttaatatcctttttttgtgtgctctttacttacacaatggctttgttttgctttttcagccacaccccttatgtgaactagtgcctttgggtatcacgtaaaattttttccaaagggttactttaaaaatctgttaccacaattatgagatgatttttaagtgataaattaaacttcttcttgtataaattctgcccagatctctccacaagagctgagggtttcataactttatggcttaataaatgtatgacactgaaaagatttgagtgtgaatctactgaaatcactataatgcacattgaagctatgatggtatttgagtagtgaggttacttttgatcggagcaacataatgctcatagaatcttctagaagaagagaaacaaagggattgataaaatgctgagaactagtgattatatatttttctgtatttacctgacatttattttaatgttcaaaaagtaaacactttaagtttgatgtgttttactctctcattgttttaagtaattgccaactcagaatacatcattcttaggctgaaatttgtctttccattttttaaggtgaaatagtactaccttacgtgatagcatacaaagaagaaagctctagaaagagaaattatggagaatgattatttaaattacaattaaggaaatgagaatatgatcccctcttccgagttgcccacaaacttgcttctttgcttttgctccctgtaatagaactacttttcaacaaatctaattttgcacggcaccgttaaccatattttcactacagcaaacttagtgctatgggttttctttttctttgtttttttcttgatcacttgtataggaaacaatattttccagtgttatttgcatatatattttgtccttccaatatatgcattacagatgaaaattaaatgttatacctgaattcttgggttggggccaaaatattaagctgaaaataatgctggtgtggatttgttttaaaacaaagctttattatgaacatgcatgtgaatctggatattgcctcttatttttaagaaaatggttctgtgaaaagtgaatgatatgtatttttccaaatgcttcatggttaggagtcttcaagttccatgttccccagatttgagatatactaaagaaagaaattcaaaagtagctatttggggcccacaaaaataactattattttagccttagagccttacacttgtttcatgaagagaaaggacttgcataaccaaaataaacaaagcaagacaaattaaaaatatgtgggggagagatcagtgaaaagtggttttcttaatgcagccctgctggtccccattaacaattgcttgaaattcacatggatgtaaaattataattgtcaggatcttattcagatgatcttttaaggtttaactggttttgcttttgtttatctatatgtcaaaatacttgtaaattgggaacaaacttctctcagcttcttgaagttgttcaactatccttgccactggaagaccaaacaaggttttcactgctttttcttttacataatatgctgagaattatttcttatgctttttactacaaacaaaattactcacctggattaaagattaaggccttaatctgtttagattatctttaatctccatgaaatcgtgaaataagacaagaatagtgtttcagctgtaggccattttacagctaattgcccataaattgtagcatttattgacctgaagtactaagctaattgtcttgactactcaaagcccctgaattgttgtcaactttcccctttgtgttgtgtagccctaacgtcatttagcttgttgtctgatgcctccagtaggacacctccgatggagctttgatttctgagcagcgaaagctcccttcctaagatgcatctcgcataggctgcctatgatgaaggaccgtgcacctccactccaacagagtgctgagtttaaaagttgacctgtgtttgtaatttcactttcatcttgcttaataaatatctgctggattctttcattcacttttttacatttggatttatgtttttaataaaaggggtgttacacta

SEQ ID NO: 366 - DNA, 99034 bp, Homo sapiens
  source 1..99034: mol_type = genomic DNA; note = NC_000011.10:108008733-108107766 CUL5 [organism=Homo sapiens] [GeneID=8065] [chromosome=11]
agctgttgtaagcatttcaggacaatgcacctcccttaacaccgagtccgggatttggggcggggtgccggaaaacgccaggtcccgccagcagagggcacggtcccggcctcgctgcagcctcgggacccaccgaggcttccaggctcccacgctcgctcccgagcgcgtccccgccctcgcgtcacgtgacgtggccgcggaacctgagctgcggggcctaagccgagctaaattcgttgcaggtggccgcggcgggtgcaaccacaaaggctaatccgaaggagtcggggaggctcgtggagtcgatgcttcctcttccaagtcaggtcggctcccgttaccttctcagcattcgccgttccggtcttcctgagcgcgtgcatgaggtctttcgcgtggggaagctccggtgaccatgtaggggagaagagtgaggaagctcctggtgcttgggacgaggtcagcgctgtcggcgcgctgctccagcgcccaccacaccctggtgcgggccgacgggccctgggccctggtgggagctccggcctccggtcaaggcctggccgggagcgccacgaattctcgcgtcgtctcgcgagagtccaagttaaagaacatggcgacgtctaatctgttaaaggtaagaccctcactccagcttgggttttactgtgtggccgccgggttcggctctttgggaaaggcacggctcaggttcagctgcgaagtgtgggagtgttcaggggttgtccactggcagggaagccgcggtggcagccggcgagtaccggaacgcgggtctgtggccttggggtcgacaggctctggtggtcgctcccgccgactggccgctgggagaaaagcctggctgagcgctggcgaggagcgatgctttcaagggaccagctctggccgggagcgggagatgaatggtcgtgcggtgtcctgaccagctgggccgttagtactgttaggtctcagtttcttgtaaagcaatgtctaagacgcatcaaaggaaaaaccaagaaaatgctgcctaacaggtttcagtgactcgaccccccacttcttccatttctgttctcgttctgtctgcacgaaattccgagtcagaccagcagtgcctcccactccaccccccttcctcccttttctgcgtgttacaccttccctcctaattctcccattcttgagttcatctttttccttaggaaactgctttctaacccccacccagttacaggacacaaccagatgacaactgatgaagcgataccatcgttttagggcgcaggaaagttaccttgtcaaagacagtatttaaagttagttttatatagcaagggagatctaggcccacaggggcagattctccaccagttaaaaagtttggagaagaatgaggaagacttagaactagtctgttctgtgtatgtgtctgtagtagttaatcatttgccttaaaagtacggacagaaatgggggtagtgaatagctcagggaacataatattaatggcaaaaaccgcagtcacttttgcaccagcctaatacaaaggatgaaccacttcttcctgaggcctctcatgccttcaggcaatgtggatgaatactagaaaataatagaaaatatacaggaacctaaccatcatgtcttctttagaccactgatatttgattgtctaatagatgggactgtctcataaaatgaagaacaaattttactaagaggcagtactgtatatcaccttttaaaagggagaggggccctagaattagactccctgaatagccaccacttaaaagctgtatgactttgggcaagtttccttatgagtaggacagcattatcagtagcgcctgtatcataggaacattgtgaagattaaattagttaatatatctataatgcttaaaacagtgcctggcacttaattagtataatacaataaattactataactactccccctctttctttaagaaaactaattcggggaattgagtaacccatcccactctgcttttctcttttataatggtatagcaaatttctcatgctttacttcagaaagaaaatttgtgggctgggcacagtggctcactcctgtaatctcagctctttgagaggccaaggtgggaggattgttttagatacattaatttaatcttcacagtgttcctacaatataggtgctattgataattctgagttagaggttatagttaactatgatcacgccactgctctgtgagactctaaatgaaaaaagaaaaggaaagaaaatttgttttatttctgaagactcctattaatgcatctgtgtgtttacataaacagtatgctattaattgaaacgtgtttaagaagtaattttgtccgtgattctggaaaattttgacttgttgattacctggatataaagcaaggtctttttctcccgaaaaataactctcagaaaagagtaagtcactgttctacttacaaaacctcacaaaggattgtttggaggagaagctactttggtctatattagttaagtacttacctgtggaagctattttggttcatattagttaagtacttacctgtggaagctactttggttcatattagttaagtacttgtggaaattctgaatctacatccacagcacagacctgtgaatgggaaaactgcctgaatatacagaaaacggggtacttagggtttaggtttaaaagctcacaagaatttaaaaagtgttttaacttgaacatttacaaataaagggaaggtgataatattttgaaaaaaagtaagtgactcagtgactctagtgaactttcttgatgtgtaacttagaagttagaagccaatgtcataaaaaaaaccaccagcttttctttctttttaatttttttttttttggagggggacggagtctcgctctgttgccaggctggagttcagtggtgcgatcttggttcactgcaacttccgcctcccgggttcaagcgattcttctgcctcagcgtcccgagtagctgggactacaggcgcacgccaccacgcccagctaatttttgtatttttagtagagacagggtttcaccatgttggctaggatggtctccatctcttgacctcatgatccaccctcctcgacctctcaaagtgctgggattataggcgtgagccaccatgtctagctgcttttcttttttaatattggaatttgactctaataattttattgtctgtttaaagcaagtggactattgctggatcttagaagtctttcagctatgtaaagatttgtgtagcacattttgacatatacagttaactgcttaggggttttgtatctctgaaaacctttccatgtaactactttatctttgttgtttttccttacagagtgagtctgtagaacatttgtagggatctgatattataattttatcttctgttttagattactttgaacatgtaattgtgattgttccttttcttttgcaattatcatctgggcccttagtgctcatttttttcatttccagtttattgttccaccccaaacagcaattgtttaaaccttttcttgctgagcctcacccctcttaattcttagtacattactttacccagctatttgaagtgcccttaacttccttggtcgataccaaacatttttcttgtttctcctatgttcttctctgttccatgctacctcccaaattgtctcattctgcttgttctttttcagtcctcatcttccccccaggacttggtggtatgtcccctcttactttttttttttttttttcagtttcccttttttctcctatgcctataagaaagttcatatgtcgcgtcatataaacttttcttttttttggagatggagtttcgctcttgttgcccaggctggagtgcagtggtgtggatctccactcactgcaacctccgcctcccaggttcaagcaattctcctgcctcaacctcctgagtagctgggattacaggcacacgccaccacacccagcttatttttgtatttttagtagagacgggattttaccatattggccaggatggtctcaaactcctgacctcaagcgatccgcctacctcggccacccaaagtgttgggattacaggcgtgagccactgcactctgcctcctcatacaaacttgtactctgcctctgcctcaaacttctgtttctcactgtcacagttcttggaaaagcagcccccatttgctgcctttataattctttgccctttaacttaatgatatggcttactcttctctcccacccaattgtatagaacctgtcagtcataaaagtattagcaacctcctgattatcaaatgagattcttctctgataatatttatcctcttttctggtattattgctcatttcctctgcttctcttttggtttttatgacattccctccttggtcttctctctctcaaatcacgtttgtttttcactgacttccctcccctgtccccaatagaattatttctcaggattttatcttcagcccttttctatctttgtatatttttttctgggacagtcttaactcccatgatttcactatttttatctcttagctctgatctgagctctagatcaaaatgcagttctcaccatatcactttcctgttcagatacctttgatgattcaaattatttgagatctttccagctgggtcttctcctgataactagtattctctctctctgtctcttgtctctctctctcatacatgtgtgcgtacacactcctacttagctggttacttgttggctcactagcatgccagaggtcgtcatctccctaataactaactcttaactttcattctctctccttctgattggatctagtgagatggaggcacaagaaggcagtagtatataaccgaaccacaagataaatcaaactttaaactgaaatatgattcatactacttttctcagtggacttttttttatcctttaagaggaaagaaaatggaaatgtaaagcagtgattcagagtgtctatagaggccgggcatggtggctcatgcctgtaatcccagcactttgggaggatgaggtgagaggattacctgaggccgacctgggcaatgtagcaagaccctgtctctataaaacaacaacaataaaaagtgcctgtaaaagttattcattattaaaataactttattgacatccatatgcaaggtaccatggagaatgcaaagatatgtagaacaatgtccatgctctttgggaatttaccatatgctaaaggagagtaaaaggtactaatgatttatgataaggcaaaagtttcagatgtgttaccaactgctctatgctccctcacagattgaggaaataatttctggtgggatgatcagtgaaaattttatggagaaagtgttggagctggattttgaataaagtgttggagctggattttgaataatgggtaagctttttgtattggtaattaggagaaaatttggtaggaatctaggctagatcagtgtggctgcagtgtaagcagggctgcatgctgtgttagatattctatatgaatagtgttccttgggattgttgcagcatagaaacccagaatacagggaaacaacaagagggataggagtgaaagggaagtcgggtcagattacaaagggccttcagtgctaggcaaggggtttgaaataaagttctatagttactgaggaatatttgaaaaatatgtgggcagagatactctcaagccctcaatctatttttggcttttacacataaataaaagttattatattttctgtatatttataatctgcttgtgagattggccatggatgaggggcatttgtgccagtgacatcttgttcattgaaaccgtaaccatagcaggagtaattaagtctatgggaaatacatttattcattgaacgagaatttagtatttcctaattctaactagataatgatgaactaggcagacagctcctgcccttgtataatttacatttttgttgggaagagagacaataaacataaacagtgaaatacatactgtaagtcaagttgtgataggtactatgaataaaaacaaccagggtaaaagagagagtgctcggtgctcttattattattattatttttatttttatttttgagacggggtctcactctcttgcccaggctggagtgcagtggcacgatcttggctcactgcaacctccacctcctgggttcaagcaattctccttcctcagcctcccgagtagttgggattaccggtgaccaccaccatgctcggctgatttttgcatttttagtagagatggggtttcaccatgttggccaggctagtgttgaactcctgaccttaagtgatcctcccacctcagcctcccaaagtgctgggattacaggcatgagccatcacagctggcttatttttgataagatagtgagggaatgcctctgaggagataatagttgaggtaaaaccagaatgaagcaagggagcaagtcatgtacatatttagaagagttccttgtagagggaacagccagtgtgaaagcacagagtcaggatcatgcttggcaaggaatatggatgtgatacgaagatttgaatatcatcggtgaatgtggttaaggtgcataaccagagaattctttttaatatgtctagttaaacataaatgagaaccttattaagaacttgtcaatttttcattgggttgatagaaattgccctcttgaaacgtatatctaagagggacatgggccttagagcggccttcccctccttcagtgtactgtcctagagagatggttgcattcgacacagcctagggaggaaacaaatttcaagggtgtctgtgttggtcatgggtaggaatgggagagggaatagtggactaatcagtaactgtaaaactttgtgatacatgtaaatggtagaatctttcatgttctatgaaaataaatgattgaacaattaccataatctggaggtgatgtatgttaattaaaacttctaaaaggaagtggcagctcagggtaaattttgatcagtcatttttcagtagattagaggaggggaattttagactgctggaaggtagaaagaggatactaggcatctttctagtaaaaagagaggttttgtttttgtttttgtttgttttgagaggaggtctcactctcacacaagctgcagtgcagtggcatgatcatggctcactgcagtcttgatctcccaggatcaagcgatcctcccactttagcctcctgagtggctgagactacaggcacataccaccctaggtctggctaattttttatagagatgggatctcaccatattgcccagactggtctccactcctgagctccagtgatcttcctgcgtaggcctcccaaagtgctgggattacaggaatgagcaaaagagctagtcagccagagaggtttttcttttctcttctcttctcttctcgtcttctcttctcttctcttttcttttctgttgagacagggtctcactctgtcccccagtctggagtacagtggcgcagtcacagctccctacagccttgacctcctcaggctcaggtaatcctcccacctcatcctcccacaggtgcaacaccagcattcccagctcatttaaaaaaatgtttagagacagggttttgccatgttgtccaggctagtctggaattcctgggctcaagcaatctgccctgtccttccaaagtgctgggattactggcgtgagctaccacccctacttgaggtttctcttaataaatattttgcttagtgtcctggtgaacccagttgtcagtaagagccatttgcctcctgccttggttagtaggtggaggaaatagatgcctcatatgctctgtaaggaaagcagggctgggtgcagtaactcacacctgtaatcccagtgatttgggaggccaaggtgagagtattgcttgaggccaggagtttgataccagcctgggcaaccccatttgtacaaaaacaaacaaaaaaaaacaaacaaaaagcaggatacagctcaggttaaaactttggtcagaggctggatgcagtggctcatgcccaacactttggaaagcagaggcaggaggatcatttgaggccaggagttggagactagattgggcagcatagcaagacctaccacctctacaaaaataaaaattagaaaacattggtcaaatccatggagtacatacaaataatatcaaaggtaattgatctgtgtagctgtggtttgttcattccataaaaatctgagcatttatgctgtactggataccattttaaatttcaggctgggcacagtggctcacacctgtaatccaagcactttgggagattgaggtgggtggattacctgagcccaggaattttagcccaccctgaacagcatggtgaaactcgtctctacaaaaaataaaaaataaatacctgggggtggtggtgtacggttttagttctagctactcaggaagctgagttgggaggcttgcttgagcccaggaggttgaggctgcagtgaattgagatcgcaccactgcactccagactgggcgacaaagcaagaccctgtctcaaaaaaaaaaaaaaaaaaaaagtatcagtgatacaatagtgaatatgacaaagttcttagactttggggcttatatcctgatggatgaatactgacactaaagacataaagaatacacttgcatagtttttactggtaattagggcggtagcgaaaacaacgtgataagaatgttcaaggccggatgcggaggctcacgcctgtaattgcagcactttgagaagcccaggtgggaagatcgcttgagcccaggagttcaagaccagtctgggcaacatagtaagacctcatctctacaaaaaatttaataattatccaggcatgttagtgcatgcctgtaatctcagctacatgggaggctgaggcaggaggattgcttgagcacagatcaaggctgcagtgagcaatgtttatgctgctgcactctagcctggacgacagagtgagaccctgtctcaaaaaaaaaaagtgttcggaaggtggagccactattttactcacttatttacaacagaaaataatttttccccaaaaaactgcttttgactattttttgttgaatgttctttttcttcctcatgttgacatttcagccagatcctatagctttcctgggcttttcttaaaagtctggttattccaaattaaaatttcagtctcatagccaatcagagtgtctcttgtaccatctcaagactttgtctctggatgtgcagagaggaatggaggaagggcatttttcttaggttggtttgggaggcctgaggtggcattggagctgagacctgaatgatctgcattctaaggcaaaggtcttgaggtgcagtgatgagcttggcctgtttgaggaacacctttaaaaggttgctgtggctggaacatagaattgcagtagtaagaattactggtattcaaatatatacaatcagccctcagtattcatgagttccatgtctgtggattcaaccaaccaaagattaaaaatactcagaaaaggctgggggtgatggcgcatgcctataatcccagcactttgggaggctgaggcaggcggatcatgtgaggtcaggagttcaagaccatcctggccaacatggtgaaaccccatctctactaaaaaaaaaaaaatacaaaaattagctgagtgtggtggcacatgccagtagtcccagctacgcaggaggctgaggcaggagaatcacttgaacccacgaggcagaggttgcagggagccgagatcacgccattgcactccagcctgggtgacggagtgagactgtgtcttaaaaaaaaaagagagagagaaacatcacatatatgcacttaatgtggcacccgcacacatttatttttattaagccacctcacttttgttgagataagaaagattttatgaatcccctatagatgcaagtagtgtacttgcaatgtaacaatggttatgagctcagcctctgcagccacactgcttgggttggcctccaggttctgccatttgctagctgtgtggtattgggcaagttacttaacatctctgtgcctcagtttctatatctataaatagcagtgatctcaaaaaaacctcagaaaaaaattgcgtctgtattgaatatgtacagacctttttttcttataattccctaaacagtacagtatagcagctgttagcatttacattatagtaggtattgtaagtaatttagagatggtttaaagtgtatgggaggatgtgcatgggtaataagcaaatgctatgccattttctatcaaggacttgaacatgtatgggttttggtatcccgatgggtgggggtgggggtggggtggggtggatcctggaatcatttccccacagataccaagggacaactgtacagtagtttgattcttttggttagtggggattggcaaatggggttttaaaatcacataactgggagcaatagtggcttcataaacagtaagggaacccacacattcaaataactaacctcataattcacatgaattatctaaaatacgacaactgagttcctttggtaaagttattagagtgccattaattggatatacagtcatttactgcatattgatgttttggtcaacaacggatcacatatataatggtggtcttataggattataatgggagctaaaaaattcctattgtctggcaatgtttattgtagcccttgtaacgtagtagtgcaataacacatcactcgtgtctgtggcgatgctggtgtacataaaactattgtgctgtcactcttataaaagtctagcacatataattgtatacagtacataatccttggataataggataataaaattattatcctaataataataagtgactgtgttactggtttatgtatatcttagtccatttgtgttgctataaaggaatacctgagactgggtaatttataaagaaaaggtttatttggcccacagttctgtaggctggtgaggtcctcagcctgcttctactcatggcagaaggtgaaagggatcctgtgtgtgtagagatcacacggcaagaaaggaagcaagagagtggggagaggtaccaggctctttttaacaaccaactctcagggaactaacagtgagaactcactcactgctcaccaccctgcccccacccccactggcattcatctgtacatgagggatccaccaccatgacccaacacttttcattaggcccacttacaacattggggatcaaatttcaacatgaggcttggtggacaaacatccaaactgtagcagtacatttactgttatatacttgtttttgtttttagtgtgtgtaccctctaataaatttaaaagttaactgtaaaatagcctcagtcaggtcctttaggaggcattccagaagaaggcgttgttaccataggagatgacagccccattcaggttagcgttcccgaagactttccagtgggacaagatgtgaaggttgaagacagtgatgatgatcctgaccctgtggaggcctaggctagtgtgtatgtgtgtcttagtttttaatgaaaaagattgagaataaaaaacctttttttaatagaaaagtttatagaataaggatataaagaaagtaaatatgtttgtgcagctgaatgtgtttgtgatttttttttttttgttttttgtttaaaatagagacagggtctcaccacgttgcccaggctggtctcaaactcctgagctcaagtgatctttgcacctcagcctcccagagggctaggattagaggcgtgagccactgtgcctggccttgtgtttgtgtttcacgataagtgttatttacaaaaaagtcaaagtttcccaaaaagaggaaaggtttttaaagtaaaaaagttacaatgagcttatattaatttattattgaagaaaaatatttttggataatttagcatagcctaagtgtttataaagtgtacagtaatgtcctagaccttcacattcactcactactcactcactgactcacctagagcatcttccagtcctgcaggctccattcatggtgagtgcccaatttaggtctaccattttttatctttcatactgtatttttactgtaccttttctatgtttagatacacaaattcttaccactttgtcctaattgcctccagcttcagtacagttacatgctatataggttggtagcctaggataatagactataccatttagcctaagtgtatagtaagtagtctctaccattagatttgtgtaagtacatgctgttattttcacacaacgatgaaattgcttaacgatgcatttctcagaatgtcattaagtgacacatggctctaatccacaatcagtatggcgggaacttcacaaatcttaaaacaactaaactggttgtgtggtgttcaaaatgttatgggcgtgtaaaagtaaggtgataaaaaaattgccattaattctatggatgccattatttcttgctcttccttcagcttgtcttttcatcttagcttttcttacacctttgtcctaagcaagatgtagcaagatatacagcaataataacaaattctttgtttccttgtattatttttaaattttattcattttttagagacagggtcttactctgtcactcagactggagtgcagtgggattatcataggtcactgcagccttgaattcccgagcttaagcagtgctcttgcctcaacctctggagtagctgttgggactactggtgtgcaccaccacacccagttaatattttattttattttttattattttattttattttgtttttgtagagatggggtctcaccatgttgcccaggctagtttcaaactcgtggcctcaagtgattgtcctgccttgacctcccacagtaatgggattataggcatgagccacaccgcccagtttatttatttatttttcagagacagggtctcactttgttcctcaggctggaatgcagtggcatgatcatagctcactgcagcctcgaactcctgggcccaagcagttgtcccgcctcagcctctggagtagctaggactgcaagtgtgccccaccatgcccatctatctatctgtatctatctacctatctatccatcgatccatccattcttagagatggggtctttctttgatgcccaggctggtcttgaaatcctagcctcaagtgatcctcccaccgtgctggaattataggcatgagccctctctgttttcttttaaatgcaacatttgacatcattaaaatattgccataatattgtttctataatttgatgtggtatgttttgtcccaggcgttatgtagggatttctgggtgttttcggggcgaaccagtaggtcaacatttgtattattttgttgtaaagtaagtgaattatttaaaaatgattctattgaatcattttgcaagccagtggatttttctatttttgtttacattcttgtgtttaaacatttttattttttaacatgataacaaatactgtatttctacaccattatatatctgctcctttactcatgacctagtaaagtgggattgttacagatacgctaattgcttgaaaatgcactcctaaatttcagtgggggatatgcattttttttaagcagtgatatgttctagaaagatctatgtaacatcttatatttctggctgataacacttacccccagcccaaacacattttctttttcctaagccaattaacacaggacccaaacgcatttttaaaaattaagttattcttctgtaatccaccctccctccttggtctgggcaaatgatggtacagtatttaggcctgaagccttagctgtgtgcttttgagatataaattttttaactttctctgagccggtggttcaagactacagtgagcagtgatggtgccactgcactccagcctaggtgacagcaagaccccatctctaaaaaaaagtcaattataaaattgagttgttttgcttttcttatggactttttagttctttacatattctggatgagagcctttcttggatatacatattagaaatatcctttcctggcccagcgtggtggctcacgcctgtaatcctagcactttgggaggccaaggcaggtggatcacctgaggtcaggagttcgagaccagcctaaccaacatggtgaaaccccacctctactaaaaaaaatagccgggcatggtggcacatgcctgtaatcccagctacctgggaggctgaggcaggagaatgagaatcacttgaaccagggaggcagaggttgtagtgagccacgatcttgccattgcactccagcctgggcaacaaacaaaactctgtatcaaaaacaaaacaaacaaaaaaaacgcagtatcttctccactctgtgggctgccttttcactccctgaatggtgtcttttaatggctaaagttaattttaatacagtgcaatttatacatttttttccctttatggttaatgcttggttttaaggtcatatgagtagttcagatttctacttgtattaatattttgttagatttttaaaaacgaaaacaaaattttaaaattccttttatagattgagtcttaagaatgtatcctgggtgtctggttgaagttgttgtttgaaaaaagaaaaaaaacaaagaatatatcctgggacccttcgggagtccatgtactacagtttaaggaacactatactagaatgtgaattgcttgaggacttttcatttatgtgccccaatgcacagtagagtctcagatgtttgttcaatgaataaatgtaataaatgacaagctccccaaaataagtttaaactcttctgtcagttttattattcttgctttttccttaaaattatttgtttgggtttcaaaaaatacaagtattgctagaatttgtttgaaatttttttcttttataaaaggaacctaaaagtttaaacagagtgtggtatgaaattttttatttcagtggaaagagatatttaacttcttggaaaacagtgtcctcttcctcctcctccaccatgtttgaaaagaaatgtcttttacgtagtgatgtttccgccgtatggtttctagataattgtcactaaatttttataatcatagatctttgcagtttactctctaagcctgatgaaattaagccaagggctggatctggcccatggattagaagcccattcattccttatccaggaaaggaccagagaatagttaattaagaatgtggctttaacagagctaaactgcttggatttgatttcctgccctgccacttactgcctataatttttgacaaataatctaacttaatctcaggttgtacagtgtgcataaaatgggaataggccaggcacagtgatcatgcctgtaatcctagcagtttgggaggctgaggcaggagggccacttgatcacttgaggccaagagtttgaacatgcagtgagctatgattatgccactgcactcttgcctaggcaacagagcaaaatcttgtctcaaaaaataataataataataataaaggaataatatcactgaacacataggatagttgtgaagattaattcatacttgtaaagtgtttggaacagtacagcacctaacatgtaacagtcagatattataaagtaaaataatcacagtgattcagtgatttacacatctacgctgaagattatagtgaagttaatagaagatacaaatgctgaactaaaatttatttacagatgtcagatattcaaaccattcgtggaaatgtaaggaaaatcaaaagaagtcttttgtacaacagataccacattacaaaatttgttggcctttataatccccaattagtgaaatgccatatatttgcaataaaaaaaaatagtagaaaatcttggagtggaatgattaaacaaagacagtagaaatgagaaatttttgctaaattccatccttccataatctcaatttcaagcatcctacttgattacctgttaccaccctgtctttctgactctctctagtgcttttattccaacagtccacctccactactaaagccttcagttcagtgactctgctacctcattgtttaatgtcttatatctgtggtttatagtttttatcaaattagaaaacatttttgcatttttcttcaaatactctctacacccttacatcaagattccaattatgtgtacgttaggtcatttgatgttccacagcttactgatactcatttaaaaaatatttctatgatgttcatgccatcccatacctttttggtcatatagaatatgtatagtagctgacttaatgtccttgtttactgaatgtaacacctgtgtcatttctgggtcagcttcttttggtgattttttttgtcttggtgatagtttatattttcctgtttctttgcatgcttggtagtttttaactggatgtcagacattgtgagtatatgttttaggggcttgattttaaaatttttctctaaatagttttggatttggctgtgatgcagttaggtaacttggaatcagtttgatccttttgaagcttacctttaagtttcgttagagtgtgtccagaatatcactcggggtagggctactttggctccactatagactcaataactttctgtggactctacccaatgcctggcactttaaagggtgtttccactctggctggtagcaacactaactgtttctggccctgtgtgcactctgctgattgttctgcccattcccattccttcctaatggttctttccccagtctcttacagttttctcacacccaggtacaggttagtactcagccacaggcctcagggaccttctgtatagatacccagagctcccttgatgccacaaattctagtcacctcagccttttcaaactctgaactctgcctcttaaatgtagtgaaacccctagcggctgtttgggtttcccctccttgtgatgaggcctggagacactctctaggcagtatgtttggacatttgtagcgctcacctcatttgtttttcttttctcaggaagcgctgtcctgcactgcttttggttttctagtttgtttaggcaggagggaaaatctggttcctgttattctgtcatgatgggaagcagaagtctctttctcttttcaccttgaagtccattttctccgccttacccaacataaattctcttctcaatcattatagttgttcccttcaatacactttttgcttccttgcccctgtcttgttctgcttgggaaaagtgtacaaccctggttaaatctgtctcttcacttttcagtgccagtacctgtgcagctgaatgtcactcgagaaaaagacacaaccgtgctatttgcaccttaaatccatgaccacaatgaggccagtcatactgcatttccagagtcacttattcttccactttcctagatgtatttttcacatcttttctgtcaacattctaacatttcctccccgatcttctcagacattgtcgttatttccacatcactgggaaattaaagcaataaaatatgaacttctcagagtcgtacgacatctatccttgtaccagcacctacatgtacattcttttgccttctcctcttagcctgtagtcacttcctccacatatgcgctagatcccattccctcttgcctatccagtgcaatttaaattcactagcagtttctctccctttccccacatcatcaacatttcatatcctggaatgttcctgtcagcatacaatcatactgtatcctagctttaaaaaattatttggccaggcgcagtggctcacgtttgtaatcccagcactttgggaggctgaggtgggcggatcacgaggtcaggagttcgagaccaccctggccaatgtggcgaaaccccatctctactaaaaatagaaaaattggctgggcatggtggcgggcacctgtattcccagctactcgggaggctgaggcaggaaaaccacttgaacttgggaggcggaggttgcagtgagcagagatcacgccactgcactccagcctgaaagacagagtgagactccgtctcaaaaaaaaaaaaaaaaaaattattattttttcacttcctctcaccctatcaattaccatgccatttctttactctcttatacaggaaaaattgtgaagggttgtctgtactctttctagttttcttcttatttatttttgtttttatttactatttgttttttgagatagggtctcactgtcgctgtcgcctaggctggagtgcagtggcgccatcatggctcactgcaacctccgcctccaggccttagtagctgggattataggcgccaccatgcccagctaattttttttttttttctttgagacagtctccccctgctgtccaggctggagtgcagtggcacaatcttggctcactgcaaactccgcctcccaggttcaagcaattctcccacctcagcctcctgagtagccgggattactggggcctaccaccacacccagctgatttttgtattttcagtagagacagggtttcaccatgtaggtcaggctggtctcgaactcctgatgtcaagtcatccacccaccccggcctcccaaagtgctgggattacatgtgtgagccaccgtgcccagccaaattttttgtatttttagtagagacaggctttttccatgttgcccaggctggtctcgaactcctgggctcaagtgacccgcccgcctcagcctcccagtgttgggattacaagcatgaactattgcgcctggctcctcgtttctcttaattccactcttcattccactctaatctggtatttgtccttactactctgcaaaaacttctgtggacaaagtttcagtaacttccatattgctgtttcagtggttatcttacctgatctgtcaggagaaattcttaaaattgattattctgtctttctgacacactttatttactttttgtccagaataccatactcttggttttcttgccacctgtgctctggttgctctctttgtctcctttgctagttcttactcctctctccgcctcttaatgttggatatctaaaacctcaggcttgggtctccatctttatgtatcacttctctcacagtgatctcatccaataacaggttttaaaacccatctgtattctgatgacttcaagtttttattttctgataggccttttaaattctagatttccatattggactgcctattcaacattttcatatgaatgtataatagatatgttaaatgtaatacatctaaaaccagtctcacaagctttccttaataagcctgtcaaatcttcttttattctagttgatggtagtgccacacttactggacaaaagccttaaagtcatgctttactcccattttctcatatctcagatgcttactgttaggaagtcctgttagtaccaccttttgggcatctaaaattgaaccacttctcatacctcctacctccattgctatcacctcagtccaagtcaccatcagtgcttcctaatcctacacccagttttaacccttgccccttataatatattctcaacatagtaatgagggagattttaaaatgtaaataagattatgacacttcaggccaggtgcggtggatcacacctgtaatcacagcactttcggaggccgaagcgggcggatcacaaggtcacgagttagagaccagcctggccgacatggtgaaaccccgtctctactaaaatacaaaaattagctgagcgtggtggtgcacacctgtaatcccagctagggcaggagaattgcttgaacccaggaggcagaggttgcagtgagccgagatcgccccattgtactccagcctgggcagtagagtaagactccatctcaaaaaaaataaaaaataaaaaagattatgacacttcttgctcagaatcttttaatggctcttcatctcacttatagtagaaaccaaagtctttataatggccttcagggtcctacaagatccagctcagtaagatccagtaagctaagttacttctatgaccttatctgctctctccactttgtttactttgctctaccttgaatacattaagcatgtttctatcttatgttctttgcattggctgctttctctgcctagaataccctttttccaggtattcccccattgtcaactccctgttggcttccccacggcccatttgtgtgagaagaagagtgcctgtgaagggattagttgtgctgtaaggagtgaaggatagaatacctttttccaggtattcccccattgtcaactccctgttggcttccccacggcccatttgtgtgagaagaagagtgcctgtgaagggattagttgtgctgtaaggagtgaaggatagaggggcaggagtatggcaaatgttgtagttctctgaagagccagtgaatgagagaattgtagacctactagcaactgttgagtccagcttatttgctattctgaatagtaatgaaagaattcaagaggctttgtagcaagttaatagagatgaggcagccttcagtcagtcagtgaaaacgtacataaatcaaggttcatagtctgaagattctttttcttattaataaggcattctgttttgtagatagtggatttggtgtcctgccacttagttatgatttaatgatatgctcttcagtttaatagagaataggtcaaggaactacttgagcatcatttttggaatctattataaaagtttaatagaaaacaattaattattaaattccttttaaaattgagtattagggaaacgtgtttattatgtgttccatcaaaaaggagagcaaaaatatgtttcctggtacttaacaatgtctattaggagatttcagagcctaaccagtgtttaatttatctccagtacctgtctactctggtactctgcaccttttatttttaattgcaggacttacactatatttaattttataaattagcaaaagtgcttgtggaaatagacttaattgaaattagaaagtatcctcttgttaagaaggtattcttttttccatgtcagtcaagaaaagtgttctttctatggttctttcatatttgtttatttgcacacctcttcctcatagggaagaataaaagaagaaaatgagagttacaggaaaataataaaaagtagaaaaagtaatgtgaggccaggcataaagttattgtacaaagtatatgccgcagcatcacaattctgactctgaatttcccagtagccaacactaagaggagtgcgaagttacttacgtgattcatttaagtccataaggtaaaaagaaactagttgttcaggagagaagcgtagctaatcccagtactaagtttttagtggatatctcccatgggtccttatgataagaatacagtggctgggtgcggtggctcacgcctgtaatcctagcactttgggaggctgacgtgggcagatcacctgaggtcgggagtttgagaccagcctgatgaacacagagaaaccccgtctctacaaaaaatacaaaattagccaggcttggtggcgcatgcctttaatcccagttactcgggaagctgaggcaggagaatcgcttgaacccgggaggcggaggttgcggtgagctgagatcgtgccaccgcgctccagcttgggcaacaagagtgaaactctgtctcaaaaacaaaaagaaaaaagaatacagtgtgatagaagcaggcatctggagcaagacagtatattaacttttaggatgaactatgttcgtgaatataagcaggatttataagagtatgatgttaatttgtggttcttaacctagtttgggtcatagaccatctaacattatttttatgtaattttatcatgaatttgataaacatgcagattgtggactaacttcaagagattccgatccagtaggcctgaggtaggttttaggaatctgtatgtgtaatcaccacctcagatgattttcacgtaggttgttgtcagatcatatgttgacaaactgtttcagtgttataatttcagggagtttgcatattccatacaatcactgtatgcatctcaggttcttaacctgagcaatatcaacagatttgtataactgaaaaataatcatgagtctgggcctggtggctcatgcctgtaattctagcactttggaaggctgaggagggtggatcatatgaatccaggagttcgagaccagcctgggcaacatggcgaaaccccgtctctactgaaaatacaaaaattagccaggtgtggtggtgcgtgtctaatctcagctactcggaggctgaggcatgaaaatcacctgaccctgggaggtagaggctatagtgagccaagattatgccactgcactccagcctgggcaacagaacgagactctgtctcaaaaaaaaaaaaaaaatcatgagtttcatagggtgtttggtgctggtgtactagaaagttaggttttacatttaagtctttaatccatcttgagttaatttttgcatatggtataagaaaggggtctggttttacttttctgcatatggctagccagttatcccagcaccatttattgaacagggagtcctttctcttttgcttttgtcaggtttgttgaagatcagatagttgtaggtgtgtggtcttatttctgggctctattctgttccattggtctttgtatatgttcttatatcagtaccatgatgttttttggttactacagtgctgtcgtataaagacacatgcacacatatgttcatcacagcactgttcactctaacaaagacgtgaaatcacccccaatgcccatcaatgatagactggataaagaaaatgtggtacatatacaccatggaatactatgcagccataaaaaagaacaagatcatgtcctttgcagggacatggatggagctggaggccattttccttagcaaactaatgcaggaacagaaaaccaaatattgcatgttctcacttataagtgggagctaaatgatgagaacacatgaacacataaaggggaacaacacacactggggcctaccagagggtgaagggtgggaggagggagaggatcaggaaaaataactaattgcttaatcctggataatgaaataatctgtacaacaaatccccatgacacaagtttacctttgtaacaaacctgcacatcctacacatgtaccccaaacttaaaagttaaagaaaatcgtgacttttgttgaaatttactggccaaaacaaaccagatggtcctagttcagtggcttactgctataacctcagcattttgggagactcaggtgagtgcatcagttgagcccaggagttcaagaccagcctgggaaatataacaagaccccatctctacaaaaaaatacaacaattagctgggcatggtggtgcgcacgtgtagtcccagctacttgggaggatcaggcaggagaattgcttgagcccaggggatcaaggctacagttagctatgatcactccactgccctccagcctgggtgacagagcaagaccctgtcttaaaaacaaacaaaaaacaaatcacatggtcacatttaacttgaaaaggagtactaatgactaacacatatggggtctctctctctctctctctctgtttttggcaatgtaattgatcattatttttcctaatattgcactacttttacattccagagataaactgtatgattatgaggtctgattgttttgatatgacacttgtttgatttgataatatttatttagatttttgcatctttgttctctggtaagattggcctggagtttccatttcttacgcttttctcagcagttcagtgtcagggttttttgttagcattataaaaggagatgagtatttttctgttttttttttctcctcagttttcagagtttacatagatttccaatatactttttgtgagtttaggacaactacaaaattagatgatacagtctccatataagactattctcacttctgacaccaactgtaagcttgggggattcccaaaaccactctcaggtttgataattcattagaaaggctcatagcatttagtgaaagctgttgtacccatagttatgatttgttatagggaaaggattcagataaaatcagccaaaggaagagactcatagggctaagtttaggagagttccaaatgcgagcttatcttgccctctccccatgtggtcaggacacatttctctcccggcatcaatgtatgacagtatgcacgagtaccatcaaatagggaagctcacccaacctttactgttgagttttgatggagcttattcacataggtgtgattgattacttgctcacagggatttcagtctccgtgttgagtgaccccctgtgaccccaaacccgtatctcaagttgtattgttcgtcttcccagttggtgagcctctacataggattatataggtgtggacagtcccctccctgaattgcattattagccaatccagtatgacccaaggcctcccaaagacatactttttagacgtaactttctaagtgtccagagattatctactagaagccaagaagaaagaccagactgtctccttggacaaggccaaattcttcactaaacacatttgtacaatttttctcttttatgattgtcttcctgtgattcctcaataacggattaagcctgtagggattccattatggaaaactggttcatttaaatttgagcccttcatttctctagctgtctcataaaaattacaggatactttttatttaactgcatttaaattaaactcccttttatctttttttttttcaagaataaaggttctcttcagtttgaagacaaatgggattttatgcgcccgattgttttgaagcttttacgccaggaatctgttacaaaacagcagtggtttgatctgttttcgtaagtaccccactaattctgtttgctagcataaaggaaattttagtgatgtctttccatacccaaatggaatgtgtaactctaagtttatctgtttacctattaaaaagtattactagttacattgagggtctccaagacctctcccaggtatgatgatttgctagggggctcacaggactgaacatacaatcatactcacagctttgagtcattacagtgaagggatccaaagcaaaatcagcaaagggaaaaggtacatggggtgaagtgcaggaaaaaacaagcacatgcttccaagaagagtcctttcccaggggagtcacacaggacacacttaatttttccagcaatgattgacagcgtgtgatatgttgtctaccagagaagcttattggagactcagtactcaggatttttatgggggctggtcacataggcagtctctctcaacatgtaccaaaatcagtgtaaaccatattgtttatataaacagtttaggtacagtgagccactgttatttcaggaaagtgtaggaaactgttgaccattcaagttctcagatgccagccaaaggctaatcttacaagcaggcatttctaggggatgcagtctcaggggtgctggtagttggtgctgttaggtatgattgtaagttcagcagtcaggttgaattaaaaggactcatggcagcttggaaagggaaccctgagagatttcctttaggaaaagggggaaagctttcaggactagttgtgaaaagcaaaaatcattaatgtcctcctcctccgctgtctcttcccagctgctgtgttttgttttttcttcctaataaaatcagtgtatccctttcagtaatgaaaatttcatgtcttctcaatcatccagacctgcatgagggacaaaagtctttttcactaaaaaacatttttagacaacttaattagaaagacatattatatttaggaattggtcaggatgaaatcctgaatttttaaaacttttcaaaatgggcttatgttatctcccaccccttttgtcctgatcatttatctagtgggtagcctagaaaacatcagttcctttctggggacagctgcatttaataaccagactgacttactgaggtgtgtgtgtaccaggaggggtgacaggaaagagagaactagagtcaggttattaaatctgttgttgcaaactgtaaccaatccagaaaggcaaacacaagtcagtagcagtgagacatctcaagaaggggtcaaaatctaatctgtaagaagtgggcgaaggggctacactctttgtgatgtgccccctcccaactacagcttttggtaggaaccaccagttgggaatactgttaatctccatatcagatacataagaccaatcagcagcttgattttggatagtcccatcagagaataagcctttttctttggttatctgtgagtggttgaggtggtccagccagaatccatgatgttttcatagtttctggctccacaggaggatatcttttaaatattcagtaatctttgacggccagacaaagtggcttacgcctgtaatcccagaactttgggaggccaagacagggtgatcgcttgagcccaggagttcaagaccagcctgggcaacatagtgtgagaccctgtctcttaaaaaaaaaaaaaaaaattatctgggtgtggtggcacatgcctgtagtcccatctaattgggagctgaggtgggaggattgcttgagccctcaagcagattgcttgctgcattgaggctgcagcaagccgtgactgtgccactacactccaggctgggtgacagcaagaccttgtctcaaaaaaaaaaaaaaattgaggcaaagtcctgtttattgagtatatgcctgcttttggttcagcacagcttgtgttgaggttgaaatagcccagtagcagagtgtcaggtttcagcctagcctcagatccaggtaattgagatctgtgatttcaggattccaaaacagttagtgtcttgtctttggcagcagtaaagccaagatactgcaggctcgcagccatatttcaagtccgagtgatcagcgagactgtcctaagtcctttttaccttgtcttaggatccaacttgatctgctcaaaaatatgcacatcaggctggaaaatcatcagcttctaagggtcagacatctaatttcacaagaattcaatagcaatgaaaaactgcatttaaaattccaaaagtgtatttcttccatctggagatttcgtttgttttcatgttgtctctctttttccagggtcatcagtagttaaaaaagtcatagtaaatatcatccattgtggagatttattctgctcccaatactcagagagtttaaattccagtcccttcagcagaaaaaagcaagaaattttgtctcactaactcttcctgattgggacaatccctctagcatttatgaaatgactagcagcatattacatattatgtcagttttgattatacatctagatgcaatagctgcaaagtacaaagtcatctttcaaccccccactttactttaaatttatttatttattattgagacagagtcttgctttgttgcccaggctggaatgcagtggcacaatctcagctcactgcaacctccacctcccaggttcaagtgatactcctgccttgcctcttgagtagctgggactacaggtacccaccactgtgccaggctaatttttgtattttcattagagacaggttttcaccatgttggccgggatggtctcgaactcttgacctcaaagttacctgcccaccttggcctcccaaagtgttgggattacaggcgtgagccacggtgcccagccatccttattccttattttaaatttaatcaacccccagcagtaaattcagtgtttataagagtaacacattacagctgctgggaaatcctgactggaatgcaaggtgtagggaggaactgcaggcagcagcagctagtctgaagaaacagctggagtggttcactctccccactcctgtttctcccctagtttatctaaagctttgctccagccctgggctctgatcttgctattattttttcctatttagaggagagagcatacaaacttttaacatttttggtccacccaaaactcacctttgggaacttttgggcctcttcccacctggaggcaagaaaaaaaaaacaaaaacagagacatcatccagactctgttttttctctcttcactttagtcagcatggccagaaactgccaggggaatgaggtagccaattttcctggtttagagctatcattttcaaatttcataggtaatttttacctgtcacaacagacagaagctcagctgctgtttcatactgtgaatgattttatagccacccaagcagcaaatgtttgtcatcctactgcttcttccctcttcatgagtccaacttctaacaccagctgtgttggcaatcccaaggtcacccctaggctcagtgattgctgggagtattcatgggacttaccatgtagttgtattcatggctatgaattattacagtgaaggaagcaaagcaaaatcaacaaagggaaaaagtgtgtgtggcaaagtccaggagaaacgaaatccaaacttccaaatgtcttctcgcagaggagtcacacattaagcttaatcctccagcaactgacagtgacaacacatataaaatattgtctaccagggaagctaattaggggctcagcacccaaactttctactgggggctcgtcatgtaagcagcttctgcctggcacataccaaaattcgagactggcagaagaaaaggaagtgttcaacgtaagtcacactgtttgtgtaaacagtttggaaatgtaaaacattctcattaaggaatgatgggaatcctcccaaaaatccaaattgccacatcctagccaaaggccagtcttgcacacgggtctgtcttaggatagcagtctcagacacactattaaaatgctgtatcaatgaattatagatgtataattgcataagctgtacacattgggctattgtaatcgttttctctctttatcacttaaaatattctaatttccgaaatgatgtaggaccttgctgcatactatcaattaacttatacttcttgcctttgggaaattaaagtttagtaagaaacagctgaggccttttaaagctttattacattcatgtatacatatattttttgtaaattattcaattaaactattttatgaatgatatgttgggtgtggtggggtgttttgttgttaatgttgtttttgccagtctgtgttgataagatttattattgagaatagtgcttgttctctgagtactcctgacttagaaaaggagcatagccctactaaaggggacttcaaagtagaaatcgtcaataaccttttacttgctacagttagtggcctcaacatgatgtttttaaagatcttttggccaggtgtggtggctcacacctgtaatcccagcactttgggaggctgaggtgggtggattacctgaggtcaggagttcgagaccagcctggccaacatgtctactaaaaatacaaaaattacctgagtgcggtggtgggcctcagtaattccagctacttgggaggctgaggcaggataatcacttgaatccggcaggcagaggttgcagtgagccaagattgcaccattccactccagcctgggaaacaagagcaaaactccatctcagaaaaaaaaaaaaaaaagatctttcatctccttggagtacctaaagcagttcagtgtatcgtccttttaggtaaagggatttctgactgacaataattaaaacccttgtaaattttagccatattttggccatgttaatcgttaacatttaggttgcttatatctttctaaatcttagttactaaataatgtattgatgttaaggtacattgactgagattttccccccttttctcctaatctatattctttctctattgaagtactcttggtattttgggtggtataagagattgttctgcatgttgtgcaatatttatcacttctgtccttcactcttttttttttttctttttaaattgagatagagtttcattcttgttgcccaggctggagtgcaatggcgcaatctcggctcactgcaacctctgcctcccaggttcaagcaattctcttgcttcagcctcccaagtagctgggattacaggcatgcaccaccacacctggctaattttttgtatttagtagagatggggtttcttcatgttgatcagactggtcttgaactgctgacctcaggtgatccactcaccttggcctcccaaagtgctgggattacaggcatgagccactgtgcccggcctgtccatgcttatgaactccagtcatgaacactccttctgtgtctttctcctcacccttctgtgtctttctccccaccttgcattataaaaacaaagattctcacatgtttccagatacccttctaggggaacaataccttccttagttgagaactgctgctctagatccatttacaattttacccatttttaagtgtacaattcagtggcattaattatattcacaatgttttgcaaacatcaacacagtccattccccaaacgcttcatcatcagaaacagaagctctgtacccattaaacaataattcttcattcttcctctcctcagctccattttagtttccatctatgaatttgcttatctagataactcatataaatggaatcgtatagtatttgtcgtttggaaagacatactgttttttaatgggcttggttattcagttcaggtttaatgttatgactgatattcttgcttttgttgcttctataactttatcatggatctgatgttattgtttcttcattttccctttgtttttattaattttaaagtttatttccattagtggttgccttcgtgtttcttggtcttagttagaagcatgtgattgtcctactacttggaaacaaaatacatatcattttatcacaccagggtcacactatttcttgttctcttctacacaaggaaatcaaaacctctggaatagtttttacttcttgctgcttttcctgtcgcttctgtctgcctccttaagacttttgagaagcttctatttcctccctctcctatttcccaactcctagatttttctaataaagtttttaaaaagatttaccttatagcatgttcccttttaaaagcactttggggctggatgtgatggctcatgcctgtaatcccaacactttgggaggccgaggctggaggattgcttgaggccagagttcgagaccagcctgggaaacacagtgagattccatttctacaaaaaattagccaaggctgggtgtggtggctcatgccggtaatcccagcactttgggaggcgaaggcaggtggatcacctgaggtcaggagttcgataccaccctggtcaacatggtaaaaccctgtctttactaaaaatacaaaaatcggctgggtgtggtgttgtgcacctgtaatcccagctacttggccagctgaggcacgagaattgcctgaacttgggaagcagaggttgcagtgagccacgattgtgccactgcactccagcctggctgacagagtgagactccgtctcaaaaaaaaaaaaaaaaaaaaaaaattagccagtcgtggtggcacgtgcctgtagtcccaactactcaggaggctgaggcagaaagatccttgagcacaggagttttaagttacgagcttatcatgccactgcactccaggcagggtgacagggagagaccctgtctcaacaaaaaaaaaagtacattgagaacattcttccctgatacagcaaggcagagaagtaactggtgattgagaaaagagagctggagaagatgtaccaaatcccttctaaatttgactcttcttttgataagatttctagggaattatctaactccacccccttttaccacaccattccctgttatcctatgagactcaagtcctgtttgaacctttctgacatatatgcaaaagtgatttgagtacggcagggttacaaaggtaggtttgtttttgggatgcacaggtctcctctgatgggtgactttggctccagaattcttcaacagccttaccaacctttcttagaactgtgctgattcttactgctcaagcttcctttcttgtctcctctacagggatcacacctacacccagctttctgtagcccattttccttcacaggtgttcccttagtaaatctcttatattaataatctcattagcttcttttgtttctgttttttcttttttttttttttgagacggagtctctgttgcccaggctggagtgcagtggcatgatctcggctcattgcaacctctgcctcccaggctcaagcgattctcctgcctcagcctcccaagtagctgggattataggtgcctgccaccgtgctggccaatttttgtatttttggtagagacggggtttcactatgttgaccagactggtcgcgaactcctgacctcaggtgatccacccacctcagcatcccaaaatgctgggattacaggtagagccaccatgcccacacccggcctggttttttctttcttttttcttttttagacaaagttttgctcttgttgcctaggctggagtgcagtagcgtgatctcggctcactgcaacctctgcctcctgagttcaagcgattctcctgcctcagcctcccaagtatctgggattacaggcacctgccatcaagcctggctaatttttcgtatttttagtggagatggggtttcatcatgttggccaggctggtctcgaactcctaacctcaggtgatccacctgcctcggcctcccaaagtgctgggattataggcgtgaaccaccgcaccaggccccatcagcttcttaaaaggcttcttaaactaacaccagtcaatgtggaatgtctggcacatagtaagcagttaatacatgttacttttgttatagtaaactaaataaaagatgatggggactatcatggtaatgggagggaaacgtccacattagagagacatttgcatgataaatataataggactgtgattgaatataagggataaaagggggttagtttgcccaatttttttcttatcacttcacattttcacattttactttacagggtagccacattgatgtgcttatagtccactgcagttaccttagtcatccacaattctttttttttttttttttttgagacagagtcttgctctgttgtccaggctgcagcgcagtggtgcagtctcggctcactgcaacctccacccccgggttcaagcaattctcatgcctcagcctcccaaattgctgggacaacaggcgtgcctcaccacaccaggctaatttttgtattttttttagtagagacggggtttcaccatgttgtctaggctggtcctgaacacctggcctccagtgatccaccaactttggcttccctaagagctgggattgcaagcttgagccactgcacctggcccacaattctatatactgtcgattttttttgataaaatatcctctctcctatttttgtacacctttgcctggcaaactcctatttttggagattaagctcaggaaccaactattccaggaagcctttccttttcctctctacctctcactcacccttaccctgtccttgagttcctaaaccatcttttgtttatatgcataaaatagttgtaaacatattataatcaatttttctatcagtttctttttttttcttttttgagacagagtcttgccctgttgcccaggctggagtgcagaagtgcagtcttcgctcactgcaacctccgcttccagggttcaagcgattcccttgccttagcctcttgagtacctgggactacaggagcgcaccaccacgcctggctaatttttgtatttttagtagagatggagtttcgctatgttggccaggttggttgcgaactcctggcctcaagtgatgtgtccacctcggcctcccaaaatgctaggattaaaggcatgagccgccatgcccggcctgtttcttttttaaaaaaattgtttttagaggcagggcattactctgtcgctcaggctggagtgcagtggcacaattgtagctcattgtaaccctgaacttctgagttcaagtgatcttccctcagcctcctgaaaagctaggactacaggcatgtgccaccatgcccaactaattattttattttatttttgtatagatgtggtcttgccatgtggcctaggctaatctcgaacttctggcctcaaatgatcctcctgccttggcctccaagagtgctaggattacagacatgagccaatatgcctggcccagtctcttcttttagactctagattcttttagtcattagatgagactgtataggtatgcaggagtcatttaatcattttgtaatttattctaagagtattgggaaaccattagaggatttaagtatggggtaatatgatgtgacttgagttttgtaaagatcactttagcttcttgtttaatagattggagggtttcaagagtagatttggtttagtgtgagttctggagcctgatttcctggctccaccataaacttaactgtataatcttggattgtttttccttcaatttccccatctgtaaaataaggataaaatagtagtactttagaattgctatgaagataaaataagttaaaagaacttagaatagtatctggctggtgcctcatgcctgtaatccagcactttgggaggccaaggcaggtggatcacctgaggtcaggagttcgagaccagcctgaccaacatggcaaaactccatttctactgaaaataaaaaaattagccagtggtgcatgcctgtaatcccagctacttgggaggctgaggcaggagaatcatttgaacccaggaggcggaggttgcagtgagccaaggtggcgccattgcacttcagcctgggcaacaagagtgaaactccatctctaaataaataaataaatagtatctggcacatgataagcagtcaggtgttaccttttatattgttatttaacaaatatttgtgtgcttatagcatcctaggcactggaccagataccattatcaagctgaattgaaccagtgaaaaaagcattcaaattaatatggagacaaaactttgggctctactagtgtctctaaaaattggaatataggccaaccccagtggctcatgcctatatgctggccctttgtgaggctgaggcgggtggatcacttgagttcaggggttcatgatcagtccagacaacatagggagaccgtgtctctacaaaaaataaaaaattagccagacatggtggcacatacctgtggtcccagctagtcgggaggctgaggcagggttgagcccaggaggttgaggctgcagtgagctgtgttcatgccactacacctcagactgggcaacagagtgagacagtgtctcaaaaaaaaaaaaattagaatataaaacaatttgattattgacatgttgtaattctggagttgttttatttggatttctttgactttttttaatactagaggctccattatgaattgaatgaatcactggggaacattttttgaatgaatgattcttcactatgaccctgtcctttcgttgtttctctgatttacaacttggtcatttgatttacaacttggtaatttttttacttttttttttatattttaatttattattattatttttttgagacacagtttcactctgttgcccaggctggagttcattggtgccatcttggctcactgcaacctccgcctcccgggttcaagtgattctcatgcttcagcctcccaagtagctgggattacaggtgcacaccaccacgcctggctaatttttgtattattagtagagatgggggttttaccatgttggccaggctggtcttgaactcctgacctcaagtgatctgcccacctcagcctccccaagtgcttggattacaggcttgagccactgcccctggcctacaactaggtaattaagaaattaattttctgaacatgctgtactagtattaaatatatttctataatgaagaacttttttgtaaactatgtcagctttataagttctgagtttttgtatatcaatttatgatagcttttgtttttgtttttttgtttaaaggagaaacagtaattgatgtgtaaatgggtaatatatggggaagctaggagatatgctttattgtgatttaagtgactaatttttttaaaaagacaaaataggctggcccacaatcccaccattttgggaggctgaggcaggagaattgcttgaggatttgagttcaagcccagactgggcaacatagcaaaaccccatctctaccaaaaatttaaaaaactagacaggtgcatgcttgtagtcccagctactcaggaggctgaggcagggggatcccttgagcacaggagtttgagactgcagtgagctatggttgtggcactgcactccagcctgggtgacagagtatataacaaagctgggcatggtggctaacacttttaattccagcactttggagactgaggcaggaggatcccttgaaacaaggagttcaagaccagcctggacaacatagcaagactgtttctacaacaaaatttaaaaaaaaattaggcgtggtggcatgctcctatagtaccagctcttagaaggctgaggagggaggatcgcctcaacccaggaggtcaaggctgcagtgagccgtgattgtgccagtgcacactagcctgggcaacatagtgagaccctgtctctaaaaaataaaaataaaaaaatttttaaaaataattaaaaaggacaaaatagtatacatctattgtgttaaagaattaaaaggatttgtagttgtttttgcacaggaaaatattaatagcagttaactttgggcagtgacattgggagatggagacatgctttcataactaaattttatgtggtaagtagcagagaattaaagaggaaaacaatggctaaagaaaataaaaatagaaacaaatgtgtatgtgaggcaattacaagcgtacttggtttatatgagtgaattcagacaccatttacttggttctaatatggcccatggaaactgtactgaaatagaatttaagatgttttgttcagttcttgtttcattattaatgtttgtttacctactttatattcacagggatgtgcatgcagtctgtctttgggatgataaaggcccagcaaaaattcatcaggctttaaaagaagatattcttgagtttattaagcaagcacaggcagtaagttctacatgcttattttagacttgttttaaaactactcagataatatcatattttattattttgaaagtagaacttcttgaagtaatttcaaaatattgcattgacttttgacacatttgttaaataaatttattaatgaaatgatcgtcattagttggattatttttttcccacagtgatacttctgtcaagagagtacatattatatttaattaaaagatgctatagcgaattcagttttttatattttttgggagtccccaccaccattattttttggctacacatcagtccacacagatctttttttttctctcatgactaatacctcttctcaagttgacagtaatttcttcaattccagatccttctccaattgtaatttatttagactgtcctttgtattgctgttgctgagctgaaattcagcactcttacattgctgttatgtataaatcaaaaattttgatcaaaaatcaaaagctcatttaggcattagatcagtaatgcaagagttagttttgttttgttttttttctgtgacaccttgtaatgttgtttcaaatcagccacggcctctcttatgaataaatcccttatcattttgaggaggaccctaaggacgtgagattattttcctttctataacatgaggtctgggacagggcacagtagctcaggcctgtaatcccagcactttgggaggctgaggcaggcaaattgcttgagtcaaagagtttgataccagcctgggaaacatggtgagaccttgcctctatacaaaataaaaaattacccaagcatgatggtgcacacctgtggttgcagccactcgagaggctgaggcaggagaattgtgtgagcctggaagattgaggctgccgtgagccgtgatcatgccattgcactcagcttgggcagcagagtgagaccctgtctcaaaaaaaggcaaaaaaacaaaaaggtctggtctgatggctagaaggctaggctagaatttcttattttttagttggatcattccattaatgtcttgtacaacattagtaaaagttgtttgttaaatcgtgttattaaatactaaaaggtgcttagcagttgaaaattaaaactgagttttttctatgtatgacttaagatattgaaatcaagtatatgattggcatatattttaattttgctagtagccactaccatgatggagtaagactaatctattggatattacttaagaaattaagtgttttattgatagtttcttgacaaattttttaaattgtagttttataggaagttatcttttaatgaaaatctgttttcaagcacttagaaaattaaatgtttcagtatcaatttaaaactattttcttagaactaatttagagatacagtttctacttgcattgggaaatgtaccacgttttctttttatgacttgataaagataaattatgtttatttcagatagatagagctttattcttcagtttctggaaataaacttatgaagaattaccttggatgttcttaacagatgttaaaaaatatgctgaacactggcaaaaaaaagtaggggagggtttcacggtaacatgactgaataaagtctggaaatgtagacctcagcaagaacccaagaatgggatttagcaccactaattctgagcagttaataggagtagcaatgccagacatgggtcttaaaaagacccatcttaaaaagatttttaaacgcttaagaaatttttttttttttttcatgaatcattttacttaggcaatcttcagttgaacataccttgttaggaaggaccaaatctcccagatggttgaaaggcaatatgcattgaaatgtttataacattttttaaagaacaaaaaaaaaagtaaaaataataaacataggtggagtcttttttgtttaacctagattaacacaactgttttatttgttcacaattctgtggcttagcaatttgggctggtctcagatgaatttgcctaagcttattaatgcagcagcagtgggctgttggacatggtggtctaagagagcattaaaactcatatatggtttttgatgtggctttcttttcactgtgtggtttgtcattctcaaggagaccagcctttgagatgaaagtggaatctacaatacctattcatggatagactgagaaatctttcactgttacatcggtggcattctgttggtcaaagtaaatcacaggaccagcccaaactctaatagtggggaaatagactccaccaccttttttttttttttttttttttttttttttttttttgaggtggattctcactttgtcgcccaggctgcagtgcagtagcgcgatctcggctcactacaacctccgcctcctggattcaagcgattctcctgcctcagcctcccgagcagctgagattacaggcgcatgccaccatgcctggctaatttttgtatttttagtagagatggggtttcaccatgttggtcaagctggtctcaaactcatgacctcgtgatctgcccgccttagcctcccaaagtgctgggattacaggcatgagccaccgcacctgccgtgactccaccaccttttaaaaacttgagatataattaatataccataaaatttactctcttaaaggatatgattcagtgggttgtagtatatttcataaaattgtgcaaccatcacccaataatcccagaatattttcatcaccctaaaaagaaatcctatacctatgaacagtcactcccttctcccaacccactaaatcactaatctgttgtccctatggatatgtctatatttgacattttctgtaattggaatcataatatgtggccttttgtgactagttttctttcacaatatttgtttctctttatggctgaataatatctattgtttggatataccatatattgtggggttttttggtttcttttttcatttgtttagttttttttcaagccagggtattgctctgtcgcccaggccagagtgcagtggtgcaatcatggctcactgtagcctcaactgctggggctcaagcaatcctcccacctcaacctcctaagtagctgggaccacaggcacgcaccaacacacccagctaattttttgtattatttgtggagatgaggtcttgctatgttgcccaggttggtctcaaattcctgagctcaagcaatcctcccgcctcagcctcccaaagtgctgggactactgtatgagccaccacgcctggcccatatattgtttatccgtatttcagctaatggatatttgggttgtttctattttttatctattttgaataatgctgctgtgaacattcgtgtacaagtttttttgtgaacatgttttaatttcttttggatataagagcttgtacaataatttaaaaattatgtacaatttaaattttggcatgaatatgttcttaatttttcaaagcaactgcatttatttcaaattggtacacctctttttttcagcgagtactgagccatcaagatgatacggctttgctaaaagcatatattgttgaatggcgaaagttctttacacaatgtgatattttaccaaaacctttttgtcaactagagattactttaatgggtaaacagggcagcaataaaaaatcaaatgtggaagacagtattgttcgaaaggtaagactatttttctccttgttttcctaatattcttcagaaagagggtaatttggaagcatttgaaagtaatttgaacttttaagtgggtttttctacttcacatgtcaattgcttttcagctcttaactagattttattgaataatattcttttttgtctttagcttcaatcttctttcatctttttatgtggtcttaagctatagatctgcatcttcaaccattatctcctttacttttcctttttactttctccttctcctggtattcagtattttatttctctattctttctttgtactctttttttttttttaaactggagtgtcactctgtcgcctaggctggagtgtgcagtggcgcagtctgctcactgcaacctccgcctcctgtgttcaagcaattctcctgcctcagcctcctgagtagctgggactacaggcacgtgctaccacacccggctattttattgtatttttagtggagaccaggtttcaccatgttggccaggctcgtctcgaactcctgacctcaggtgatctgcctgcctcagcctccgaaactgttggaattacaggcgtgagccactgcacccaacctatacccttactagaaattaaattacttttctccctgtctcaaaaatccccttttattaggttaccttctgatatctttatgtttaattgtggctaaactgctatctttataatttcccttttacttaactcttctattataaattcagtatatactgtgcttattttctatttaaaaattgtgtcaagtaaccagtcatgatttaatggaaagaactcagtgctgaatatgaagggtcctaggtttccctttcagctcttcaaactccgtcctcattttccatatatctttccacttgtaagaataaaatgggaccgtagatttgaaaagtaaaaaatgccatttgaactttagtcaatttactgtttactgtgatggttacagtaaaacactcaggcattacaatagtgtaacctgggcattgttgccccatcccagccttaaaatttgatctgatgttgacagggatactgtaaatttagatacccagtggttcttcagtgatagaaatcactgcaatatgggaaatttgtgccaagggaaaaaaaaaagtgaaaaacacttctggctgcgatttaatttgtagtctcataatcttgtcctctttttttggccattctattggttgtgggaagcagcatccacttagtgattaagtgtatcaattctggggccacagtttttggattcaaatctcagtgttgccactgatgaggtgcataaatgtggaaagttagctttgctatctgtaccccaggtttcacatatctaaaggggggataatcatagtacctatatcaagattatgaggattaaatgagttacatgcagacaatacatagagcagtcccaggtatagaatgagtgttataaaactgttaactcttgttgttattgttgctgtcattaatgtatctcctacatctgaccaagtttcttggagtactgatataatcaccaatgtttatataccatttttatcattttaatggaacatctaaacagtagatttgcagaccttttataaggtccagtatcagattttcagttggtcctttttacattttttatgtgtctttacaaacatatgcatatgtctatttcaaacacaccaatatatctgaaattcaaccatggaactataggagaataaacattttccatgtattatcatagttaatttttacaaccactgaaatttgcactattattttgaccattttatacataagaaagcagataaataagtaacagctgggattcaaatccagttggattctgaaacacttgttctttatttacttttgttttgtttgaaatgggctcttgctgtgttgcccaggctagagtggaatagtgtgatcttggcttgctgcagccttgccctcctggacttaagtgatcctcccacctcagcctcccaagtagctgggactacaggcacatgccagcatgcctagcaaatttttgtattttttgttgttgttgagatgggtcttactgtgttgccgaggctggtctcaaactcctggcctcaagtgatcctcccaccttggcctcccaaggttttgggattagaccacacgcagtcgacccttctttaccattatgctaaatatactgcttccccgaagtattcaagtgaatgcaacctaagttattttgagacagggtcttactctgtcacccaggctggagggcagtggcgtggtctcggctcactgggactacaggcgtgcaccaccacactgggctattttttttgtatttttttgtagagacaggattttgccctgctgcccaggctggtcttgaactcatagactccagcgatccacctgcctcggcctcccaaattgttgggactacaggcgtgagccactgcacctggcccaggcctacaaatttgatttccttttttggtgtttgtacatgatactttgtatattaataattgaaaattatgttacaatttgttcttgttttcctagcttatgcttgatacatggaatgagtcaatcttttcaaacataaaaaacagactccaagatagtgcaatgaagctggtacatgctgagagattgggagaagcttttgattctcagctggttattggagtaagagaatcctatggtatgttctgaacttttatgatcataatttctgtttcatggaaattgtagaacaattatggaatagcacaatcaaagttaagtttattggcatacaaagttacatctactttttgtactagatactttttttgagagtaagcaaatgataattctgcttaaaagaatgtataaaaattcatattaatgtggttaatattttcttcatgccattaatttcttggcaagtcgttttagtgaactaaattagatatataaatttgaatgtgtagctcataaaaggtaactagttcattaaaaggttaggtatttatgttttcaggaagtaagttacttccatgaaaaggagagcatgtaggagtacattctctcttacttctaatttgtttcctgtgacttagagtatgcttcttccccacgcttcatcctcctcctggaggcctttcttaattcccagagtaagttaacttctctcatttagtgcttcacagtacctgtgcctccttggcatagtacttttgtttaattgtgttgttagcaccatgtctttactgaacatagaatgcatggcacaaaatcactctaggtaggtatttattgagttaatgaacctatagagttacttttgactggcttttcttcatggcccccatattcttttagttatcaagcctttagattttcattagcagtgctcctgaaatttgtttttaattgaactgccaccagacattaaacttcacatgcagagttttgaaatagtcgtcttataatcatcttattgctgttgtttaacccatatggtgttcataagattaatgtttaagcactattttattggtattttttctacttaccccttaagtggtataccatgctttttttttttttttttaagagatggggttttgctctgttgcccaagctggagtgcagtggcgtgatcatggctcattgagcctccacctctcaggcttaagcagtcctcctatctcagtgtcctgagtagctgggactgcaggcatgcaccaccacacctggctaatttgtttctttttttttctttttttgagacagagtctcactctgtcacccaggctgaagtgcagtggcatgctcgctgcaacctccacttcccaagttcaagcaattttcatacctcagcctccagaatagctgagattacaggtgtgtgccatcactcccagctaatgtttgtatttttagtagagacggggttttgccatagtggccaggctggtcttgaactcctgacctcaagtaatctgcccaccttggcctcccgcagtgctgggattacaagtgtgagccattgtgtgcaggcttaatttttctgtagacacatgattttactatgttgcccagggcatcttcacaaccatttgtaatttaccattctaccttaccttctattaaccttgcaatccacttagacaacctagtcatattttcttgtgcttttctgcttctgaatatttacttaccttactaatctccgtttatgcaaattctagtttattctttaagattcagtttaaatcccattgcttctgtgaatgttttcttgattattcagttagaagtcagtttcttacctatgcaaaaatagtctatattatctgtattatttatttgttactttactgctttatgctgttatctttataagtttcttatggagaaggattttgtcttatataattatatgttctcttgagcattgttaccttgcacataatgactcctcaatatttatttcatttattatactcaaaatactgattttgatcataattggagtaatactttattttctgtttttcagttaacctttgttctaatcctgaggataaacttcaaatttatagggacaattttgagaaggcatacttggattcaacagagagattttatagaacacaagcaccctcgtatttacaacaaaatggtgtacagaattatatgaaatatgtaagttagaacttagtatatgtgataatttgagcaattcccttgatattcttaaaatgattgctattttgcttctggacaggcagatgctaaattaaaagaagaagaaaaacgagcactacgttatttagaaacaagacgagaatgtaactccgttgaagcagtaagtaattttgtaattgtacattttatgggattatttgaaatacggaagcataggaatggcaaataaacaacataaataatattatttaacaaccaacattgttaattgattttagttctttttgcctatgagccatagcacaactttgtaggaggtatcttgtttagaacacattgtcctttggagctggtatgcaagatcaaatctatttgccatacctgttctagactttatttaatataattaatttttggtaagttttcttttattatgttttatgcatatctaaagttagccattttgtgattttcatgttgcaagtaatatatgctcccttagggatacagttgactctctttttttgtaccggttatgttctctgaagtggctgcaaacaccaaattagtgaataatgaatcatttattcctaggggatatttcttctccttctgggaagatgtttcaaacttcatttgtcatgaggtaaaaatattaattattattatttttagaaacaaagtcttgctctgttgcctagggtggagtgcagtggtgcaattatacctcactgtaactcctgggcataagggcccctcctgcctcagcctcctaagtagctgggactacaggcacacgtcaccctgcctgactaataaatatatatatatatatactttatcttttttttttgagacaagggctctctctgttgcccaggctggagtgcagtggtgcaatctcggctcactgcaacctctgcctctcaggctcaagcagttctcctgcctcagcctcccaagtagctgggactacaagcgcatgccaccatgcctggctaatttttttatttttagtagagatggggtttcaccttgctgcccaggctgatcttgaacgcctaagctcaggtgatccacctgccttggcctcccagagtgttgggattacaggcgtgagccactgcacccggccacctggctaatttttttattttatttttcatagagagcaggtcttgctatgtagcccaggctggttttgaactcctggcctcaagcaatccttcttgctcagcctcccaaaatgctgggattatgggcatgagccacaatacctggcctcaaaatattaaaaaacaaaaaactagtcagtgacagtaccatggtaggtgttttcttttacgtggaggactgaccttagggtgcttcagtataaggaaagttagaatctagttgggacagtcttggaattgttgaaacacaacaatagtatttcctctggttcctttcagtctttggagccttgatttagatttgcattctcaggaataacattctagcttgcccataatcaaatatttttcaactctgaatgggatttaaaatttttttttacttttgacttttctttggctttgtccatcttaagtggtagtcgtgtttattttattctttgttcagaaatcacaccgagttggatgtcttttccctttggttcttttagtttttgttttgcttgtccttgatttgcagtatgtatcctctttggttgaaatagttttgatattggcaaaaggaaggataatttagtggttatttatagaagttctttatagtgatataaattcaggtttgggctacattcagaaggccgggaaggctgttgactttttttttaaacaggtgggccacagagttgtcccttaggaagattaatctggtgacaggaaagatggaagactggaatggggaggagctgggaataagaagtagaaagcatttgcagtaattcaggcaaggtattaggcagaccaagtagagttacagaagtgggaatggaaaagacaagggaagagagaaacttcttagaggtggaacattgtatcacatggatggggctagatatcacagagaatcaagccaataatgttctgaggtttcagccaaggagaactgtgctgctactgagagattaggtataaaaataagtcttagtgagggagaaaggatgagttcattttggaggatttgggtatttgttgtagattgacgtacatttagcacctggatgggaatgttacagttttataaggtgaaattgttctgatctcctactgcaatttgtatgttagtcatatcatagccacattaaacttatgaactttcaactgtaaaaggccaactaaaagaataagtccagagtagctgggactacaggtacgtgccactacacctggctaattttttattttttgagatcacgtctcactatgttggtaaggcttgtctcaaactcctgggctcgagcagttctcccacctcgacctcccagagtgctaggattacaggcacgagccacggcacttggcagtaacggtcaaaagtttgaaatgaaataggatatttgcatagtttcaaagtatcgtccccaagatatttactaaaggagaagcctgaagacaccatcttaattaagtgatcaaggtgaacatcaccagtagtaggacatgctgacataccccgtgatatgatgcactaagaagaatacaatattatttctgttttactcttgccaaaaatgtgtaatcttactgtaataatgaggaaagattaaacaatcgcaaattgatagcctacaaaatgactaatattcttcaaggtgtcaagactgtaacagactgaaggacaaaggaactgccacagattgtatgagagtaggagaaattacaactatatgcaacatgggcttgtggataggatcctggaataggagaaggatattagtggaaaaactggtgaaatgaataagacctagagttaaattgatagtatcgtaccaatactattttcctggttttgatagttgtactatagttatgtaagatgttaatgttgggagaagtgaggtgctatttttctgctaacttttctgtaatcattaatcaaagaagttgaaaaaataaagaatattggctgggtgcagtggctcacgcctgtaatcccagcactttgggaggccaaggcaggcagatcatgtggtcaggagttcaagaccagcctgacctacatggtgaaaccctgtctctactaaaaatacaaaaattagccggacgtggtggcgtgcacctgtaatcccagctactcaggaggctgaggcaggagaatctcttgaacctgggaggcagaggttgcagtgagccgagattgcgccaccacactccagcctgggcgatagagcaagactctgtctcaaaaaaaaaaaaaaaaaagaatattatgaagagtgcctttttttttttttttttttttgaaacatagccctgatgtgtcacccaggctagagtgcagtagtgcagtctccgctcactgcaacctctgcttcccaggttcatgtgattctcatgcctcagcctcccgagtagctgggactacaggtgcccaccaccacacccggctaattttttgtatttttagtagagacagggtttcaccgtgttagccaggatggtcttgatctcctgacttcgtgatctgcccgcggcggcctcccaaagtgctgggattacagacgtgagccactgcacccggcccaaagtgatttttttttttttaaatgaagtaagagtaatactatagagtgtattggtggtggtaatgcttctcctgctgcttttactttatggaatatggtcagaaaagatctctgagggaatgatattggagttaagacctgaatgatagggaactagccttgtgaagatctgagacagttaagtgttgcattagatgtctgaagccctactcttacagttttatttttacttataggagagccacttagaccctacttagatctgattttacatacaattctaataagcttgattatcactcgctgggcctatagcagatgaacagaaatgtattgaatgtatttaatgtaaaacaaggtaagaggcttccgagctgtgctgctgaacaggcatgttgacagcaaaaagtaacacaaccataagaaaagagcaagaaaaaaaattaagccaaatgccttttgtgttttaagaggcagagtctcgctatgttgcccaggctggagtgcagtggctgttcacaggtttgatcatagtgcactgcattctcgaattcctggccttcagcagtcttcccacctcagcctcctgagttgctgggacagtaggcgcatgcaaccacacccagctttaagccaaaatgacttaaaatttgtgtttggtttttagtttttaggtgatagtcctgcataccttagtatttcctggggaaattcaattagtatttattatatacccacagtgtgtcaggcattatgctagttggggataataagatagacctagtccctatcctcaggatgacactagaataaaatggattgtttatacaatagaggaatagaaaagtgaattggtagtgtaagtcttgatcacttcagaatgaccagggcaccgatagggagggagtgtattacagtggttagggtcatacatgttggaattagatgaggatttgaatcccacagatgttattttaccagctgtctgcgttttggcaagttattcaacctttgtagtctctcttttcctaactataaaatggaataggccgggcgcggtggctcacgcctgcaatcccagcacttagggaggccgagatgggtggatcatgaggtcaggagttcaagaccagcctggccaacacggtgaaaccctgtctctactaaaaaaaaaatacaaaaaaattagttgggcgtggtggcacgcacctgtaatctcagctactcgggaggctgaggcaggagaatcgcttgaacccaggaggcggaggttgcagtaaggagagatcacaccattgcgctccagcctgggtgacagagcgagactctgtctaaaaaaaaaaaaaaaattgaataatacccttttgtattagcagaattaaatgaaatatgttacattaagcatttgagcactgtgcctggcatgatagcttttactgttaggcactggttcagagaaaactgcttactaattctaagacaagtaaaaactattttaccatctgtgcaaaactgatttaaaaagctgaataagcaactaggtcacaagttataaattattaacattaaaataagcacttattaaccttcagtattttggtatttcaggcatggtatcctctccacagaggaggtctaaaattaaaaaaaaaaattaagcttggtgttcaaaaagacaaggtgatccagacttttgtagtgccactaatgatagtagtacagaaagaatcttagtcaaactagaaaggccaggaaattaattattgaatacattacagatatccttgtatggttaagggcctgataatgatagagtagaatcataaagtgggggaacttaagataatttttagttcaactcttacgttgtagctgaggcaaagcaaactattccttatacagagctatataactaatgaaaatcagaaatgcttttttttttaaacgaaatttgagcgaggtagaaataattatgcaaattgaataccactaaaagaagaatctggctggatgccgtggcccacgcctctaatcccagcactttaggaggccgaggcgggtggatcacctgaggtcaggagttcaagaccagcctggctaacatggtaaagccctgtttctactaaaaatacaaaaaattacccgggcatggtggtgcgtgcctgtaatctcagctactcgggaggctgaggcaggagaatcgcttgaacccgggaggcggaggttgcagtgagatcgcgccattgcactccagcttgggcaacgagtgaaactgtctcaaaaaaaaaaagaataagaatctaccatgtctcgtagcctacctgtctcacctttcattttccagacctatgaattcattcattcaacaggtacttattggagtgcctgctgtgttttatagcaggcattatttttgaagagtttatagtcttgctgtagaggaggttaaaacatcaagcacattgatagttaaagtgtttcaccttgcagacctctggggagagattgctatggatttagaagttgtgctcatctcaggcaaacatacaggagttgatggcatatggcaaaaagtttttttcttcacggaatctagcaaaaggagacagaaagggaatacaaggtgagagagatggcttatcactatactttccattcaagatgtattttcaaataacaagttatatatttaggatcaactatgtatatagtaatttggtaaatgggaagaaatacaaaagaggaataacatgatctctgtcctcaagaaactgactctcttaggacaagactcatttgaaataaggagagaattctatctagcaatctccctactttttgcctaggtaaaataattttctggaggattttttaatatatagaaatctataccataattgttctcttcattttttaaaaaagctttgtaatgaaagttttaaaatatttacacaagtagagaaaatactataatgaacgctacccccatacccagtcttccagattcaacagttatcattattttgtcatgcttgttttgttgatccttctgtttgttttcctttcttttccattccttcctctctatttccctccccgttttgcctcccttccctcctgcattcctatatttaaaaataaatttatgatgttgctcatttttactccacacacattgtattagtccattttcacactgctataaagataactacctgagactgagtaatttgtaaaggaaagaggtttagttgaaccagttccacatggcctgggagtcctcaggaaacttaaaatcatggcagaaggcaaaggggaggcaaggcacatcttatgtggcagcaggagagagagagagagagagagaatgtgcaggagaaactgccacttttaaaaccatcagattttgagaattccctgtcacaagaacagcatgggggaaaccttgctgatccaatcacctcccaccaggtccctgtctcaacacgtgggaattacaattcgagatgaaatttggctggggatacagagccaaagcatatcacaatctatattataatgtaacctatatgcactgtagtattactaaccagttctctaatgatgaccattttcattgtttatagtttatttcttataaatagtgctttctggaatatccttaaatacctctatctttttaacatccttgtgtatacatcttttctcacacttggcttcctcttggaatagaatctcctggaaattagatagctgaggtaaaagtccctgaaccttttacaaattgctacacaataaataccaaactgactttcaggaatgtagtcccatcaacagtgtgcttgtttatccatatcgttgctgatctgagttttgtcagtctattgattcctaccaatctgccagtatcatagattttaaaatattttttgtgtgcatttaaaaattaatgaatattaataattgtaaatattaaatataattataaatatataaaattataaataattaaatatttattttataaatataaaatattttgtgcatacatacatggtgtatgtagttgtatgtatttatgggttacatgagacattttgatacaggcatgcaacgcatgataatcacatcagggcaaatggtatcaatcacctcaggcatttatcctttgtgttacagacaatccaattatattcttttattatttttaaacataaaattaaattattttttactgtagtcaccctgttatgttatcaaatactatgttttattcattctgtttttgtttttgtttttgttttgttttgagacggagttttgctcttgttgcccacccaggctggagtgctgtggcgggatctcagctcaccgcaacctccgcctcctgggttcaagtgattcttctgcctcagcctcccaagtagctgggattacaggcatgcaccaccacgcccggctaattttgtatttttagtagagatggggtttctccatgttggtcaggctggtctcgaactcctgacctcaggcaatccacctggctcagcctcccaaagtgctgggattacaggtgtgagccactgcacccgactattcattctggtttttttgtacccattaaccatccctatttctcccccaccacctcactaccctacccagcatctggcaactatcctttactctctatttccatgagttcaattgttttaatttttagcttccacaaatgagtgagatcgtgtgaagttcgtctttctgttcctggcttatttcacctaacacagtgttctccagtttcatccatgttgttgcaaatggcaggatctcattctttttttatggctgaatagtactccattgtgtttatgtacattttcattatccattcatttgttggtggacagtaaggttccttccaaatcttgattataagtagtgctgcaatacatgtatacatatgtaacaaacctgcacgttgtgcacatgtaccctaaaacttaaagtataataataataaaatttaatgttaattttataataataataaaatttaaagtataatgataataaaatttaataaataataaaattaataaaatttaaaaaaaataaataaatagtgctgcagtaaacgtggaagtgcatctatctcttcctttcttcctatgctcatttccattctttttggtatatagccagcagtgggattgctggatcataaggtagctctgtattagttttttgaggaacctccaaactgctccatagtgcttgtactaatattacattcccaccatcattatacgagggttcctttttctacacattctcaccaatatttgttattgcctgtcttatagataaaagctactttaactgggatgagatgatgtctcgttgtaggtaatatcatctgcaaacaagcgtagtttgacatcttcctttccaatttggatgctctttctttctcttgtctgattcctctaactacaacttccagtattattttgaataaaagtggtgacagtgggcatccttgtcatgtttgagatcttagaagaaagatttttagtttttctccattcagtatgatactagctacgggtctctcatgtggcttttattatgttgaggtatgttcgttctatacccagtgttttgatggtttgtatcatgcaggaatgttgaattttatcagatgctttttcagcatcaattgaaatgaacatacggattttgtctgccattctgttgatgtgatgtatcatttgatcaatttgtgtatgttgaaccatccttgcatccacggataaatcccacttggtcatgatgaatgatttctttaaggtgttggtaaatttggtttgctagtctgggctcagtggctcacgcctgtaatcccagcacattaggaggccaaggcaggtggatcacttgaggtcagaagtttgagaccagcctggccaacatggtgaaaccccatctctactaaaaaaaatacaaaaattagcgggcgaggtgtcaggtgcccgtaatcccagctactcgggaggctaaggcaggagagttgcttgaacttgggaggtggagcttgcagtgagccaagatcatgccactgcattgcagcctgggcaacagagtgatactctgtctcaaaaaacaaaaacaaaacaaaacaaaaatttggtttgctagtattttgttgaggatttttgcatcaatattcatcagtgatattggcctgtagttttctttttaaaatgtgtctttgtctgcttttggtattagggcaatactggcctcatagaatgagtttggaagtattccctcctcctctatttttcagacagtttgagtagaattgatattagttctacttgaaatatttggtaggattcagcagtgaagccatcaggtgccaggcttttctttgttgggagaaattttatttcattttatttatttaattaattaattaatttttttttgagacggagtcttgctctgtcacccaggctggagtgcagtggcatgatctcggctcactgcaagctccgcctcctgggttcacaccattttcctgcctcagcctcccaagtagctgggactacaggcgcccgccaccacacccggctaattttttgtatttttagtagagatggggtttcaccatgttagccaggatggtctctctcctgacctcatgatctgcccacctctgcctggcaaagtgctgggattacaggcatgagccactgcacctgttgggagaaattttattatggcttctatctcattatttgttattgcttgcctagaagttacagtccttgtggcctagactgcctttcaagtttatttggagccccagagtactttagcttatagtgcgaggcttgctagaactcaagtccttaccactggaatgggcgattcccctctgtctagggctggtctaaatgctccctccatgggcatgtgtcagctgagttcatcctacttttgctttctgctgtgaaagggtggtggtgagttcaatgcagtatctcacagttgctgctctctccctctcccaagcacacagattctccatgccatacagctgctgctgggggatgagggaggggtaacattggcgattcaagactatctttcctaccctcttcagtgcctcttgcagtgacatgaagttaaaaccaggtactatgagtgcccacctgatttttggttcttatgaaggtgtttttttgtgtgtagatagttgttaaatttggtgttcctgcaggaggaatgatcggtggaagcttctatttggccatcttgctccactcctctattttttattattttttttagaaacagggtctcactatgttgtccagcctggtctgcatatttattcttattcctgaccatttgtatttattcttttgtgaattcaggataatctttcataaacatcacttttattgttttacttttctattcaaaaactagagtactggctggccgtggtggctcacgcctctaatcccagcactttgggaggctgaggcaggcagatcacaaggtcaggagatcaagaccatcctggctaacacggtgaaaccctgtttctactaaaaatacaaaaacaaacttagccaggcgtggtggtggatgcctgctgtcccagtactcaggaggctgaggcgggagaaatggtgtgaacccaggaggcagagcttgcagtgagccaagatcacgccactgcactccagcctgggcgacagagcgagactctgtctcaaaaaaaaaaccagagtatcattatttcatacccctgatttttaagacccttcataatttgaccctaacctatttttctaacttaatattgtccagcaagagtcactctactccaataagaaatatttttttattcatacaactcactctgttacttttttttttggattcattttagcagtgttttcttctgcctacccaaaatcttgcaaggattcttttaactcaccttgtaataaaattgtaataaagtagctcagatcatctagccttcatcagtttcttcctatttgaattcccgtggtaactattgtttctaccactaggtttaggagcaaattatagactgccttgtatttcttatcaagcaccagctgtgtgccaggacacagcacagtctttatagctgtggacagagcacaatctttgtccttaagtttatagtatagtaatgatgcattttccagttatttgcttattagtgaagatcttcttttcatacacatctgtacatatgaaccatacacatgtttttaggtatatagtttatgggtttccaactggattgtaagatcattgagggcatgaaccatgtttatacttctctattccttaaaacacgtaactcagttctgagcatgtagccatcactaagtatgtacatgctctacttctgtagtaagaaaagttggaggctatggagatacatacctggcctcaaattataactcaagaccttatgaaccaactgtgcaacatttggaagttatgtggctactctcagtctatgtcctcataaagtaagtatctgcctcatgaggttgccatgtgggttaaatgagatctatatgtaaagcatttagcataatgcctggtacaaagtaagtgcccattaaaggatacctgttataataatttgtttaacctctcaagctagaaatggattcaacatccttttatttccctaatccctttcatttaagcatttaccaaattcttctcagtttactttaattatgttgtcaatttagctctccttttaatcctcgttgtaacccaccataagaaatacattttatattgtggcttagaatatactgtttatttgtacatatctgaaacaaaagtcttatgaaataatattcattgttacaatatgtgatacactctgatattttttgttctgtcctatgtacattttttttttttttaaacctggtcacagccattaaaactgatttcacaacatacagtctgaaacacactggtctggatttttagaatctgcaaaatttcaactaccactgaacaggataatgttcaagtgaaagttttcaatgaaatagaaaacacagagcttagagtttattaggattccactttgtctttgttctctattagttatatattgttagatttacctatgctcaatctggtttcactgcttaaggtggaagtgtttagttgggcctattccagtgatgttatagaataagattactcagcagttggggcagagatttccaccttgcaaggaaagagtttcttaaccattttatatgtgtagtcttttctttatttttcttttttttttccttttttgagacggagttttgctcttgttgcccaggctggagtgcaatggcacgatctcggctcactgcaatctctgcctcccaggtttaagcaattctcctgcctcagcctcccgagtagctgggattacaggcacccaccatgcccggctaatttttagtagagatggggtttctctgtgttggtcaggctggtcttgaactcctgacctcaggtgatccgcccgccttagcctcccaaagtgctgggattataggctatgagccaccacgcccagccatgtgtattattttcttaggacagaaatatacatggatatatgcatttaaaagtcatcagcatcattcttgtagaggagcctgaaaaaacctttttttttgttttgttttgttttgttttgtgacagtcttgctctgtcgcccagactacactgcagtgacatgatcaaggcttactgcagccttgacctcctgagcttaactgaccctcccacctcagccccccaactcgcagggaccacagaaaattctttattcggaaaattttaagcatttttacaatgtaggaagaacagtataatgaatccccattacctaaattcagctttagtagttaccaacattatgtcaattccaaaggaatttttaataaaaaatttttaagggacacataattgcctcccttaatttacagatagatgatttgtttttcagaagaaatatatcagccttattgtacttaactttagtcctcacaacctattaatttcatctgatccccaaaagagaagtaaataattacatgacacgagggagcagagatgacatgatatcttctgcctcatttagattttcctgatggcctcctagagcactagacccttgctatcttacctgaaatagttcaacagcctcgttaccatatcccaaccacccactccttaccacctgccttactaccattatactgatctttaataatgacttgaggagaggagaatctcattacatttatcctctgtttaaaacttccttggggccaggcctgatggttcacacctgtaatcccacactttgggagactgacagggggatcatgtgagaccaggagtttgtgaccagcctggggaacatagcaagacatcatctctacagaaaagtttaaaaaattaaccagacttgatagtacatccctgtagtcctagctactcaagaggctgaggcaggaggatcacttgagcctaggagttcaaggctgtagtgaggtatgatagtagctatgtagtaatgccactgtactccagcttgggcagcagagcaagactctgtctcttaaacaaacaaaaaaaccttcctttgttcttccttccctacctatgaaataaaaccccaaatcatagattttcattcataatctggttgcagcctatctttctagccttctcttccactgtctgtttcttctctaccattttaagcttcctggtattcctagaatacgtaacctattttagggcttgtacttactttacaggatcccatttagataccaacttgtggatgaggccattttaactaccctagaaaaaagtagtttctaagtttttttttattttgtgtgtgtttgtgtatgtgtgtgatgccacttaactgagttatatttagttagcagtgtaggtttactgccctcctcactctcaattagacagtgatctcttcgagagcaggaattatatcttattcttgtctcttaaatacttccttagtgcctgcacgtagtaggcatccaataatggtttgttgaatgaatgtattcacacttctagaattttataacctaattttaaaacaggttctctccagacaggaagagttaatcaaagtttggttttgtatatttttctctcccctccttgaggacttttgttaaaatttctaaagagagtctagttctatagtttttttccttaggggaaaatacactttggtaaactagtatagcatatccatcttcaataatcctatagttaaggtaagtgaaatctactttcagtataattttttttttgttgaacaatattgttttattttgtgagttagaatagatttgtgctatacagcttatagtagccttgactaatttttgatatatttcagctcatggaatgctgtgtaaatgccctggtgacatcatttaaagagactatcttagctgagtgccaaggcatgatcaagagaaatgaaactgaaagtaggtaaaacatcacataaagttatcataatcttctaagagggtatctttgaaacaaatcacttactaagttgctcttagttaattcttttccacataggtatatgtggaactgttagagtgaactatacttaaggaaatagataaaatatttaacacagaggcactgctaagagtatataaacttaaattttaagcattttccctcttagctatcaacatctgtgtatgtgtatggtgaatttctacttttttctcaaaagcaagacactgcttttaaaggccagtttaaactggaaacatatgttatagattagaaccaggtatttgacttttgtgtggaaccttgtgatgaatctttttagaatgtaataaaacactccctgttaatagtcatctctgtcccccaaaatactttataagatttctaaaggatttttttattacttcaatgttttcttaaaaagatgtgttttgagaggtagcaagtatataacaaactaaaaaaaaaaattgtacatatacctactaccccagtaaaactgcttttaacatttttttgcttttgttttttaaataacgtacttctactgagtttccaggttttattatatctaactgcaaggtcctgtttaatctctagttgcatttaaagtgcatatttcaattcacttaagttcatacactttttaggagtaattcagtagtaaaaagcaagctgctttattggcgtaaacaaaatacttgtattctgtgtgccagtctaattagagttatgtctgatctatgttgcactcttttcaaaaggatttatttagtggtaatcagtaccgtgaggtagggtttttgtgaaggtcaataaaatggcataacatgaaaaagtgctttgtaaattgaaaaattatttatgaatacagttttatattctaatctctaatatagttgctttcgtaattattactcatgttttttaccttttgatgatatggctgtatatgtagtattacaactaccttatgaaataaactaatcttgtgtgtaaataaatattcctttgcactgaaaaccaaatgactcaccttttcttttgagactgggtctcgctgtgttgcccaacctggaattcgatggcacgatcacaattcactgtagccttgacctcctgggctcaagcgatcctcccacctcccagcccactgagtagctgggactacagccgtgtaccaccatgcctggctaatttttgtattttttgtagaggcagagccccaccttgttgcccaggctgatctccactgcttctggccaaatgactgaccttttaaagaaaggagttgggttttgcagtatttgatcactttttttatttttattttttgagaccgtcttgccctgtcacccaggctgagtgcaatggtgcaatcacggctcactgcagcctcagcctcctgggcttaggcattcctcacacttcagcctcccaagtatctgggaccaaagacatgcaccaccacacccagctaattttgtttgtttgtttttgtgtaacgatgggttttgccatgttgccctgactggtctttttaactcctgggctcaaatgatcctcccaccttggcctcccaaagtgctggagttacaagcgtgaaccaccacacccagcctgatcacttttaattcgatttttttttaaacataatttttagactaagtacagtggctcatacctatgatcccagcactttgagagaccaaggcgagaggattgtgtgagccccgaagtttgagaccagcttgggcaacattgggagaccctgtctctacaaaattacaaaaaacattagccaggcatggtgacatgtgcctgtggtcccagctactcaggaggctgagatgggaggattgcttgcgcccaagaggtcaaggctgcagtgagccgtgatcgagccactgtactccagcttgggtgacagactgggaccctgtctcaaaaacaaaaaaacaacaacaaaaaaacgaacaactactcctaatggcattgtatccacagaatactattaacattacaaacttaactaatgtttctctaaactcttactctagtaaatgaaatgattacatgaatgtgttctctccttccagaattacatttaatgttttcattgatggacaaagttcctaatggtatagagccaatgttgaaagacttggaggaacatatcattagtgctggcctggcagatatggtagcagctgctgaaactattactactgtaagttttttttcaatggcaatgatagatatatatcaaggctattttttaaatgtaggattattgaaaatagtgagcggttaccagaggctgggggttgggggagcagaagaggttggttagtggggtataaagttatagttcaataggaagaataagttttggtgttctattacccattagggcggatatagcaagtaacaatgtagtgtatatttcaagatagaagagattttttatgttgttaccacaaagaaattataaatgtttgaagtgatggatatagtagttaccccaatttgatcattatagtatatacatgcattgaaatataacattgtaccccataatatgtaccattatgtgttgattacaaataaaaacattaaatttttaaaaatacagaattgaaaattgaaaatagtaattgaaattactattttctctgtaaaacagggagctgggcaaggtggctcacgcctgtaatcccagcactttgggaggccgaggtgggcagatcacaaggtcaggagatcgagactatcctggctaacatggtgaaacccctctctactaaaaatacaaaaaaaatagccaggcggggtggcgggcgcctatagtcccagctacttgggagggtgaggcaggagaatggcgtgaacccaggaagtggagcttgcagtgagccgagaaggtgccactgcactccagcctgggcgacagatcgagactccgtctcaaaaaaaaaaaaaggaagaaagaaaaaagaagtggcaaaacagtaatattggaacaccttttagttttatttttaagaaaaaatatccccagttttaaatgagttttattaaaattatgtttattttctcatttttttgtgttattctttttcttttaaaaacttaatgtaaaaccttttgtttctaggactctgagaaatacgttgagcagttacttacactatttaatagatttagtaaactcgtcaaagaagcttttcaagatgatccacgatttcttactgcaagagataaggtatatattcctatatatataaaaaacacttttaaaagttttattctcataatttacttctaataatcaatttgcattatttttctattaattataaacttaaaaacctagcaactgttatttttcatcagtggagaacaactatattcgttttgtcttggctgtaagcatttgttaaacattagatagccttgtgaattagaatttagttagaaagttgcttttttctcatttttccaagaatgtttttctgtttttgaatattactgatctattgaattcctattcatccttccattaagacccagctcaaagaatacttcccctggagcttccttgatgtcctgcctccctccacagctcatcaccagcagagttgattcctccatcctccgtcctttcatgggactccttcgggagttatgttatacttatccttgtttcccagggaagcatttgtattgcataccatctttttccatcctcactagtataggataatgataataaaacaccatactgtccttagcattgtatcttttttagtgtaataaacctataacaagaaattgctgttagttttttctcttctttgactacctttcgttacttcccaagtttgaatgattctaaaaagacaactttctccattctccagtaggatttttttctcactctttttgtctattttaatttttttttttttttttttttgagactgagtttcgctcttgttgcccaggcttgagtgcaatggcatgatcttggctcactgcaacttctgcctcccaggttcaagcgattctcctgcctcagcctctcgagtagctgggattacagggaccaaccaccatgcccggctaatttttgtatttttactacagacggggtttcactgtgttggccaggctggtctcgaactcctgacctcaggtgatgggcccgcctcggcctcccaaagtgctgggattacaggcctgagctactgtgcccagactctttttgtctattttaaaacaagtaaataggccaggtgcagtggctcacgcctgtaaccagcactttgggaggccagggcgggtggatcacctgaggtcgggagttcgagatcagcctgatcaacatggagaaaccccatctctactaaaaatacgaaaaattagctggacgtggtggtacatgcgtgtaattccagctacttaggagactgaggcaggagaattgcttgaacccaggaggtggaggttgtggtgagctgagatcgtgccattgcactccagcctgggcaacaagagcgaaactctgtctcaaaaaataaataaataaaaataaaacaaataagtaggtaaagtaggaaaggagttaagggagtatagacatggtgggcgtggtgtgaagtcttaaattgagtagcctgcaaaggcttcataggaagccagatcatgtaagactctgagccatgggaaggagttagtttttactgtgagtaggatgggaagtcatttaaaaattttaaacagaatggtagaatgtgatttatgtattaacaggatcattctggctgttgtaaaaaatatactgaagggaagaaggaagaaagaataccagttaagaacttatttaaataattcaattaagtgatgatggaggcttgtcccagagtgatggtagaggtggtcaaaagtagttcgataattttttttttttttaatgcaagtagcttatttgggaaatgcagggacgatagcgtggcgtattagtaagtcagatctacagtgagctacttgaacttaattctgcaaggaaacttatttaaaaccctgctcaaaattacctcacctatcaagtgttgagttcttgaagtttcctgcctgccacttgcataggcaacacatatttctgcagttttaggaaaaaacagctctttgggtgcatgtgcagatactaatagtgggaaaagtataagggatgtgggaaggtttgacagcatttgttacaccaggtatgtggcttggaattggaaaataaaaatgacagcaggctctagaagtgacttgtcagggaagttcgctgtgtcgcccagtctggagtgcagtggtgcaatcatagctgactgcagccttgaactcctgggctcaagcaatcctcccgcctcagccacctgagtttctgggactgtgagcacataccaccacacctggctaggtttttaaagtttttctatagagacaacatctagctatgttgtttgggctggtcttgaactcctgccttagccttccaaagttctgggattatagacgtgagccaccacccctggccccctttccctttaaatcatgttctttgagaactcttcacccgcactgatgttgtctcagccctgtcatctcactggtgaaggaaataaagatatccaccatctgacatagttactcattttcttgttttgttttgtttttgtggcaagagcacccaaagtctacttagcatgaatccaatatacagtataatttgaatttgttttgttttatttatttatttattttgagacagagtcttgctctgtcacccaggctggagagagtgcagtggcacaacatggctcactggagcttcgacccctctgggctcaggtgatcttcccacctcagcctcccgagtagctgggactacaggcatgcaccactatgtttggctaatttgtaattttttttgtagagatgagttctcagtatgttgcccaggctgttcttgaactcctgggctcaagcgatccatccaccacagcctcccaaagtgctgggattacaggcatgagccaccatgcccagcccagtataattttactacctatagttctcatgctgtacattagctctctagactttttccatcttgtgtgtctgctactttgtatcatgtcacctacatttccttgtttctttcccacccattttgccactggtactactctttcattcctctttctgtatatttgaattttttttaggttctacctataagtgagatcatgcagtatttttcttcctgtgtctggcttatttttaaggtcttccaggcttccgtcatatatatgtaccagtttctttatccattgatggacgctgaggttgtgtccatatttttgctattgttaataatgcagtgaatgtgggagtgcagttatctttgtgaagtggtgatttcatttcctttgggtatatgcctagaagagggattgctgggattatgattacattatgaagatagactattcaggatttgctattgaatcagaagtagaatgtgatagagactagtcagggatgacactcagattcgtgttctgatcaattagaaggatatgttcactgcgatagggaagactgtaagagaaatagtttttggagagatggttgcagagagatcagaaactcggtattgaataagttaactttgaaatatctgttaaacatccatatggtaatgttgagtctggagcttaagagaaagaatggagctggaaaaatatgtttggcagcttcagcatataagtggtttttaaagcactgacacaggctctaatcaccaaagtaatgattggagatagaaaagaggacagatccaaggattggcctagggcattctgatatttcattgttagaaaaatgaggagtcgtctttcatgagaagggagaaatgatccaagagaatgttatgtgctagaagacaagtgaaaaaagtactttcaggaggagggtgtgatccgctgtttttaaatgctgataataaataagatggagataaaccattgtcttcagcaacatggaggttgccagtgactttaacaagaacagttgtgtaggctgggtgtggtggcttacgcctgtaatccagcactttgagaggctgagacaggtggatcacttgaggtcaggagtcaacatgatgaaaccctgtctctattaaaaatacaaaaattagccaggcacggtggtgcgcacctgtaattccagctactcaggaggctgaggcaggagaatcgcttgaacccaggaggtggtggttgcagtgatctgagatcagcaccactgcactgcagcctgggcaacgagtgaaactctgtctccaaaaaaaaaaaaagaaaaaaaatctcacttgaggccaggcatggtggctcacccctgtaatcccagcactttgggagaccaaggcaggcagatcacctgaggtgaggagtttgagaccagcctggccaacatggtgaaactccgtctctactaaaaatacaaaagttagcctgatgtagtggtgggcacctataatcccagctacccaggaggccagctaagacaggagaatcacttgaacccaggaggcggaggttgcagtgagtggagatcatgccactgcactccagcctggtcgacagagtgagacttcatctcaaaaaaacaaaaccaaaccaacaacaacaaaaaaacctcacttgagaatattgataattataatatgacaaagaacttgctaaagtctttgactaggcaaattctgtttggccagatataccattagaaataaaaactaacatatttttatgtgttttgggatgtataaaaatttatctgtatattttcaatattaaaaatattttattccaaattattttttgcaggcgtataaagcagttgttaatgatgctaccatatttaaacttgaattacctttgaagcagaaggggtaagttttttaaaaccatactttaaaaatacttaaattttctttagtgtaataggggttaactaggtatacaaagtaccctgttaggtttatttttgttattgttagttttgtgacttttgcagcttttggctattaaagttcatttataattttttattaaattattttacaatacaaaaattgactttattttttcaggtaaaaaaaaaatattcctaatcttttaggatctctacttgtttttccctcattagtcactaaaagtattctattacccatagaagcagagaaaatgactcaatttaccataatgttataaaaagaactcagtttaaatgtaaattttcctattaccgttttaaaaaattgttctataattggtaagatgaatatgcctgtgctaagcctagcttatagaaaatctgacaactggaatctgagctagttatagcactttcagagtagtactaaatagcaataaaggttagttaaaaaaagtcttttgatgtgcttctagctaagaattaccattttaaagaaattttatatataatgctaaaatatttgaaaaatactgaaaaataacgtttcttaagaaggaaaaataatcaggtatttttcatttagtgttttcattttgtcttttctgagcagtgtatgttgcttgagtaatattacagtggaagacatctgagtcataccatattataatattgatatattttagaagggaatatgttctcttttataaactgtgaaatatgtgaaacatatagcactgcatcttggccatctcttcacatgagtagatagatcttcttctctttcaccctagcattttttgtattatttattaattttaatttatttatttattcgagacagggtctcactctgtcacccaggctggagtgcagtggtacgacctcagctcactgcaacctttacctcccggattcaagcaattcttctgcctcagcctcccgagtagctgggattacaggcacacaccaccatgcctggctaatttttttgtatttttaatggagacggggtttcgccatattggccaggctggtcttgaactcctgacctcaagtgatccgcccacctcagcctcccaaagtgctgggattacaggcgtgagccaccgcacccagtcccaagcattttttttaatgaaaatgttcaaacttacaatagagttactatggttgctttatcaaatatgttatctccttatatacattcgtcagtcaactttttaagtgtatttctaaagaagttgcaggcatcagtaacctttagtccctaaacacttcagcatacagtcatttattgaatttaatgtttatgtttttaggcaaaatttatatactgtcccatgcataaatcttaagtgtacatttgagtcagatttgacaaatgcctatacccctattaacatgtatgatgtctttatcatcgtacaaagttacttcatgtctattcccagtcggtcccaccccacctccttccagaggcatctgctgtcctgattaattccctcaatatagattagttttgcctaatctaggactttgtataaataggatcatacactgtgtacttcttgtgtaaagcttctttcattctgcattgtgtttttgaaattcttttatgttttggcatgtaacagtagtttgctttccaaagtggttattctcttttacacttccaccaatagagtatgagagtaccagctgaccctcattctcaccaatgtttagtgttcttttaactttagtcatttgggatgtatgtagtagtatcttaatgttttaattcccgtctccctcatgactcttgatgttgagcaatttttcatcttttttttttttttttccggtattcgtatattttcctttatgaagggtgatcatagctcactgcagcctccacctcctgggcttaagcagtcctcctggttcagcctcctgagtagctgggactataagcacacaccaccatactttactaatttcttttagagatgaggtcttgctgcgttgctcaggctggtgtcgaactcctggcctcaagagatgctcctgcctcagcctcccaaagtgttgagcttacaggcatgagctaccatgcccaggccttttgcccattttttttggttgtttgagacggggccttgctctatctccaggctggagtgcagtggtctgatcttgtcttactgcaacatccacctcgtgggttcaagtgattctcttgcctcagcctcctgagtagctgggactacaggtgtgtgccaccacgcccagctaatttttgtatttttagtagagatggagtttcaccatgttgaccaggatggtctcaatctcttgacctcgtgatttgcccgcctcggcatcccaaagtgctgggattacaggcatgagccaccatgcctggcccttttggccatttttaattggattctttctctttgttgttgagttgtaagagttctttatatattctggtactggatccgtatcagatagatgatgtgctaatattttctcccattctgtaagttgtcttttcattttcttgatactatcctttgatgcacaaaagcttttaattttgattaagttcagtttacctatttttttcttttgttgcttttgcttttggtttggtttcatatttagatcatgaagatttatcattatttatttatttatttatttatttatttatttatttgagagttttatagggccgggcacagtggctcacgcctgtaatcccagcactttgggaggccaaagcgggtggatcacttgaggtcaggagttcaagaccagcctggccaagatggtgaaaccctgtctctactaaaaatacaacaaattagccaggcgtggtggctcatgcctgtgatcccagctacttgggaggctgagacaggagaatcgtcagaatctgggaggtggaggtcgcagtgagccgagatcgtgccattacactccagcctgggtgacagagtgagacttcgtctcaacaacaacaacaagaaagagttttatagttttgacttttacatttaagtcattgatccattttgagttagcttttgtatatggtgtgagatacagctctaacttcatatttttgcatgtggatacccaattgttccagcattcattgaacagtcttttctccattatcaaaaatcggttggctgccaggcgtggtggctcacacctgtaatcccagcacttagggaggccgaggcgggcagatcacaaggtcaggagatcgagaccatcctggctaacatggtgaaaccctgtctctactaaaaatacaaaaaattagccaggcgtggtggcgggcacctgtagtcccagctactcgggaggctgaggcaggagaatggtgtgaacctgggaggcagagcttgcagtgagctgagatggcgctactgcactccagcctgggtgagagtgcgagtctccgtctcaagaaaaaaatcagttggctatgatgtatgtgtttatttttgaatgcttagttcagttctattggtttatatatttgtccttatgctggtgccacatcgttgtgatttactgtagccttgcgataagctttaaaagcaagatgtgtgcatgtttcaagttggttctttttcaagatcattctggctatttgggttcccttctaattccatatgaatttgagaatcagcttttccatttttgtgaaaaagacctttggaattttgataggaaatgcattgaattgtattaatgttatgtctcccaattatgaaaatggaatttctttttatttgttttttgtttttctttcagcagtgttttacagctttcagtgtacaagtcttccacattcttggttaaatttattccttggtattttctttggatgctgttgtaaattgaattgctcttccttcctccctctttcctttcttttccttccccttccccttccctccctttcccttccccttccttcttctctctttctttctgtttttttttttttaagacagggtccactgtgtcaccgaggctggagtgcagtggcgcaatcatggctcactgcagtgttgccctcctgagctcgagtaatcctcccacctcagccacctgagtagctaggaccacaggttcaggccaccacacctggctatattattttttgtagagacagtctctcactgtgttgaccaggctggtcttgaactcctgggctcaagtggttctcccaccttagcccctcaaagtgctaggattacgggcaggagctaccatgcccagcctggaattgttttcttaattttcttctggattgttccttgctggtgtataaaaacacaactgatttttttttctgtttcttttttttcagacagggtttcactctgtcacctaggctggaatgcaatggcatgatcacagctcactgcagccttcgcctcctgggctcaagcctccaccttctgagtacctgggactaagggccataccaccatgcccggctaatttttttttttgagacagggtcttgctgtgttgcccagtctggtcttgaattcctgggttcaagtgagcctcctgcctctgcctctcaaagtgccagaattacaggcatgagctaccatgcccaaccacaaataatttttatgtgttgattttgtactttgcagctttcctcagtttatttattggctcagataccttttttgtagattctttcagcttttctgtatataagatcatgacatctgcaaatagaaatacttttacttcttcctttccagtttggttctattttcttttctctgactaattgctctgaccggaacgtctactacagtaacaaatggcaggggtgaattcaggcatccttgtcttattcctgattttagggtgctcactcttagtcttttgccattatattgttttatgttggttttccataacctcactatgctgaatagcagtttggcactctgtctggtagatatactatagcttatttaactggtcctttactgctgcattaagtagtttccgatgtgttgctattactgttagtgctacagaggataatattgtacattgaatatttgtgaatctttatctacaagatagagtcccagaagtgaggattgctgggtttctcttagttttctgattctaaggtgactatgtcctacttttagctccacattaaagtagaacatttctaggctgggtgccatggctcatgcctgtcatctcagcactttggtaagccaaggtgggaggattgtttaaggccacgagtttaagaccagtcagggcaatgtagtgagacccatctctacaaaatgttttaaaaattagacgagcatgatggtgcgtgcctgtagtcctagctattcaggaggattgtttgaacccaggaggtcaaggctgcagtgagctatgatggcaccactgtactccagtctgggcaacagagtgataccctgtctcaaagtagaaaatttctgtggagtagagtaagtatcattagctgatccaggcagtagaataggtggtgtggctattggaggtgtggaggaggtgatgttctagaacaagcttgtccaaccctgcgggctgcatgcggcccaggacggctttgaacgtggcccaacacacacatttgtaaacttccgtaaaacattatgagattttttggcgattttttttctttagctcatcatctgtcattagtgttagtgtattttatgtatggcccaagacagtccttcttccagtgtggcccagggaagccaaaagattggacacccctgctttagaagaataaactgatagtagcatccaagttatttgggagacttgcttctgaggaggagtggagtagtttgtggtagaccagtgctgctgctgagaacaactagaaaatcaggtaaatgtaaaaaatagtaatttcatgttatttaagagctatagaaacagctatgacgaaggattgaaatgtacagaaatgccagataaacctttcagaggttacttgaggatttgtaactgtgtttccctaaggagacgcagcagctgagaatgtagttttggcctaggctaagcaatactgctggggggcagtagatgttttggtggtcacacaggactggagtaacaaaacccattggacactgaattgaaagtccaggagggacatatcttcgattcagtggctaaccctggagatggactgattccctttcatagcaaaggatgaacccattcttaatgcaagataacatcatcttgttcttgtgtgattcttatatatacagtgtccagtattcagtacaacattactagtcctatgaagacagataaattaatgacttaactaaaagaaaaatcattttagaagcgatctcaggtgatcctgatgttggagttagcacataaggactttaattaattaagattaatagcttaaccacaatgagctatcacttcatacccagtaggatgactaaaataaaaaggacagatataacacgtgttggtaaggatatggaaaaattggaatcatattgttggtggcacagctgctgtgaaaacagtttggttgttcctcaagaagttcaacataggctggtccaagtgcagtggtgtttacaactaattaatcacaaccatttacagatgtagttgttccttctccactcccactgcttcacttgactagcctttcaaaacaaacaaaagaaggtcaacagagttgctgtatggcccaactgttctactctgaggtgtataccaaagagaaatgaaaacatactttcattcagaaacatgctcataaatgttcatagtagagtggcattactcttaatagtcaaaaagtgtaaacaacccaaatatccattagttgcatagataagcaaagtatgctgtatccatacagtggaatattattcagttctaagaaatgaattattattctgctatatgctacaaggtagatgaaccttgaaaacatggtgattcaaataagccagacacataaggacaaattttgcatgaatatggttgtatgaggtatcaagaacagggaaatccattgagacaaaaagtagaataaaagttaccaggggatggggaagggggggatgggaagttactgttccatgtatacaagatttctgtttgggataatgaagaagttctagaaatagatagcggtgatgtttgtacagcattgtgaatgtacttaatgccactaaattttacacttaaaaattattaaaatgataaatcttttttactcttagtaaaagatatgtgttaaaaaaggaatgaactactggtacatgctgtgacacatggatgaatcttgaaaacttgatgctaagtaaaagaagtgggtcacaaaataccacttattgtatgataacatttatctgagatacccagaatcagcacatccatagagtagactagatgttgcccaggcctgggaggtgagaggaggatagctagagaatgggatttgactgctggcaggtgtggggtttctttttggggtaatgaaagtgttctaaaattttattatggtgatgattacgcaaccctctgaatatactttaaaagcactgaattgtacattttaagtgagtgaattgtatggtttgcgaattatatatcagtaattattaataagcttagataataaatagcaatgaagatataatacatattaatggatagatggaaattgttatctgaggaaagaaagtgtctaaaaccatatataattggagtcatagagcatagaaaagagggtattaaccaatatttgaaatggtattgactaaaattttccaaaattgatttaagatttaagggtgtctgtgaatcccaagtgggataaatacaaattaaaccattcctaggtacatcatagtaaaacagcttacaactgaaaacaataataaaacttttaaaacagccacgggggaaaaataacacactaccttcaaagtaacaatataagactaatagctagcttgtaatcccagctagttgggaggctgaggaatgaagactgcttgagcccaggagttcaagaccagcctgagcaatgtatctagatgtccatatcaaaacaaaaataaaaactgatagctgtcctcttgataggttgaatgaaggagggaggtagatcactttgattgttacagtagttcacacctgagccaggcattgcaaggagagatggatggattctcattaagttagtggagtatggctacctaagggaatacagaaagacttccctagagcatgccagtatggatactttcaagggaaatccatttctaaattttcaacttccacattcactcttttctaaaattccaccctgtgatggaagtatcacagcagtttttcctttctgtttctttcacaattacccattcccagtttgcaaagaaaggcatacctctcttgattcttactgtggtgctttgcctcagaatgtagcagccttcagatggcctaagacaggaatattttgaaatactggtattgatgtacatagaattcatttttaatgagttaggtatcagatcctagtcagatagtttctacttctttgctttcagcacaattgatgttagctattatttttgtgttctctttttattttatttttttcattcctcacctaactggtagatgttagccattctttaaagatggatcattaaaaataaattttaatattagatcagtatggatttttttgttttgcaaatggctcaggaggtgttcaaataattgaatgatataataagaaaaacatattctagtctcatctacttatttatgtgaataagacttctcagggcaaagacatacatttatacaaataaaagaaattatgctgattcctggatttataattgggaggaaaaaagtttcatccaccccactaagagttgatgcatccagtaaaattttacatatgcatatattttatgtatgtgtatgcacgatgtaattgttgtttggattatttgtatacttaaaatttggatagctcaatccttggaaaacaatacttgaattttataagcacaagaaatttcaaaatcttcaatttaaatttatttacatatatttttagagaagtaggattaaaaaataaatgtaagactttcaagcatgaaaatacaatatactgctgggtgcagtggcatgcacctgtagtcccagctactcaggaggagtccagcctggacaatatagatagtgagaccttgtctgaatttaaaaaattttttaatttgtgtatgtttgtgtctcagttattttttaaaaaaacaatatgctctgtttaaattgttatcaggagccaggtgcggtggcccacgcgtataatcctagcacttttttgggaggccgaggcaggtggatcacctgaggtcagaagtttgagaccagcctggccaacatggcaaaaccccatctgtgctaaaaattcaaaaattagccgggcatggtggcgggcacctgtaatcccggctgctctggaggctgaggcaggagaatcgcttgaacccgagaggcagaggttgcagtgagccaagatggcatcattgcactccagtctgggggacaagagcaaaactccatctcaaaaaaactaaaaaaaaatttgtatcaggaaagtgaaatggagatacaaattctttattgcttaggaagaattcatttatagttttttttttaatgcatgatggtatatatatcatcattatggaatgtaggttatattggatacattttaaagagtgaaataacagttttaatatattaatcataaaaagttttaaatgttaacataaatatccaagaatttaacagtttttctaaagtattttaacagatttctgaaaaaaaattttaattatcattgccaaggtcagcactagggtgaggcaagaaggcacctagagtgcaaaattgaagaaggttcttactctcaggattctgcaagtgcagcatcagcacttaggggaacgtaaaagtgagtgcctccctaaattaggcaccctaggatgcttgcttatcctagttccaaacctgatcactagattatttaacatgagaaattcgcttgtgaatcattgactttagaaaaaaataattgcaaacattaatcatttttccatcaactgcttttaatttgttttttagggtgggattaaaaactcagcctgaatcaaaatgccctgagctgcttgccaattactgtgacatgttgctaagaaaaacaccattaagcaaaaaactaacctctgaagagattgaagcaaagcttaaagaagtggtacatgaattttttgtatttcaacttttaaaattaccttactttgaatttgtgttttgcttataggactttctgtgatagtatcaatttaaaaatgtattatctgtaaagaactaatgttacgaagatttgcagtgcaagacctctcggggggttatttttctttctgaaaatttttattctacagcttcttgaaaggaataccatttaattcctctcctttcttggttatttttaggaattaagttctagctactaatacaggacatatcattccaacaaatttggaatgatagttgacagattgggagtttttcactccttcctttttgtgagagtccaagatagatagcaagggatgaatgagagtagattaagtagttgttttcatctttgtcacccagttgttagtgtaatgatgtaagcccaggaatacaaacaagaaaaaaaataagatattgggcaagtgtagacagaaaggccgagagagatgactagtgtcagaaaaaaaagtgaaaaagataagtagaagagacactttgcagggggacattgatttttttcatgtaaagtatatcgttgcattttatacaaaatctaaaaaactgatatttagaccgactaacaatttggttatagtctcagttttgctaacctttaaagtagtgtatcaggactgggtatttctcagagatggataattcagtaggcctctatctgtatatgctcataaaagtttctgacttgtgacaattggtggatatagaaaggtctaaattcgagagatggtaagagtatataagaactgaaagtaactttatttttcatacagctcttggtacttaagtatgtacagaacaaagatgtttttatgaggtatcataaagctcatttgacacgacgtcttatattagacatctctgccgatagtgaaattgaagaaaacatggtagagtggctaagagtaagtaaatttttttaaatatttggttttctaatacattacatcatttatatgtgtgcttaagtaatacattttggagatattgttaatgtcaaagaagtaggaaacattttataagaatatagcgtcagttaggccgggcgcactggctcatacctgtaatcccagcactttgggaggccgaggcaggtggatcacctgaagtcaggagttcaagactagcctgaccaacatggcaaaaccgcgtctctactaaaaatacaaaaattagctggatgtgctggtgcactccggtaattccagctgcttgggaggctgaggcaagagaatcacttgaacccaggaggtggaggttgcagtgagccaagatcgtgccattgcactccagcctgggtaacagagtgggactccatttcaaaaaaaaaagaatataccatcaattatataaaataaagtgatatctaataaatgttcttaatactttcagtaaagtatctttgttcttgagttgtttctactgtttcactcccatttgtacctcaactctcatttaaactgaccttattaataaatagactacaggggctgggcacggtggctcacacctataatcccagcactttgggaggccaaggcaggtggatcacaaggtcaggagatcgagaccatcctggctaacacagtgaaacccagtctctattaaaaatacaaaaaaattaacgaggcgtggtggtggggggcctgtagtcccagctacttgggaggctgaggcaggagaatggcatgaaccctggggggcggagcttgcagtgagctgaaatcgagccactgaactccagcctgggtgacagagcaagactccatctcaagaaaaataaaataaataaatagactgcaggacaaattattatatctttaaggtattttcagtactaaatgcttaactttagagatgtttataaatgataacaataaatacttctgtatagcaaaaagaacctttaaatgatggcctatttagggtaatcaatgctgattataactaaattcccatataaagtattttgagttctttttttgttttaattattaaagtaaatatctttaatttctgtgtatgtatataactctctccacatatatatggagagagagagagtgcgagcaagcacacacgagagagacctacagatattttaacttatagctagcccttcgcatggaactttaggatagtaaaaattactgtgctaactgaaactgcttagtaggaaaaagaatgattattctgtgactttttaaaactattgtcaaaagactcaaaactcttactgtcacttataagtatataggaaaaaggggaaaatagcaaaactaatacatatttactacgagaaacctttagaattaaattttctttctttctttctttttttcttttttttggagatgtagtcttgctgtgttacccaggctggattgcagtggtgcaatcttgactcactgaaacctctgtctcccagattcaagcaattctcctgtctcagcctcctaagtagctgggactacaggtttgtgccatgacgcctggctaatttttgtatttttagtagagacacggttttgcatgttggccaggctggtcttgaaatcctggtcttaagtgatccgcctgcctcggcctcccaaagtactgagattacaggcgtgagccaccacacccggcctatgttatttctttgttaaaaaaaaaatatcaagacccaacagtaaaatgacaaacaaggctaggcatggtggctcacacctgtaatcccagcactttgggaggctgaggagggcagatggcttgtgctcagagtttgagatgagcctgggcaacgtggtgaaaccccatctctacaaaaatttaaaaaattagctgggtgtgatggcatgcaccttagtcccagctgcttgggaggctgaggtgggaggatcgcctgagcctgtgaggtggaggttgcattgaacagagatcttaccactgtactcctgcctgagcaacagagtcagatcctgtctctctcactcacacacacacacacacacacacacacacacacacacgacaaataattaaaagcaggcaaaggattcgaattgacatctcttcacagaagatagacagatggccaataagtgcatgcaaagatactcaacatcattagtcattagtgaaatgcaagtgaaatgctcaacatgttggctcctgcttatcccaaatattttgaaaggctgaggtgggaggattgcatgaagccaggagttagaaactaccctgggcaaaataacaatactccatgtctacaaaaaatacagaaatcagctaggcatggtgatgtgtgcctgtggttctagctactcaggaggctgagatgggatgattgcttgagcccagaagttcaaagttgtaatgagctgagattgtgccactgcactgcagcctgggcaacagagtgagaccctttctcaaaaacaaaaaaaacacaaagagatactactttattcccactagggtagctaaaataaagacagatgataacaaatgctagtaaggaagaggagaaattggaaccttcgtaagttgctagtggagacataagatggtgcagacactttggaaaactgttgggcagttccttaaaatgttgaacgtagagctgacccagcaatttcactcttaggtaattcatttgaagagaaatgaaaacatgtttcatgtaaaaacttgtaaacaaatgttcatggcaagattactaataatagtcaaaaagtggaaacaacccaaaatgtcagtgagctaatgaataaaatgtgatttatccatacaatggaatattttttgtgataaaaaggaataaactaataatacatgctgcaatattaggtgaactttgaaaacataatgctgagtgaaagaagccaatcccaaagaccatatcgtatgattccactaatgtgaagtgtccagaataggcaaatccacaaattccaggagttggggccaggaggggaaatgacgagtgactgtaaatagtatggggtttctttttggggtgatgaaaatgttctaaaattagatagtggtgatggttgcacagttctgtagatatactaaacttcattacactgtatattttatttttatttttattttttatatttttttgagacagagtctcactttgttgcccaggctggagtgcagtggtgcgatcttggctcactgcaacttctgccacccaggttcaagcgattttcctgcctcagcctcctgagtagctgggattacaggcgcatgccaccatgcccagctaatttttgtatttttagcagagatgggtttcaccatgttagccaggctggtcttgaactcctgacctcaggtgatccacccgcctcagcctcccaaagtgctgggattacaggcatgagcccagccaaattgtatactttaaaatagtagattttatggtagataaattatctgacacagtaaagctgttaataaagagtagtttgaatagcttttgccttcttgtgtaacttgacagagtaagcatcttttctttgccttggagagttgtcacaccccctgtaatttggatgatcttctagcattttatcttttgggctgtcagtgtcatgaaatactgagaattcctttatagcatttttgccaggatcacttcttctagggtatcttatcttttttgtcactcaccacttttatcttttatgttggtaatttgctttcactaagttcctcaacactggcattgtcagccttactaccacagtcagctttcttctataactccatttatgttctattttattttcatttccagcattatcacttttcatttcctgtttacttttatatctttgccaattatcttgtttgattattcttttttgtaagtagtcatgtgggtttattactggaagacaaggatgcaatgaaactgcatactttgctgtctgcagtttaactgaataaacaaatgactaataggttgtgtttacattttttaaaaatttatttatttaattttttcaagcaacaggatcttctgttgcccaggctggagcgcagtgacacaatcagagcttaaactcctgggctcaagcaatccacccacctcagccttccgagtagctgggactatctcggcagtatgccgccatatcctgctaacttttaaaatttttttgtagtgatgggggtgtcactgtgttgcccaggctggtcttaaaatcctggcttcaagtgatcctcctgcttcagcctcccaaagtgctaggattacacaccatgccaactaatagattttgaaagaagtattgtggttagtcattgttacttttgtcatgatttgtggatcaaagagctagaaataaagtttttacttcatgcagttaaatttattatatagtgtcaactgaaagttgagctttgttcttggggaattggtattatttaactgtactgtggtaactgaaattcatacatactaaaaatgcgcaaagcagggaccccttgtaataccgtattttgtttctaagtagcaaatttcataggtattagacaataaaattctaataaatgagaaaaattttgtattaaaacatttaagacttagtttttctattaaaatttttcccagtaatatatcagattatgtatttattacctcttccttctttggtttatatttataggaagttggtatgccagcggattatgtaaacaagcttgctagaatgtttcaggacataaaagtatctgaagatttgaaccaagcttttaaggaaatgcacaaaaataataaattggcattaccaggtattattttataattacatgtatatattttttaaacttagaagaatatctttgttttccagtaaattaaaaataaacctcagcagtaatagatcgaaagatgttatgaagtccatttccgtggagacagctatcaaagcagtgtgttagatttacagatctttatttcaaaacaaaaggacacttttaacaaaatctttatagtcttattgatttttcacccaaagttaccctgtatttattttgaattttatccattgttaatttactttatattcctgatattcttctctatagctgattcagttaatataaaaattctgaatgctggcgcctggtcaagaagttctgagaaagtctttgtctcacttcctactgaactggaggacttgataccggaagtagaagaattctacaaaaaaaatcatagtggtagaaaattacattggcatcatctcatgtcaaatggaattgtaagtagatagtgtgttagttatttcagctttcagtttggatgaaagtagcaggactccgcagaattgcttaaacaaaatagatttttgcctctctcacatgtaaaagtttgagcagaaatagtgaatttttttcatgaagttgatagggacataggcttctggttataccatcatacttaagatactgccgttgtctacagaattcaacatgatcccaactatctcagtattcctggcaacagaaagcaaaaggtgagggtagcttacacctttcattagggacaacttctagaagtttcctctgtcattttccatttgcatccgccagtactcagtcacttggccacattttgttacatggaaagctgggagatgagcgtgtattctgggcagtcattaacgtcttctaaaatgtttattactgtgaaagagtggatactggaagacagcaacctttttcatatataaattcatgtcatagatattaagagagaatcatcatgagattctttattaaaaatctgttttatctattatagataacatttaagaatgaagttggtcaatatgatttggaggtaaccacgtttcagctcgctgtattgtttgcatggaaccaaagacccagagagaaaatcagctttgaaaatcttaagcttgcaactgaactccctgatgctgaacttaggaggactttatgggttggtttatgtttttttgtttttaagactgtatcctctcatgtagcaggaaatatatgattggcttgtaatatattagtaaattcataacagtttcagaatgtcttatcaagaaaaatagaggccgggcacagtggatcacgcctgtaatcccagcactttggaaggccgaggtgggcagatcacttgaggtcaggagttcgagaccagcctagccaacatagtgaaaccccatctctactaaaaatacaaaaattagctgggcgtggtggtgggcgcctgtaatcccagctacttgggaggctgaggcaggagaatcgcttgaattcaggaggtagaggttgcagtgagccaagattgcgccactacactccagcccaggcaacagagtgagaactccgtctgaaaaaaaaaaaaaattatgcacacacacacacacacgagatatttatggaaaaaataaattgcaaataggcaagttaccaaggcagagaaaagtgcttcaaaaaaaaggagaggctggggcagtggctcatggctgtaatcccagcactttgggaggccaaggtgggagaagaggattgcttgaactcaggagtttgagactagctaggcaacatagtgcaatcccatctctaaaaaaaaaaaaaaaaaacaaattagccagcttggtggctgtatccccagctacttggaaggctgaggtgggaagattgcttgagcccaggaggatgcagtgagccacaatcacaccactgcactccagcctgggcaacatagtgagacccatctcaaaaatttttttttttaaaaaagagaaagattgagttggtatttaagtgttacctgtgaggaatgtgaccagctatgtactttttttttttttttttttttttttttgagacactcttgtcgctcaggctggagtgcaatggcgcaatctcagctcactgcaacctccgcctccagggtttaagcgattctcctacctcagcctcccaagtagctggaattacaggcatgtgccaccacactcagctaattttatatttttagtggagacggggtttcaccatgttggtcaggctagtctcaaactcctgacctcaggtaatttgcccgcctcggcctcccaaaatgctgggattacaggcctgagctactgtgcctcagatacatacttaatttttatactgagaatgtgttcaaagattttatgataatcaaaaatctaaaaactttggtctgtttgaggacttgtagattgtactcattagccccctgctcacaactacattttattactactccatagacctcttaaaagttccaggtttttttgttgagacagagtcttgctctgtcctccaggttggagttcagtggcacaatctcagctcactgcaacctccatctcccaggttcaagcgatcctcccacctgagccccccaagtagctgggactacaggtgcatgccccacgctggctaatttttgtattttcagtagagacggggttttgccgtgttgcccaggctggtttcagactcctgagctcaagtaatctgcctgcctcagcttcccaaagtgctggaattacaggcgtgagccactgcacttggcctgaagttccaaaattaattattacctatggaggaaatagctggtatataactggcagatggtgtttactatggtcctgtgtgaccaatcccagtttcttgtcttactgtaaagagagcatttattgctttctcataaccaactcttttcacctcttctctttcctcattatgcattcaaatgttatattcatggaagtaccacacattttaagtttgtgtttgtaatctttttcttgcctatgttgattatgtgggagaattgatcttagtattccatactgtttatagatgctaattgttttctccttattcttcatagtctttagtagctttcccaaaactcaaacggcaagttttgttgtatgaacctcaagtcaactcacccaaagactttacagaaggtaccctcttctcagtgaaccaggagttcagtttaatgtaagctcgttagttgatctaaaataaaaacaccttgtttgaattttagcactttgttttttgcaaaataattgttttccttacattatatttaaaacattatatactgtcatcactctaaacttacatcatttagttgtttatggaaaatattaatcagatgtttacttttctatatttttcattgatacatttttggtctctgacattatactgtattgcatttcatctttcaggttgatatctttttgtgctctaaagcaactttattcagagaaagcgttttttgtgttgttttgtttcgtttttgtttttgtttttgtttttgtttgttaagacccagttaggcaataacactgaatcctaacccatatatcttcaattagctagtcactttcatggcaatataaaatattaactttgtttttacagagaatgtagtcacttgttttattaacaggttagttatcatgtttaaggaaaatacatagagtttgttttaaagcaatatgtaggttatttgtcatttaacctttaaacagttctgatattttagcatatttttaaatcttttctctcagacattgttgctataataggatttttaaagtgtttttcaccataaaatacttgatgcaattctttttgtagaaaaaatgcaaaggttcagaaaaggggtaaaatcaacttgattggacgtttgcagctcactacagaaaggatgagagaagaagagaatgaaggaatagttcaactacgaatactaagaacccaggtttgtaatgttgacagaatgtctgaagtttaaaaaaactttagttttttttttttttttttaaattttgaaatcttttttgaatttaaaagcatgtaggggctaagtgcagtggcccacacataatcccaacactttgggatgctgaggcaggatttcttgggcaacaaagtgagatcttgtctcaatcaattttttaaaaatatattaaaaatttccattccagttgaaatatgaattccagtttcatattccattgtaatgtgaaattaggaaacttatttagaaccaaaaaagttctctaatattcatttcttcttttaaaaacagtttaaaactaggattaagaccttctgaatataataagtaacacctacacatgattgttttaattttagaaatagtccttttaaaaccaaatttttcaacttttactattttcatttaatactatttgaaacttctggccagtgtactttttttttttttttttgagacagggtctcactttgttgcccaggctagagtgcagtggcaccatcttaactcactgcagcctcaactccctgggctcaaaggatcctcccacctctgcctccggattagctgggaccacaggcatgcgccaccacactcagctaatttttgtatttttagtggagacagggttttgccatgttgcccaggctggtctcgaactcctgggctcaagcaatatgcctccctcggcctcccaaagtgctgggattacaggtgtgagctaccatgcccagcccagtgtactttttaaaatataaaacaagacgaaaagattaaaaatgcatattacctatagatcatgtaataggataatgtggcagagaaaagatgaatgaataaaaaccaattgcatttctatggggcaataaataaaaggagaataaaataagaaaaatacatacacattttttaaaaagtactgtgtaggagctgtatgaaaagagtggccctttactgggagattcagaaggagagttgaataaatagaaaggttgagctctttttttgttgctaaaatttttagttgtaatttagacacaatggaatgtatctttcaaagtataattttcagtgagttgtgataaatatatatacctatgtgaacattacccaattaagatacagaacatttgtgtcacaccagtcatcttcccatgtttccaggcaggctctccgcctaccccagctgattcttattaccatcacttagttctgccagttctaggttttcatataaatggaaccagacagtatgtacttttatgtctgactttttttgctcagcatgaaaaactatattcttccattaaaggttgaataacttaaacaaaaaaaaaatttttttttttttttaatggactcaagcgatcctccttcagccttcccagtagctgggactacaggcacatgccacggcacctggcagctaggctgaataacataaaagattggtttttctgatattaatatcaagttcaaaattttaaaatttcacatgaaaattcaactaggaatatttttggaattttacaaattgttttttatcagaataaataagaatgattgagaaacttaaaaaaataaaaaaaaggtggtagtggtggaacttgccctgccaaatacgaaaatattttaaaaatctgtagtaataaaacagtatggcaagaagattaattgaagaaaataactttaggctcggcgcggtggctcacacctgtaatcccagcactttgggaggccgaggtgggcagattgcctgaggtcaggagttcaagaccagcctagccaacatgttgaagccctgtctctactaaaaatacaaaaactagccagctgtggtggcgcatgcctgtaatcccagctacttgggggtgctgaggcaggagaattgcctgaacctggcgggcagaggttgcagtgagcctagattgcgccactgcactccagcttgggcaatagagtgagactccatctcaaaaaaagcaaacaaaaacaaacaaaaaaccttactctgtaagtatagaagaatttatacaataaaggaaataatttctatgacctatggaaagaaaatgaattattcactaagtggtgttgggaaatttttctgtttggaggaaaagtaagaagatattcgtagctatgccaggataaactcctggagtaaagagttgaaatgtggccaggcgcggtggctcacgcctgtaatcccaacactttgggaggccgaggcgggtggatcacaaggccaggagatcgagaccatcctggccaacatggtgaaaccccgtctctactaaaatacaaaaaactagccaggtgtagtggtgcatgcctgtggtcccagctacccaggaggctgaggcaggggaatggcttgaacctgggaggcggaggttgcagtgagcggagatcgcgccactgcactccagcctggcaacagagcaagactccatctaaaaaaaaagagttgaaatgtataagcgggtgtagtcgtacgataagatgtgcagagaaattgaagttcttttgttttgtcttaatgtgacccataattatgtacaatccaataatctaagctgtctttaggtaatgctcagactttatttcctcctgatcctactccattcatcctcattcattgctatttgcataggtggcatctggatatattgagtgtgagagggatttgcttgactggtaatgacagtaaagggagtgtcatatctatgcagttatgacagtgtcctggattcttgcttttggcagctatgaagtagttgattatctttgggaatttggctttctgttggtaactgctgctgttgtctacagcagatgaatttatggttcattctttttctagttgctaagggccccatggcctcttccctgctctctttcccctgctcttactgagctcttgaagcctctgagactccactacatcttctgtgtggctccttggcctacatggcacactgtcattgttctctgcagaataatgacaggatcaccttgccctgtcattaaaggccctgtggcaggtccattagctcgaaactcttgctgtcacacttgggaactgagggagagtcagaagtgcagattatttccctcatactgtgctactctttaagtgacctccagcatatcaaatggggaccagggccagtgtccctctgctctcttttcctcttaggttctctaactaccaccttcacctctatctaaggagaaactgggatgtttacaaatgcctctgcttttcctctgggttcctgtaatcttcaagtgcctgaaggaacacactttccttcttccttcttcctctctgaacccctgacataaaccccaatttatgatgatcaggagcctggtatctgaataccatcaagggtgagaggaattcacttgaccttctggtgtcatcatatcttttatttatttttgtttattttattttattttgagacagggtctcaccctgttgcccaggctggggtgcaatggtgtgatcttggctcactacaacctccacctcccaggttcaaatgattctcctgcctcggactcctgagtagctgggattagaggtgctcgccaccacactgagctattttttgtattttttgtatttttagtagagatgggtttcaccatgttggccgggctgatctcgaactcctgacttcgtaatccgctccccttggcctcctaaagtgctgggattacaggcgtgagccaccatgcccggcctatttttctattcttttgagacagggtctcactctgtcacccaggctggagtgcagtggtacaatctcagctcactgcaacctctgcctttcaggctcaagtgatcctcctgactcagccccctgcgtagctgggaccacaggcgcgtgccaccatacccagctaatttgtttttgtatattttgtagagatggggtttcgccatgttgcctaggctggtctcaaactccacgactcaaacgatccacccacctcaacctcccaaattgctgggattgcaggcatgagccaccctccctggctggttatcatatctatataggggaagttgaaggagtttttctcttactgaatagtgcctgactcccaagtctgttgatttgcagcaaaattatatttttaaacgttaaaagcaaatgttacttctttttctattttgacatttcttttacaacaaactctaatctgtgctaagatagatatatgccttttgttttggagacagggtctcaggctgtggtgcagtggtgtgatctcagcttactgcaacctccacctcccaggctcaagcaatcctctttcttcagcctcctgaatagcggggaccacagacacacgccaccatgcctggctaatttttgtattttttatagagatggggtttcgccatgttgcccaggctgttctcaaactcctggactcaagcaatccacccacatcaccctcccaaagtgctaagattacacacatgagccaccacacccggcatatacatgccttttgttgggtaaagagagagctggtactggaaaaggtaaaagagaaaagaatatttaatgattttctgataactcttattgtaaacttaacagtaattaaggaaatcatcaagaaaaattttgataaaatgacctagatgaaaaagatttatttctttagaaacttaaaagtgactgggcatcgtggcttacacctgtaatcctagcactttgggagaccagggcaggggagtatttgagtctgggggttcaagaccaacctggacaacatagcaaaaccttgtgtctgtatttaaagagaagaaggggaaaaaaaaaaccttaaaaacatttaattgagtcaatataaactgaagataatatttgtagcaaatataattaattaatctggtaaatatataaagagtactacttaatgacttttaaaacagaccccacctgacctgtactgctatacaaagaaataactgaatacaagggaaaaatttggtgtaaggggtttgttatattttaattaatgtttaacatgataccaggttatatacacattgttttcacaggtaagataacttttaagaatgtgaatggcatgggaaaaaaggaattgaaggaaataatattaaaacattaggtgtagttttctttcagcagagaagcagaggtaattttgcttttccttatttttcaaaatctctatagtcagattttttttaaatacatactttaagttctgggatacatatgcagaatgtgcaggtttgttacatgggtatacacgtgtcatggtcatttgctgcacccatcaacccgtcatctacatgaggtgtttctcctaatgcttatccctcccctatccccccaccccaataagcagattctcttttatggggcatgagaaaacaaaagatgtttttatttgttaagtaaaagatactagtctcaacattaatcccctagtgattattattcatttgggtagatgttggatagaggatgaatatgcataaaaagtcatttttcagtttgttgtacttaaaataatttcgtatattaatgcgcttttatttttattttttcttttaggaagctatcatacaaataatgaaaatgagaaagaaaattagtaatgctcagctgcagactgaattagtagaaattttgaaaaacatgttcttgccacaaaagaaaatgataaaagagcaaatagagtggctaatagagcacaaatacatcagaagagatgaatctgatatcaacactttcatatatatggcataattttgaatatcatggacaatatttagaacccaaattttggagtgcttgggcagaaagttgtaaagtttgtgctggagaaaggtttatttggactttgattacataaatattaaaatctctgccttaccttacaaaaacaactatattttgccaatcacattagttagcatgatggcattcccttcatgttgcacactctttgacagcatgctgttttgtggagaaacttgcattcatgaagagcccattatcaacttttaaaagtgaatttgatttgtacccaccaggagaaatacagttgggaagggtgagggtggggttcttgttgcttttttctcttttttcctctcttaaaaaatgtacttgcacaaggaaggatcttcagatattcatgcactgaaaaatgctgttatcttttgtttttaaaaaatgcaattaaaactagaaatagcactcttggtttcttttgatgaaaagagtgagctggtcaatgcaacattgggaaacggcagatgtaggtgagaagttaagtatttaatagtatcaaattgttcaaacattgctcagtataataactggattttaatggtgacctaaaaatggtattaaatattttcaactttcaaatgttggttttctttaagcaggagactgctattttagttgttgttaaatgatgaggagtttttttttttttaaatatggctggaaagcttgttttgaaaaatgaagcttatattaattgttgcttcaatagtttaaaaaatttatggagataggtaggtcattatgattgcagagccaaaatagcaaaacaaacatattaagtgtgtttactaaacatattgtgtgtttactaacacacttaatgtttatatacctaatatttattatgccatatctgaatttattaaaaacaacacagaaatctcctgctctgatatagttatgtaactgatctcttaatctgtagcatagaagtattttggtattttaaggtctcatgattagggatttgtagcctcaggtttgaatcagtcacctaggggtaagagaaaaaccacaacataagacctgaaaaacagaagcaaaattgttgcactcttaatacgagcagtaaacttgccaaatatatgtacatatatatttatatattttaaaaataaacattttttaaatcgtcagaaggcaacatttaccatgttcctttcagtctatccaaagtagcaacttaactagttgctggcaactgaatacccagagtagtggaaattttaggacttgaggacgtgaacaacttgaaagagaaaattgattccccttgaggaaagaatggctcaacgtggatttttattcattgtggtgcacgtttcaaattttcttgcaaattattttatatcttatttgatgttaagtaatatttttaaagtatggtttttgaagatagtaggaaatggagtacagaaaggcatacagtattatgttacagtggagtgctttcaagagcatttcgtaggatctgtccccatccgaagaggctttgtgaactgcctgctgaatggaaggaaagcaactttaaaacatttagagttttgctgagtatagccaaatgcctgttctgaaacttataggaaattggaattttgtttaaaattttacactttaaggtagcaaatgtcaattattagaccgagcatattgtgaagaattaaactaaaattaatacgtacagttttctctaattaggtgactgttcataatgggtatatttggaatttagaagaaataattttgtagtaattgtggcccttatgtttaacagataattcagcattggcgtatttgcttgtcccaatacaagaatgccaaaggaggaaacaggaaaaattgccgtccattttaaaaatttaggtttgttgttttaaaccataattgttctcagaacttttttggaacttctaattttgggtcatttaatttaagaatgagagtcatgatgttttgatttatgaaggtgaatttaatgcaaaagtgggtaacactacattcatagcaaagttttttattaaattttataaatttttaatagccaattatgtcctaattgtattttggggaatgaacagcagcaaatactgtaaatgtacagttttcttttttttttttttttggttatgtatacaaaagttttaactactttttggtgtttatgaaaatcatttagttgacaaggtgcctatgccattgttaaattttctttaagtaatttaacaacagatttgctaatttaaaaaaaaatgaaaaaaaaaatcttaccagcagtttgtaaaggtctggaatcacagttggcatcctttattcaggtctcttctctccagcgtacacttaaaattggtgccgagcagggatataacctgcagttaagtgaaaagaaaatccagcctccccctccaaaaaaaaaaaaaaaatttaatttttaaaaattagtggtatggcaataagacacttcagaggctatcttaacctctgaatacccatcttctagtttaaagacagagacatcccatctggaaaatgttaacttgtgttgccatctcgttgccggagtaagtagacataagacagagtttaagaagtaaaaatatagaaaaattttgatggtcacaatgagataaatattagaatattactattccaatgattaaatgaggatcttgaaataaattctgaagtcttccaatttttacatttattggaggggtccctgagttctgtcaacttttttatttaagtctcttgctcttattttgtgcataaatgttaaaccttccaaaaatgaaatgttagctttctttcttttactttttattaaatttaatagaaaatatgacctgagtagttaaaaagtattttgcattatttgcagtaagatgtctctagcactgctcaaagggcaaattttaaaacttcagtctgggtgaaagatttgctagttttacagaaagatttgctatcttaaactcaagctggtttttctgttctcatgtaagtgactgggatgctgtcttatgaattcttccaaggtcatgtttgtgaaataaacattacatgagagctttcctgtcatctacactatatgttgtctggagtgttgaacaaatttattttagtttctaagttgtaatctatcctcatatggtctatacgattttgaatgtgtgccactacatactgagatgataatgctgtacaattttaagtggtagcagtttctgtatgcagtaggctgaaatattttgatgaactgcttaatttttggattttattttttaagttgtataatttattttcttgcaaaataaaaatgtaatataaaagcttt

SEQ ID NO: 367 - DNA, 4293 bp, Homo sapiens
  source 1..4293: mol_type = genomic DNA; note = NC_000007.14:c4862030-4857738 PAPOLB [organism=Homo sapiens] [GeneID=56903] [chromosome=7]
aggttctggaacgcagccgctgaggggtctggcgccatgttggggctgaggggaaggaggagaagctcctgaagcggcgggcgcgcagcgggagtgggagtggggtcggaccagggcagctagaagccctgcccttccgcctcagcggatcatgacccgggcggcggccgcgaaggtcgcggtggtgggggacgtgccctggcggggcgggcgctgaaagatgatgccgtttccggtgacaacccagggaccaccgcagccggcgccgccgccgaatcgctacggcgtctcctcgcctatcagtctagcggtccccaaggagacggactgcctcctcacccagaggctaatagaaaccctcaggcccttcggggtcttcgaagaggaagaggaactgcagcgcaggattttagttttggaaaaattaaataatctggtaaaggaatggatacgcgaaatcagtgaaagcaagagtcttccccagtctgtaattgaaaacgttggaggaaagatttttacgtttggctcttacagattaggagtacatacgaaaggcgcagatattgacgccttgtgcgttgcaccaagtcatgtggatcgaagcgactttttcacctcattctatgctaaactgaaactacaggaggaagtgaaagatttaagggctgtcgaggaggcatttgtgccagttatcaaactgtgttttgatgggatagagattgatattttatttgcaagattagcactacagactattccagaagatttggacttaagagatgacagtctacttaaaaatttagacattagatgcataagaagccttaatggttgccgggtaaccgatgaaattttacatctagtgccaaacattgacaacttcaggctgactctgagagccatcaaactgtgggccaagtgccacaatatctattccaatatattaggtttcctcggaggtgtttcctgggccatgctagtagcaagaacttgtcagctttatccaaatgcagtagcgtcaactcttgtacggaaattcttcttggtattttcagaatgggaatggccaaacccagtgttactgaaggagcctgaagaacggaatcttaatttgcctgtatgggacccaagagtaaatcccagtgataggtaccatcttatgcctatcatcacaccagcatacccacagcagaactccacatacaacgtgtctatttcaaccaggatggtcatgattgaggagtttaaacaggggcttgctatcacacacgagattttgctaagtaaggcagagtggtccaaactctttgaagctccaagcttctttcaaaagtacaagcattatattgtacttctggcaagtgcatcaacagaaaaacaacatttagaatgggtgggcttggtggaatcaaagatccgaatcctggttgggagcttggagaagaatgaatttattacactggcacatgtgaatccacagtcatttccagcacccaaagaaaatcctgatatggaagaatttcgtacaatgtgggtgattgggttagggctaaaaaagccagataattctgaaattctcagcattgatctcacctatgatatccagtctttcacagatactgtttataggcaagcagtgaatagtaagatgtttgagatgggtatgaaaattactgcaatgcatttaagaagaaaggaacttcaccagctgctgcctcatcatgtgcttcaggacaagaaagcacactcaacagaaggtagaagattgacagatttgaacgacagcagctttgacttgtctgcaggctgtgaaaacagcatgtctgtgccttcatctactagcactatgaagacaggcccattgattagcagttctcagggtagaaacagtcctgccttggctgtaatgacagcatctgtggctaacatacaggctactgaattttccttgcaacaggtgaataccaatgaaagttcaggggttgcattaaacgaaagtattcctcacgctgtctctcagcctgccatttctccatcaccaaaggccatggtcgccagagttgtttcttcaacatgtctcataagccatccagaccttcaggaaactcagcaacaaacatatctaatcctatagttggagtctagaggatattcttgcctcataaagaagaaaggaccaagaaaaccaaaacggaagaggagaaactcaatacaaagacaagtacaactccattagaaaaattcagacagcatcttctctattggcctctcagggaacatcagtatagatctttccggtatccctgttctccctgcaaatccaattcctgttatcaagaattcagtaaaacaggttgaatggttaaaaacaacctcaagggtccatgaacaatatctgccaactgaacctgttgtcttcaaatactaaggaaggagaatgaggggtacgggactagatatgacttgaaatagattgaggctcatttggtaacttcctttactgagccagtcttgatcagaagtccacattagtatgtgacagctagaggtactgttattaatgtatcagcaacagttacattaactatttcaaaggactactgcccttaaaatgaaaaaacctttcagctatgtttgtacccgtgactgacatctggactggatttatgcttgatgcattgttgggaaaatatgcaatacaaactggtatcagaattccttatactgatgaggcactttatattttttattagaaagtagaactaattttagatttttcaaattggtgaattttatttttccctgaagaggtttcttcactattaatcttaaaattggataccattgtgcagcggtgtactgtacttcagagaaagcataaaagtacatctagctcagtccctatgaggtagctgtaaccctttaaaatgaaatgtcaactttaaggtatgtttttgacatcaaccattagtaggtctttggttttgatggcacactatggagaaaggacacactggttttaatctgtagaactgttttagagtaattagcaatcaaacattttctttgagctatcaaagctccatattctcttgtcctcaatcattagtcctaaaacaaaaaagctttttgcctccctctcttctctttgcctgtatgcacacagtatgcttatgtgtcatttcacaagaaaaaaggaataatattctctaaaccatgatgtgaaactgacaatcctgtggccacatggcacaaaacaccaaatattggttatgatgaaacaccacattttagcaaaactttactaaatgtaatgtctatgagatatgtttctgatcttggatgaccatttgatcactgcatatgagaagttttgttcattccacagaatacctccttataggaaagttaatttccaattgcacacataagcaaaaaggcattttcttcaagaattttaaacacttttatttttaaacgatttatcaaaattcatctctaaattttacatgtagaaacataaaaaagtaatttctagcaagcacttgacatcttactggctttctgctcttttagtctacaaaagatcagcaatactttaagttaaaaaaaatctcataattaagcagtagagcatctatgattaggaaatgtgaggggcaacagatgtgaatgaatgaaagttgagtctttcttaatctagacagcaaacttaacaggctttccaattagccttgctttaacccctcccgtccctcctctaactctgcacttttcatgttaaactgcaattacttaaactcttttcctgtcctgcattaattttccaaagttggaatatagtcatgtccttttatgctgtagagacttttctttcaccattactttctgatatctagtacacagtatttctttttctcacatctttgccgtttcaccacaataataaatcgggtgaagtgtgcacaatatctgtattttgaatggctatggcgttaggttgaaatggccaggcacaaatttagtctggtcattttgtttacacattgggaaaaaaattagtttattaaacattacctgtaactgtgtctgttttaccaagctggaaccttgggactttttatttctaatttttattacctgaatgtcagaccattttttcatgtgatgtacctagtgagtggagtttgctttgttttatggtatctgtactcctggtatattcaagcactgttttgaaaacagatgacttatttctccattaaaaatgcaataaaaataaatggcaaacaa

SEQ ID NO: 368 - DNA, 3894 bp, Homo sapiens
  source 1..3894: mol_type = genomic DNA; note = NC_000014.9:73591873-73595766 ACOT4 [organism=Homo sapiens] [GeneID=122970] [chromosome=14]
ggacgccgtccggacattcggcgcgcttgccacgatcttggacgggtctcgggcctcgacctttgaattccccgctccggctccaagatgtcagcaacgctgatcctggagcccccaggccgctgctgctggaacgagccggtgcgcattgccgtgcgcggcctggccccggagcagcgggttacgctgcgcgcgtccctgcgcgacgagaagggcgcgctcttccgggcccacgcgcgctactgcgccgacgcccgcggcgagctggacctggagcgcgcacccgcgctgggcggcagcttcgcgggactcgagcccatggggctgctctgggccctggaacccgagaagcctttttggcgcttcctgaagcgggacgtacagattccttttgtcgtggagttggaggtgctggacggccacgaccccgagcctggacggctgctgtgccaggcgcagcacgagcgccacttcctcccgccaggggtgcggcgccagtcggtgcgagcgggccgggtgcgcgccacgctcttcctgccgccaggtgagccaggctgctggcgggtggtgtgagcgtcagtggcctgagtctccgtttgtttccagtgctgatttagcactggtttggttttggagcaagatcagagaagctaacattgactatgtcagtggccactctaccaaaatagagggtttggtaccgggcgtggtgactaacgcctgtaatcccagcactttgggaggccgagatgggcggatcacttgagatcaggagtttgagaccagactggccagcatggtgaaacgctgactctaccgaaaatacaaaaattagtccagcctggtggcacacgcctgtagtcccagccactcgggaggctgaggcacgagaatcgcttgaacctgggagatggaggttgcagtgagccgagatcgcaccactgcactccagcctgggtgacagagcgagactccgtctcaaaaaaagaaaaaagaaaaaaaaggattttttgttaggctgtgtactacggtttttacttgcattctatcagttagtctctataatatcccaatgaagttggtattgttattctgcagatgaaaaaacaggttcaggtcgtcaggtacattatccactttgctattaatcactaccctacagatttctacaggcatcagcctgacttgtctaaggcagaatgatgacagtgaatgaagctattaccatgtcgtcttctctagtgttctaggcacactgtctcttctccacttcttcatgtgctgctttatcacaggtcacacttcagactccactgcctttctcacctaaaaccatctctgggtatttctttttctttcctccctttctacatagacatctgaaatatcagtacactaaaaaccagagggctgatgcaacagaacataaagttttgtttcaatcttttttcttttctttctttcttttttttttttttttttttgagacagtgtctgtctctgttgcccacgctggagtgcagtggtgtggtcacacctcactgcagccttgacctctggggctcaagtgatcctccctccattgcctcccaagtagctaggactacaggcatacaccaccacactgactaattaaaaaaaaaaaaagattgtagagatggggtctcactacattgtccaggctggtcttgaactcctggcctcaagcaatcctcctgccttggcctcctaaagtgctgagattacaagcatgaaccacagtgtccagccaggaaagcaaattctttaaattgtataatggcttacatttataatattttgttctctaggacctggacccttcccagggatcattgacatctttggtattggagggggcctcttggaatatcgagccagcctccttgctggccatggctttgccacgttggctctagcttattataactttgaagatctccccaataacatggacaacatatccctggagtacttcgaagaagccgtatgctacatgcttcaacatccccaggttctcctcatgtcctttatttaatcagtctctctagaaatatttccatagagagtgtaacctttaccacgtgcagaaatgctgctctgttcctctttcacaaagatgtcttctggagacttccttggcttaaggtgctatttccactttttctgtcagatgaatttgtgatatagaattaattgtaaaatccacatgagattttatttagtaatattaaatattatctgtatattgcaaattgaatttctaatctactgtctttgcatgcttgtttttaaattttaatttcctggtgtcagagtatgttctcagattttggtcagaacttgtccacccctttcagaagccaagaacaaacttacttactctgaagtcttgctttgtaatcatttgccaatacatatggcaaatgatctgatgaatgattcacatcttgaaacaacctggttccacactattggatgcattgccacatgaagacttcagtcagacctacctgaatgtggccctgaacttgatgggatctgtggctcagcggctcagcggctcagcattctctagtggataattctctgaaatgcttataaccagtttccaagtttttcagtgattttaagatgtgtttgccatgtgttcagccagatattctgcacatgggaagaaactcccctgtcagctgaggttgattttcttgtggatgattcccagattaaagctagcagcatctctgtttgcattttagaaaaatgtttttgcattggataagttatttatttatttatttatttatttatttatttatttatcttttgagacggagtctcgctttgtcacccaagctggagcgcagtggcgcaatctcggctcactgcaacctccgcctcctgggctcaagcaattctcctgcctcagcctcccaggtaactgggattagaggcgtgcgccaccacactcggctaatttttttttgtatttttaatagagacagggttctgccatgttggccaggctggtctcaaactcctgacctcaagtgatccgcccgcctccgcctcgcagagtgttgggattacaggcatgagccaccgcacccaatctggataagttattgactcaactctcctctcttcttttcttccaggtaaaaggcccaggcattgggcttttgggcatttctctaggagctgatatttgtctctcaatggcctcattcttgaagaatgtctcagccacagtttccatcaatggatctgggatcagtgggaacacagccatcaactataagcacagtagcattccaccattgggctatgacctgaggagaatcaaggtagctttctcaggcctcgtggacattgtggatataaggaatgctctcgtaggagggtacaagaaccccagcatgattccaatagagaaggcccaggggcccatcctgctcattgttggtcaggatgaccataactggagaagtgagttgtatgcccaaacagtctctgaacggttacaggcccatggaaaggaaaaaccccagatcatctgttaccctgggactgggcattacatcgagcctccttacttccccctgtgcccagcttcccttcacagattactgaacaaacatgttatatggggtggggagcccagggctcattctaaggcccaggaagatgcctggaagcaaattctagccttcttctgcaaacacctgggaggtacccagaaaacagctgtccctaaattgtaatgcatttgtctgttgttgacatgagagattcaagatcagattctagtgttcagtaaccctatgtgaatcagatgtctcctggataacattaaagccatgtctttgtcattaa

SEQ ID NO: 369 - DNA, 1695 bp, Homo sapiens
  source 1..1695: mol_type = genomic DNA; note = NC_000007.14:73830996-73832690 CLDN4 [organism=Homo sapiens] [GeneID=1364] [chromosome=7]
agagtgccctggcagctgtcggctggaaggaactggtctgctcacacttgctggcttgcgcatcaggactggctttatctcctgactcacggtgcaaaggtgcactctgcgaacgttaagtccgtccccagcgcttggaatcctacggcccccacagccggatcccctcagccttccaggtcctcaactcccgtggacgctgaacaatggcctccatggggctacaggtaatgggcatcgcgctggccgtcctgggctggctggccgtcatgctgtgctgcgcgctgcccatgtggcgcgtgacggccttcatcggcagcaacattgtcacctcgcagaccatctgggagggcctatggatgaactgcgtggtgcagagcaccggccagatgcagtgcaaggtgtacgactcgctgctggcactgccgcaggacctgcaggcggcccgcgccctcgtcatcatcagcatcatcgtggctgctctgggcgtgctgctgtccgtggtggggggcaagtgtaccaactgcctggaggatgaaagcgccaaggccaagaccatgatcgtggcgggcgtggtgttcctgttggccggccttatggtgatagtgccggtgtcctggacggcccacaacatcatccaagacttctacaatccgctggtggcctccgggcagaagcgggagatgggtgcctcgctctacgtcggctgggccgcctccggcctgctgctccttggcggggggctgctttgctgcaactgtccaccccgcacagacaagccttactccgccaagtattctgctgcccgctctgctgctgccagcaactacgtgtaaggtgccacggctccactctgttcctctctgctttgttcttccctggactgagctcagcgcaggctgtgaccccaggagggccctgccacgggccactggctgctggggactggggactgggcagagactgagccaggcaggaaggcagcagccttcagcctctctggcccactcggacaacttcccaaggccgcctcctgctagcaagaacagagtccaccctcctctggatattggggagggacggaagtgacagggtgtggtggtggagtggggagctggcttctgctggccaggatagcttaaccctgactttgggatctgcctgcatcggcgttggccactgtccccatttacattttccccactctgtctgcctgcatctcctctgttccgggtaggccttgatatcacctctgggactgtgccttgctcaccgaaacccgcgcccaggagtatggctgaggccttgcccacccacctgcctgggaagtgcagagtggatggacgggtttagaggggaggggcgaaggtgctgtaaacaggtttgggcagtggtgggggagggggccagagaggcggctcaggttgcccagctctgtggcctcaggactctctgcctcacccgcttcagcccagggcccctggagactgatcccctctgagtcctctgccccttccaaggacactaatgagcctgggagggtggcagggaggaggggacagcttcacccttggaagtcctggggtttttcctcttccttctttgtggtttctgttttgtaatttaagaagagctattcatcactgtaattattattattttctacaataaatgggacctgtgcacaggaggaaa

SEQ ID NO: 370 - DNA, 130540 bp, Homo sapiens
  source 1..130540: mol_type = genomic DNA; note = NC_000015.10:c51338596-51208057 CYP19A1 [organism=Homo sapiens] [GeneID=1588] [chromosome=15]
gagtttctggagggctgaacacgtggaggcaaacaggaaggtgaagaagaacttatcctatcaggacggaaggtcctgtgctcgggatcttccagacgtcgcgtatgtatctcttaatctgactgagccctcaacctgtgggatcagacactctttccaggtagatagtgttggaactgagttggaggacacccagctggtgcccgctgcttggtgtgtgggggaaaatcccctacatttggtcgcagaagtcttctgtgttgatgactgttgtcgtggtgtgagagcagagggaaaacactgcttgagtgtttttctgaaataggagggcctaagaactatactgttctatgccacagaactggccccctactttccttgaaaggctggctatccaatggtgaggagaggaagtggtagcctgaaccagcctccccatttccccacctcccaccccagttcagagcccagatccagtagacagagcagagatgaggcctgcttggagccaggcaggctctattagacaacttcaggccaagaagctgcccctcttgggatgcaggactcaaaaggcttgtagcatggccaccccgtgggctgggttggtggaaagcctgggatattgctctggggcaagaggggcagaaggaagcgcaaatgaaaagccagactcctttcctaccagactccactgtcagatccctctccaactcttcctgtgtgggatgatggcatttttcacagaagaagggggacatgttgatatggcctacaaggtagacatcttcactcatctctcaccctaaagtggctgtgcccaagcagctgccatgctctgccctctttcctcttctcctctatcttctctctccaaccctctttccaccgcagtgccacacagtgacctatctccatcactggcctatttcagtgttgcccactttaaggcctaactccgagtacccttcctcatctagccttgacttcctaggccagtcccaagcactgtgagctctacaagctgcaggggctctgtggttatgcacctgggctttggaatcagacctgaccttgaaactgttttttaactgcatgactttagatatgctactcaagttctttaaagagactgtaattgtatctatttcatagggttgtgaagctttaataagaaaatacttgtaaagcacttgtataataaatgttcaacacgggttggtattgttggatatgggccatatgaactggctgagacttacactgtgtgtgccttgtgctgttagttgacactttagttcttctgtgccttgtgctgttaatcgacatcttagttcttccacatcctatttcttcagttgggttacaatattcttaaggcagggacctatcttaactgtcctctcacagcagggacttgtgccaagtaggaatatttgattaatggattcattagctaatcacactttgtagatgctttttgaggaacagaacttttgaatgcacgataaacttgggttctcgtctgaataccatggctttgaggttggttatatggagcctttcagtgtgaatccctaagcctcttgagatttcttgagaggcagatatgcctgcatagcctgccctgcctgatacttcacagaatgggctgctactttttacttattattaaaaaaaaaaaaaagctatcaatctggcctgttttgttgacacaggaggctcaggatataatgcggacacagggagatatctcaattccctttttttggagaccaaagcagccaagaacattgtgtgctatctttacaatgagaagtagtttttccattaaaaggcagatgcttcatttccaaaagttaaatagaatggtccttaaaaatgattccagctggttaactttagggctctggagaataaaatcaaattcaagaatataccccaactttagttccacagcatttcttcctgattgtgaagtaaataattttcctggcctggcacttgggtattcttgtcttcagtgatgagattgacagctacactgtgacttttgatggttttactgccccaccacccttccaccacactggtgattagggagagagccaccctaaaagttgtcaccacatgcatcttccactcagcctcttatggttttaactccccattcctactgttaaaccccaagaaacttcacaccatccaaccaaagtcagcaattctcccttttttctttcttttattctttcatgtattcatttactcagcaaatggtaattgggtgcctactatctgccaggaactgtgccaggagccaggaatagcatggagagcaaagccaggcatcattcctgaagcctggagtggggagacagatttaccaaacaatattagacatgagggtgcaattctaaatgcggccacgagacaaatgctctggaagaaaggaatgcagttccttgagatcatatcactgaagagcctgtcctagagttggatgtgtggttcagggaaggcttccctgagaaaaggatgcttgtgttggcacctgaagctgagttgtaaactaggcgaagataggggtgaggagaattgcagagaggaggaacaacacgttcaaggccctatggcaggagatggcatggcttatttgaggaaccgtaagaagccaatgcggtgccacatggagcgtcaggagcaaggaggagggagtgaaatgaggctgtaaccaaggcagggaccagactctgtgggtgggaccttccttgtagggctgaggcctttactgtaaaagcaatgggaaacaaatgaggagttttacgtgtgtgtgggatggggaggagtcggtagatggatgacagattttcattttaaaagattaccttttactgccaagacttgcagtggcttctgtcactatggaaaccatgtatgatctctgacctccaccagggccaacttcagcctttaaaaccacctggaaataaggaagtgctgagttctagaaaatgtaactttctctttcatctgtatgtaaaaaggtagttgaaaaacagaaccgtgactaaatttagatcatttagccaatcttgatactagtaggggtttttgtataaaacacagtgtgttgttagcattttcttggaagttagcctttggtgcttccaggtaagagcaccaaatctgcttatctctagggttgggaataagaatagatgatattgcttccgttgtgagattttggtccaagtcgggctggtaacaacagatttccgcctatcgtagtagcagtgtcttagacctttgagttgcccactcattgtttgacgtggagctgtctgtggttgtgaaggtgatgccatttcaaatccccacttcccattgttttctctccttctttgcaacaaacatgccctcccaccccaccccactccacctttctagtgtagtgtacccaattgtcacagatcagattctctggaaacaagtgctgagatggaatttggagtacaaaatggttattagggatcagcacctatgaaggaaagaaggagaagcaggattgggcagagggagaaatccagcacagtccaaccctgcaaagcctcagccaacccactgggaagctctggattgtgtattgctcatcagagtgtcctgtgtcaggccagagtgactgggcttttacctacctcactcagtcacaggacagatgtgggatgccctgggaaggtatgacctggggccaggtggctctctgcagctgaagcatgctttaatcttaatctctgcagccaggcagtcagtcctttcttgaagggggaccctcaggtccccacatctccacatctaccacatcaaccacctgaatctgccattccaacattagtaggctttaaattgtaaccgtgacaggctgtagaaagaaatcttttcctttttcacctggagtgatggcctttcaataaatgaaaaagtgattgttttcagaaacaatgaaaatgtaaaggaagctctaagagtggattctgtgcaatcatgagaatggctcatgaatttgaaactgcaaaatccacagaagtaagttaatactgcaaagctccacttatggaactcgagccactgtttttgaaagataaaacaaagccttacatgtgtagagcacttcagttttcaaagtgctttctcatgtcatttgagttccataataagcctgtgaacggggcagggcaggttttataagcatttcacagatgaggaagtcagggctcaggaggtttaagtgatctgcccaaggtcacattgttgaaacctcatcaacgttcacccatgccctgtttatcaaaagtaggaaatttttggcccccatcttgggccactgaggaatgctcaaaatgatggacaggaagtgaaacaatagagcagggaaatgattcaaagtgatggagtggaaaacagctcagactggcacttggctccaaggcttaaaaacaaacctggagcagacactgaatgctagaatgtgtaagctagtcaggaaagaaagccaagcctggtctagcagattaaggaggattttaagagatcaatgatgtaagaacatgatttcctaaaaaccatgtaggggaactgtcatctctgcagtgaataggtgcatataggtcctaaaaaaaaagtgaatttggggcctgatagcctaagacctttcattcctgggttgcaaaggcagagtaacaagctagaatagatatgcctcacctctccagagagactggttgggagtgaccaaaagggattcctgccaatattaagcctggagaagatgacaccccatctgctgagcctggagactcaagccagggaccagaggagtggccccggctaagagaagcttaccttttattgccaagacttgcactggcttctgtcactatggaaaccacgtatgatctctgacctccaccagggccaacttcagcctttaaaaccacctttccaaatgaaacaagaaagtgctgagttctagaaaatgtgactttttaggtcaaactgtggaccctaaacatgtgctactttcttaaagctgtatgagtaaacacatggtctccaaaccacccccgattctgtaatcataagagggcaccagtatctgggcatcagtgagtatcctggcagatggatctggctggatgaggtaagggagttgtacaggtgtgctgagtctatctctactcctgagcctgggagatgtgagaaaacaggaaaatgagagtctccccgccagtgacttgataggggattgagaaccaccatttttgtcccttctgagaaggcacctcagctgctggccctgagcccagagagcagacaaaagaaaacattacccttatacttagggggcacagcaatgctcttagaagaggctcacatgaaaccaagccactagggaacagtaatacatttaaaatattaacgttaggacataaacattccagtagagcacaaaaagactttctggaaccaaatgacaagatctgcagacaaattcagtagctgaaggaaagaaaagtagtagttaataggaagtaaatttcccaagttaagaaagggcctgagtctgcctattggaaggttttggcaagttatgggcaagacaaatgattcataggttgagaaattccagaagtctaaggatgaaaagaaaatcttacagtcttccagaaagaaagtacaagtgacttataggggaagaaggatcatgggggcatcaactttctcttctatgacacctgaagtagggatgattgaggccaatcgtgtgaagattactgagagaaaaacactgcacaccaagaatcctgtagcaagaccccactcctctgtcagggtcaaggaaacatagttgagaatatgcaaggaaaagacctgtcacccatatcttccaccagataaaagggtgttaagatctaaccaaacaatagatgaatcagcttaaaggctacaggatggaaagaggaggaaaagggagaaaaaaattagtggtgagcaaggagccttacaacacatcgtcagttaaattcagacagataataatagacagttcaggaatgtgtaatataattgctgaaaatagaagagacatatttcaagggaaatgttaacaatagcctggaacaaaaagttctaaaggagaaagaggggaagtgaagtttccacaggtctcacattggtgtgtgagagtgggaagtgaaagcgtcctaaaggcctcatgctgggggaggaggaacagcaggagaggagagaatctggggaaatagttggactcttatgttggtataatggaataaaagaatgagtttgactaccagtgacaaaaaggagaaggacctggtagaatgaaaaactagactagagctcccaaattaagaagagaaagaaaataattgaacagaaacttgataactaattaatataaagaacatcaagggggcttaaataagtaataaatattaagtaaaatagaagcaataaaattcaatgtattattaaatgtgaatagaattattcttaaaagagactattagatttggtaaaataaaaagcagacagttatatgctttcttgtatatatatatgtatgtgtgtgtgtgtatgtgtgtatatatatatatatacacacacatacaagaaataaacacatttaacaaatgtgataaaaattgagaataaaaagtcaagaaaaaataccaggcaaatgcaaataacaaagcaggaaagaattactctgttaatacccagcaaaatgaaatgtaaagagcactgaataagatagagttgctatgtaatgataataatttgcaaaaagtcactaaccagtatgtgttaaaaatcaaatgtgaaaaatagtaaagccatgtgtgatttcagtacctttcttctttacagagagcaagaagtcgcgcccccctgaactcgcccccattctatccagtcctaccacataaataaccattctgggtcatacaaatacatatgctcttgcaaagatgcaaaaaaagatgctaactatacttatctccttctgggtcagtatttacaggtttgcccccattccttatttccatgaggagagatttccctaaaatgccccttgtcctctttccgcttctccttttcttctccccagagaggaggaatgtcttggctgactcatcttcttcacctctcctctttccttttcgtagccagccttatcagcaagctctcattctagtctactctcacgtggctccagctctccaggggcagcctctctgcaggaaggcctcgggtgttcagtgctgcctgtgatgagtgggtctgtctttctcatttggaaaaaatgttgctgaacatttaatgttaccatttccaatgtcagctttatccctaataaagctgacgttttgatctccatctgccttgctctcatcctaccacccgattggtttagaattgtggtggagaaaacaggaactcaattctgggggtctccttacaactccaaaacaaccttattcttcccaaagtcaaccagccatctttaatgtggctatactcctcatctgcgcttcctcatccctcattcattcgccacgtcacggccatgtagcttcttctcccaccaaacattgaacccatcctgccaaggtcgctgatgacttatttgcaaaatacaatgaaaacttttcagtctaaaggtcaatcttacttgaagtctctgcaactttcaaagctcttcatcacttcctcctccttgacattccttcctctctgagcttccatgacactactttctcttggttttcctcctacttctccgactgttccttctcagcctccttgaactgttcttcaacttctgtgcacccaactgctagtgttctccagggttgtgccctacatcctcactctgttgactcttccttggtgattttatccactgccgaggcctctgaccaccacatacccaaaccctgcctgttgcccagggctctctttggagctctagactcaaagggccaagtaccagtggtgtaactccatgtacgacagaagaaggtaccatatcattttattttttatcactttattaatgatagcaagattttttcatattttactgatcagttgtgcatgtttacaggtgtatgtgtataaatcctttcctcacttgacatttcttatgccccttctctcctcctcttcctttctgtcctgcaccttagtttgggtccacaacacacctcaacgatgtcgctgtgccacttctccaagtgcaccttctactcccagtctgctagtttgtgagcccagactcgattcttcggtccatgtgatatgttcatacacagggctctccacaaccccacccctgcctactctctctctgccctgtttctcaccattccgcccttgtgcctcacgttccttcttccagcttccgggaggtgcctgctccctccctgctccttgccactatcatgctcatttctctgcctgttttcctcttctccccttctctgactggctgactttattctttaaaacacacatctgatgtcccttctggggagccctccagccccacatcccagggagggctagctgctccgactgtgtgctcccactgtaattgtatttacccatcctggtgtatatctggtcatttcacaatggcctgtcgctccctgtctgtctccctgttaggctgtgaactccttgggaatactcctgtatcttgctcatctaatactcccagaacctcatgcatacctggcatgtagtagatgttcaatacatttttgaatgagtgaaagtgtgatagagggcagtgcccttacaatttctttctgagatcttgcttcctgaccacaggattcactcgctgaagaggagtgatcagtttcataccagcagcaccctctgcccactgacagatggttctccactgggaaactttcttcatccccggtggtatttgaagggagttctctatacatgtttaccttgtaaaatttccctccatcagtggccctggccttgctggccttcccattatacctcttggggggcactactaatacccatgtcttctgctgtttctcaaaaggcccctagccttactatccaaatagacactgaaaaggggtggaaatcctgggggcagtcagctctcagagggtgcctttttagtgtctcctgcccctctggtttgccattgcctggctcctgctgagtctggagtggggccctatgtgtgaagcagtagcctcctgttagagtgctccagaccatctcagtgtgaaccaagggctgttgtggccaagagctcggcatcccagagtcagtgacgagaagggaggaggcaggccagggcaagaacatggctcagacttgtgtgggagtgtattagtcggggtttttcagagaagcagaaccaataggttgtatacagaaagagatttattataaggaattggctcatgcaattatgtaggctgacaaatcccaaagtctgcagggtaagttggcaagctggagacctacgagagtgtaggcctggtctgaggaccagcaagctcacaacccaggaagagccaatgtttcagtttgtatctgaaggcaggaagaagccagcatcctagcttgaagccagtcaggcagcagcaattctcttacttgtgggacagtaaactttttgctctattcaggccttcagctgattttttgaggccacttgcattggtgagggcaatctgctttactccaactcattccatttagatgtgaatcacatccagaaacaccctccccaacacacccagaaaaatgtttgaccaaatatctgggcaccctatgacccagtcaagttgacacataaaattaaccatcacagggagcaatagggggatcagatgactctcaactccagctgttggaagtcacacttaacgtacacacacatgtacacacacacacacacacacacacacacacacacacacccctgccctgtaactcaggattcccagtgagggtggttccacccattagagctatctttggaaatttgtggaggcatttgttactatcacagtttgttacgacggtgaatgtgggatgccattgacatttagtggatgggtagggggggatgtcagatgctctgcagtggtcaggaccatccacatcacaagtgactgtccctcatcactttcaaatgtcctgctcaatgtttatgtccatgaaaacttgtttatacataggtggatctagcatccaaccccattttatatataaacacacaggatttattttttgcagttttaaaatacactgaatttttcaggaatgcagcatagagtgaagatggtacatatttgttcaggactttatgaagattgttcaccattttggaaaatcatgttacaaatggcaatggtaatcacagtgtttgagccatactaaaaacacatgtgactctgtgtgcatttaaatctattgcattcatggcgactctacacataggtgcagacatctaactacttagtaggatttccagtgtagtcatgtacaagattttttagatactgaaatacttatttttctataaaattgcttttctttctttcttgattataacccagtgagtgtattccattttttttttatattatgaattttgggaggaaattttatgtgtaggtagatatattatctatgggtttcatttgagcataacaaaaggagagttacaagttatgtgttgttggtttgttttcatttgtttgttttttctgagacggagtcttgtgttataagaagggacactgagtctgatgtggcagagagccactatttcaactgaactagtgcctgtgaagaacacgcatctgtctgttgggctgagcctggccccaagggacctgtggaccctggatcctgaagacactggatccttgagaatcgcttgaaccccggaggcagaggttgcagtgagctgagatcatgccactatatgacagagcaagattctgcctcaaaggaaaaaaaaaaaaaagaacaatgtcaaatgaattagtgaatggatggatgagtgaatgcatgcatgcatgatttggggggtgagaacattagatggctctactcatttaatcccagtgtctgtggaaatcaaacacaggagactgctttgtgttttctaccagccagctcaccaactgagcccctaatggtgccttggctttactcaggagtttaattagccctggcgcttgattctgaaagaaatggagagcagtgatgaacacaaacaggagagatctgggcagtaacaagcctggcatatggcaccatggatcacccattggccttagggctggactaagtcctaggtgactttacttctaaatgttactcatgtttattctttcaagatgctagataattaagacctgactacccgaaaccaaaaatacgagctgcttttggatgattagtggtgcatgcagagtcattggaaatgtagtgggagtagggaaaacagttctgggtttggattcaaaagactgagcttgaccccagactttccccacaactacctgtatggtcatgggcaagctagttcatatttccaggtttaaaagcctatggttcaatgaaatgcagtaaacaacgattcagaggaattacacagtgatgtgtttatagtagatacaccacgaagttaaaaacacttgtactttcaggtctctcattgccctggccccttccaaagccctgtgtctcattttgttagatggtatcattatcctaaacctgggtctcatattaaggtttcttccaggttcaaaattctatgttactggccaatgaatttaaaaaagaacattttctgttatacaactccattctattccataacttgtaattttttagtttcaaggacaccactatgtcatatacacattgttcttttctttaggtacttagcatgattttggacaaatctgataaagaaaattgaaagtctagatccctgggatttactactataatgcttaaagttgagccacattctcaactttatcgtagttgaaaattctacagcaagaattctttaactgtaagatctgtgttgggttactgtgagtttcatttcagtctcattttcattgttctggagttctggacatctgaggcagcccatgcaattttcttcctttctttttctagaagagcttcgcctctggccacttggaagctgggccttgggaggtccaggggtaaactgtgcattaagctgacagtgctcagtaagaaaaatctttactctgtggcaatctggtttggacacctaccctaatcaaactgggaacatttggggaggactcaggaattatcttaattatagacacctctgacttataatgattcaacttatgatttttcagttttataatggtgtgaagttcactttcagtagaaactgtacttcaagtacccatacaaccattctgtttctcactttcagtacaatattcaataaataacaagagctattcaacactttattataaaatgggctttgattttgcctaattgtacgctaatgtaagtgttctgagcacatttaaggtaggctgggctaagctatgatatttggtaggttaggtggactcaatgcccttttttttttttttttttttttttttttgagacggagtctcactctgtcaccaggctggagtgcagtggcgccatcttggctcactgcaacctctgactcctgggttcaagcgattctcttgcctcagtctcccaagtagctgggattacaggcatgtgccaccacgcccagctaatttttgtatttttagtagagacggggtttcaccgtgttagccaggatggtcttgatctactgacctcgtgatccgcccacctcggcctcccaaagtgctgggattacaggcatgagccatggcgcctggcctgcactttcaacttttcaatatttccagcgtacaatgggcatatagagatgtagcaccatggtaagttgaggagcatctgtacttgttggataagtatgaagctcaatcctcatggttagtgtcatactctgctagcccaagaggctagagcagaaaaagtgggtggcaggggaggcgaatatctatgggctgcaagtccttacaatgggatctttcttcccagactcctcagtcctcaccactcctacaccctgccagtgaagaacacccacaggacatctgtcttcagcttgccattcagatccactataagggcttcaccctgtagcaacttggcttggacactgaccctaggcaaacagggaatgttttttgagatagggtctcttgcttcttgcccaagctggcctcagcctcctgggctcaagcaatcttctggcctcccaagcagctgggactacaggcacataaccgtgtgccctaaacttggaaattttacctggttcaggaattctcttaattattttgtttttcttgtaactggtattttgttccctttgtgaggaggggaaaggaagtattttctttatttatcctgctttctcattttcaccaaaaatgaggttacagatctacttctgactttaatttgtaacacaccccagaattttgttattgttttgcctctgacttttgttttcccaacataaaatcacttccacctcagaattataacccctagggtccctagaactgataataaaaattctagatcagtggacaacttaaaggatttcctgttaacatttactctacctgtctaaaatttgcatcttccattgctttttctcaattttaatttctatgtgtttgtttgctagttggatttaagtagacatttcgtttttaaccagttttaaagttgccttttatttttggctaataattatgttttagtttatattattttattgccatttcattctcaaccagccaggagctggcctggattagaagaactggttctaacctcattggtctgttatgttgtcacacagggtacattacttaattcatcagagtggggctcaatcagtgtgatggcccctctctttacaatgttctggtagcctataaatcggctttgttttattcactcttatttctatgttagcatctttggaaaaattcctaaacttatttgggaacaaattgttattatatgaggctaatggtacctagaaataactagaataattcccaagaagttatgcctttataaaatattcatctttggcaatgaccagaaatgtctacctttacataaattagtgtgtccactctttttggggctggtggggtgtcttctgactggccttcatgtgtgggaatagccccattccaagtgctgcttgattgtaaaattggaccaagcctgtcatcacactgcccagtctttgggtagggggagctgagagattctgtgaatattgtcagaagggacatgtttttggatagggagggaaaaaaagcaagatccccaggtcccctgattttaaccatgacgtagaaaactccacacagaccctcctcccttccgccctggcacagagtcccgttgtcctttcataggcggtgtcagaaaccctgtggtgaaattcagcctgtggattccagaaatttggagtgttcttggggggaaaaatccgcacacacaaagcaacatttggaaatccctgtggtgagttgggaggtggggaggggatgcagtatgggaaggctggaagggaaagcgccggtgtacatccctccctcttctttccagggctctgagtgtcagggctgagatgaagatgacaccctggcagaggaggaggcagggtgctgggggcagggcatggacattgaggtctgtgctgagctttacagtttgcaagcactttcatgttatcttgtgggggtagatcagtgactccatagccattttataggcatagacactgaatttcacagtggttaaataaatttcccaagaccacatggttggaaaaaaaaaaaaaagtagagacacatccaaatccaaaaattttgtgctggaaggttttcatgccataaaacagttccatctccgtttatcattgatcccacaagttctactatttactttactttcttcggaagcttagttgattttttccttctataggacatctgcacttaaattctttaggaagtattatgcctgagtgtggctactccctacctgagagcagcttcctataagaaggagcttctcagcaggcaaggagagagagggctggagaaaggccaggcatggtgagcaattgtgggccacccaagggcctggactctcagggtggtgataacatagtggtaggggtttggggagaggcccagagacagtggccctggaggccactgcaagggaaaacaggaagaaggcagtaggtcaagttccttctttaaaccaagccaactaaggcttgtccagggcccttcctgtagctccagcattcatttggtgcagaagaaaacactgaattccttggagccattattgaggcttgaaagtttggaagctctgtgttagcagcattttagggacagttcagccagaagtggatgtgttccctacagacatgaaattctagcaactgcattgtttcctaatgggatcacaggttatggactcatggagctgaaaaagtctccacaatgggagagaaactgagaggtgctgaatccagctggtgagacccagcacagtagaggctggcccaatgccacccagtgagttagtgttccctcaagattgttacagttaaatgcacttgcaaaatcctagtggggaagcgggggtgggggtgatgcaaggatggaaaacattttgtcaagcatcagattatgacaagggctcttcctaaaagttaagaatgtgatgactgaaaggggcctaggatatattttatatattggaggtggtactggcatttgagtatttctagtttgcttttattatctggatgatgaacagtaacaacagcagaagcagcaataaactcttacataaaatttatctctaaatgccaaagcagtttgtttctctaaatatagtgtacaaaaagagaggtatttacataaagtgactcgctattaatttattaattgtcacttgcacttcccaatcaggtaaggattgcacagttcaggcgaaagcctccactggctgcttgttctctgctcagctcttgggcacagacacctgccctgccttgtgatgaggaagccttcctctgacaagggcagagatctccatactcaccaacagctcctttccatgcacagggaagcagccaggggctcgcaggttttcactcagcctatttcaagcccagcctaagcagcccctttgtctgtggagccaggtccgacccatggcccgtggcgggaaggccacaccagatgctgatgtgggacgggagctgtagctccatcttctcattctcttgcagaaggggatgagtgtggtgctccctgacttagcagcttctctcaggaattttatttattatgtttttttttttttcccctaaacagcatttctctccgtttagttaacaggatgttgatgggtttctcttccttttggggtccttccctttcgatgagggcccaggccttcccccttcccagcatagtccagcctgcctggatactctttcatgggcctctggggccagaggacaagtccctagtgctgtccatctgctctgtgcatgtctgttcaattcagtagatgttcactgaagagccactctgggaggatgcagattaggcctggagaatgtagcaatggaaatgtttgatatctgacttcatggagcctgtagatgagtgagggacataagtgggaccttaaaaaatcatctacaagacagagagagatatgatcaagttagaaggtcttttcttaaagatcccagagataatctacccctagatgtgcagacgaaattagggccagagggggtggatgaactggtttgaggactctaaggatggcgtaagtgatttcgaatcgaaagatggggaaggagctcctggagaaggtggccactgggcagggcatcatgagggaaattggattgtggcagagggagcagggtgagcacaggctgggaaggaaagtgtggtgggctcccccaacagtaggcagtcatgggggatctaggggcatggtgggtggatggggaggggtgctcacagggtccatcagtgatgattgtgaagggcctgaattatgtgtgcaatggagaggcactggtgggtcacagatgacttctatgtggggcttggccagcagtgtgcagggtggttgggaagttcaaaggctgtagcttgggtgtgggcaagagacagcaaggccctggatgaagtaagcaggctggagtggggagacaggaatgggttgaaggcacagggtggagagaacccacccattgggttccagctgcactgtccagtacaggccgtgagccacaggtggctgtcgagcactggagtgtggctggtctgaattgagatgtgctgtaaggataaaacacacaccagattttgaaagcttgatgtgaagaatgtacaattctcaatcatttttaaaatattgattacatgatgaaataatttcatttagaatatgctgggttgaattaaatatattaagattaatttcacctgtttctctttttaatatgtgtgttacacaatttaagattacttacatggctcacattctatctccattggacagcactgggttagaggggaagaggataaggcagagctttggggacaggaaggaacagggctgagaggaggacctgagaagtggggttaaggaaaaaggagagatcatacagatttggtgtcttcccagattgagacagcttttgggcctcttggggccacaaggagcttcagaaattgccagtgtctttacatggagtacctgaaatgtccatctggtctcctcactcacctggcacctaaccatgtgctgttttgtacttgactgttgcttacctgtgtctctaagtccttgcctcagccagataaaaagccttctcagggcaatgccattgtatcctgtctgttctctccagtgcttacttcacccagggctgggggtagcaggtgctccctggaacttggcaaacatcctcatattgggaggagcttggctggttttccttgatctccctcttcccagtgtgtggctcttgacaactgattggaccccagacttaaggtaagactatacaatgtgatgctcacagtatgcacatgatgcagctgtgagcagggatgggagccgaggatggtgcctgagcacagaggggaagagcattggatggggagatttgagttggaaggtcagatcctcaaaggtctactcattggagtctccacatctgtgaaaggaggggatgatatctatctcctagtgttgtagaaagtaagagttaatatacgtgaacaaatgatggctggcattcaagtgtcgctctgtgaccctcagaaggtgttcacatccatgagctcatctgaacttcacagcagggcaggcattattataatttccattggcagacaagaaacctgaggttcagagaatacaaatgacctgatagagatcacctgactattaaggtagagctggatctggagcccagcctgacgtctgccactgtcttttgctgtccacttaaaagagcagcttgcacacgtgcagggctacatagggttcaaaggcctttcatgcccattaactgcttattcttcctagaaggatgcataagcccaaagttttgctatatatgaagacatgattttcatgagattcctgcagccaatgaagaaacaagccttcagtaatcatgtggatccatggtttagttgtcccttatgggtgacaggtgatgggttatgaggattagataagagctgtttgtaagaatgtctacaaggtgcagtgacaggctctggtcagatattttgatcatgctacagtgcatgaaattgttcataagaattgtatgtgcatctgtatctaacaggatctgcttatatcttcagaaaactttgtcataaatttaaattacttaaagtgtctgatcttcagatactttaagtagtgcatttgagaatgggaatgttgattacagtgcgtatagggaaatagatgaatattccattaataactattaaaatctgctaaagcttaggctaagctgaatatatttagttgtaataaaattgggtgaacacattccaacttcagcctgattaagggaaagggtgtaggggtgagacacttaggcggagcttgaaaaggaatggtgagagtttggccaatgggaaggaaggctgtgccagacaggaatagtgtgggctgacgacaactgagggcaaagtgcttgtcccctcatagttgcgcaatgaatgcagaggggctgaggttcatctgtcgtcttcagctctgcaggctacatctcagggtgtttcctgtgaaagttccagaagaaagctgtatggtcagcttggggaaatatgtggttcatgctggaatgctggacataccacattattggaaagatgcacattgaatgaccgacaaaatgaaactcaactttccaaatgctggtaatgagagaagattctgttctaatgaccagttgtttcctgaaagaatgtcagctcgattcataatgaatgcattctaaccatgacagccacagtcaggacacaaaaaacaaagtgtccttgatcccaggaaacagccctctggaatctgtgaaatctagaaactagattgggaaaactctgacacccctgccccatgaccaaccaagactaagagtcccaggaagattgaggtcacagaaggcagaggcctgccccctctccaggagatccctgacccatgtggggtcatgggcggggcatgagtgatgtgatgggaaactggctcctggctccaagtagaacgtgaccaactggagcctgacaggaggtccctggcactggtcagcccatcaaaccaggtaagtccttggagtctgagtagggacaagagactgttctgtgctttggcagggatcaggaagatgttagaatgtggttgttggaacttatctttggagctgaacaaacatggctttgcatctccactttgctatcaactgagtggctttaattaagtggcttcatttcttagatcctcagtttcttcatattcacctgtaaatttttttttttacatttttagactgttgagggcagtaaattagatcatgtacataaagcaccgagcactgtgctagacacattggtacttactacacagtgggatagcaccccagctgtgacagccttgtgaggggagctacacaggaggcccagggagagtgctctgagttaaggataggtccagatcctacacttctagcaacacccaaagccccctcttgaacatgttggggtgtgatgggggtggggagatacagtcgtgttccctggctgtgtcaaagtgtgaaatctttatactccgtctgccccagattctctcaaagagcacagaattgaaggatagcactggaccaagtgtcaggagaattgagatgggctctgccactccctggctgggtgaccttggacaagtccttcaacctattgaggtctgggcttcttcatttgtacattggaacaagattatctgctctgtcacaggatgaactccagcctcattagcctggcattcaagaaccttccatcatattccctcaccacagctcccatgagtcctcttcatgcccacatggttctgccatatcaaactcttctgggcctttctttcacccctagacagaatgttcttgcattctgtgtgggggtgaatgttcttgcccaaatctctgtgtatctaaagcccatatacctttgcatcccctgcagcatcttgcacaggggcttgcataaagcagatcattgttttctcagttaggattaggtttggggcaggaaaacaaaaataatatttatttagcaagttagaagtgatttttctcttgccgggcgcagtggctcacgcctgtaatcccagcactttgggaggccaaggcaggccgatcacgaggtcaggagatcaagaccatcctggctaacatggtgaaaccctgtctctactaaaaatacaaaaaaaataataattagccaggcatggtggtggaggcctgtagtcccagctactcgggaggctgagacaggagaatggcgtgaacctgggaggcagagcttgcagtgagctgagaatgtgctattgcactctagcctgggcgatagagtgagactctgtcaaaaaaaaaaaaaaaaagaagtgatttttcccttatgccaaaagaatcctaaaaggagggtagcccaggactgggaaggtggctccttgtgttggggacccatgctccctctgtcttgccacaccagcactcttggcaccctacctcatagtcccatatggctgcctgggtttcagacatcttattctcatttagccagcaaaggatgaaaagggcaaagcatgcattctcttccttaagggaggcttcctaaatgctgcacatgacacttttgcttatagctttttggctagaacttagtcacatggtcatatccagctgcaagagaggctggggaatatagtttttaactgcacatattgccattccttctttctttcttttctttcttcctttttttttttttaagagacagaggtctccccatgttgcccaggctgctctccaactcctgggctcaagcaatgcacccacttcggccttccaaagagttgggattacaggggtgagccaccatacctggccatattgccatttctaataaaattgataggggagactgggagaacagatattcacaacccatacagtgcctctgccacagctactgaaagaaccaaaaatataaaaactcactaagaagtttaaagccctatctaatatatgagattattattacaaaacacttaactcattttagataagttaattgtcctgacttttaggttgaaaacagcccaatttttcttcacctctagtggaaatatgatgacatgttttttcttttttattttttgtagagacaggatctcgctatgttgcccaggctggtcttgaactcctggctcaagcaatcctcctgtctcaaactcccaaagtgctgggattagagacatgagccaacatgcccagccaacatatttttttcatagaataataactcagagttgtaagtgaagataaattattagtccttccccttaccttaccacattttactactgaggaaactgaactccagtgaggctaagtgatgtgcccatgatggcacagctgaatggcgaaggaaccagaactgggacttgagttcctggactccatcagggctttttccttgatgagcagcccattcaggttctgctaactgtcactcggaagccttgaattctgtgcatctcctaaccctgcgtgagagccctgctctgccagcacccctggaggcagatccaggtcaccgtgttgtcagccacattcttgccagcacgtagttcaagtttccatctgaagagagggaaacatgaagaaatagaggagcgtgctattaaaataacgaggcctttttgctaagagcaaacaatcacttcctttccttggcacccagaatctgcagggccctgaattaggcactgaagggagatccagggaagcatgaggaatagtcactgcccttgagggcctggatgtataggttcattctacttttcattcatttattcaagaattatttcttgagcctctaccaacagcagacactgagcctggcactgggtttagagcaagaaccatataactgggtatacaacagtaaactgtgcagatatggttcttgctctaaaattgcttgtagtctagtgaaggacagaggcaagtaaacaagcaactacaaaatgaaatgaagattgcagtgatggggaggggagggggtactctgggtgtagactggggtagggtgggcaaggctgagtgggtgagatatcattacagtggaaacccgaagactgagtatgtgtgagctaagcatgcaccatgaggggtctggcagttgggacggaagtgtactccccatggagagaatgtgcagaagcacgcataaccttctgaccggactgcagcaggcctgggtgacggtggtggtgaaggtggggagtgttgagaaacacaaccagcaaggtaggcaggggcccgtaagtgaaggactttgaaaggcctgttggagagtttctgtgttatctcaaggccagtgagataaagggcttgaagcagcagatttgtatgttagagtcctctggcctcggggtagagagtggatgaaagcaagcaggatcggattcagagaggtcaattaggagctgttgccagggacagtggcttgaaccaggaaacagcccagagaggtgcagagaggttgaggaatttgagacatctttaagaggtacaaccaacaggtttggagactgggtcggaagtaggaaatgaggaaaatggaggaaaccaacacttatgaagaaacaaagacagaggctgacaaacaaaagcaatagccattctccaggaagaaaatggtggcatgaccatgtgttttgagcaaggaaaaattgcaatgggctagagagattttgaaggactttctagaagagttagaattggagctgggtctccgacatgggtaggattttggtgggtagagaggacattccaggctaaacaatgatgcaagttagagttctaaggcagaacagtgtgtgatttgtttagcatgatttggtcatggttttcttgggagagtcccaaagaactgattctccagggggtgttactaaaactcttattgaaaggagggactacagagatgaatctcatcactctcccagaatggcacagagcttttcatggacccccgggccacctatgtaggaacctcagggggtctgtggaccactaaaagcccaacatgcctgagactccacagatactggcttccaccatgataaaggcaaaaagtccctctttcccaaaatcaatacttttattctcataggcctcctgctgtggtctagtccccatgttgaaagctgctgtcccagggtgttgcttcactacttctaggctcctgcagagtcctgcctcataggccgcactggtgagtgaggccagcaaacccatcagggagactacatgaatccaaggccgtggaagacttaggtttggatattccctctgctccctcctggctgtgtgaccctagaataattactcaccctctcaaaaccgagactcagagacgttgggtaattattctagggtcacacagcgaggaaggaggagagggagtatccaaacctaagtctgtctgacagcaaagcctgttctctccatctctccaggttcctaagccaggtgagcgttgaacctttcttgaatcaaggttccaattccaaggtaggaaagcacagtcagtcagggaaatatttacactgagaccacgcaccccagccctttcccaacctgctcttgtgtgatccttttgaggttttttgtttgttttgagatagagtctcactctgtcgcccaggctggactgcagtggtatgatctcagctcactgcaacctccgcctcccaggttcaagtgattctcctgcctcagcctcctgagtagctgggattatagatgcccgccaccatgcccagctaatttttgtatttttagtagagatgggatttcaccatgttggccaggctggtcttgaactcctgacctcaagtgatccccccacctcagcctcccaaagtgctgggattacaggcatgagccactgtgcctggccttaagttttttatagatgggaaaaccgaggtccaaacgtgagcaagggctctgcatgctacctctctattttctcagccccttctgcaggctccatgccataagaacatggctcctaaggttcaggcctatggccccagtttaggtggtgcctctgctctgctccccaccaccccagcctcctatttgaaggccaagactactcagctttgattcaggttgaatgagtcatcaagggtaaaacaaagaagagaataaaacaaagaagagaaggcctattcccttgcagatgaaatcaatccactcaccttttgacatctttttgttctagaatgatgacagtatgcaatgactcagaatcatcacactcacagagactactttgtattttttcttgcaaatgaagagacaatatgcccaaaaaatgagctgaaaatggctcatgaagggagggaagatgacctccagcacaccagggcagagtgggggccacatgaaggtgcaagagtgggagggaaccacaacgccttggcagagaggagagcaagtgggggccaagccacaaagctcttcaaggccagtcaacagtgaaacctgaaggagtcccatccatccccaagtctgcttgagttaaagccctgcaccctcacaagcagctggagggaggggaggaaagatattttcaaaagagccatcatatatggggtgtgggaaagaaaaacttgctgcgtctaacaccagagagcctctccaagccaagccatctgcctcagggcaaaggagggaatggaagcgggagagaagggtttggagccagctctcagcaacatgtttctatctggagaaatgagctgagaagatctgaatcttctccagcctgttctgcaaatgtgggataatcggcccctggcccaaaggctggtgctcacagcgtggctccggcattacccaggactttggttcttggtgatgggaaagaggacaaatttggaagccagagaagctagggctggatggtctggaggaaaacctccacttctctcagactgttttttctgaggaaacagatgattgcaacctcagaggttgggaggatgaaatgatgtaatgcatctggagctgctctgtaaactgtaaaatgctatgcaaacggtgcttgttaatgtgtttacatatatgggtgagttaacatagtctgacagactggacgccaaactcagagtccaaggcaatggggcattatattctgtgccttagcatctggaaaacatgatgaaattggaaatgcatttattgaaaatgaaaagttttctacagagcttcctgtcctttccaatgaattccaggcttcccatggtgcttgcagggctctgccggaagctgctgggaaagctgacttccattctggttgctatgaactccatttttggttctgttctgtgaccatcttcatttcagtcacttgcaccattataaggattgaaaagactcttggcagaaaagcagttttttgtttcatagcattagggtttgatatataatattatttttgaacagaaaaatttcacataagagttcataaagggtggtattttagagctgaaggggcttagaagactgtctagttcaaccctgagatttttttcaggtgaggaactgaggcccaggcagaaagactggttttctccagccctcacacatgtcagtgagccagggttaaaatccccagaggtctgactcctattcatgtgctacttcccttaccccagggtcaaaagctcagatgctttcagagtccagataagtgaggaggagggcattggcgggtaggaaggtagggagttgtgggacattcagttttgtttacatttatcctgttagaggtttaacgagctacttgaatcttaaatttatgtcagtcatcaaatctgggaagttttcagccattgttttttcaaatattttgttctataacaatctctttctccttgcctttaaggattccaatgacatgaacattagaccatttggtattgtcccacagatcctcgaggctttattcattatttttcaaacacttttctatctttcacattggataatttctgatgatctaccttctagtctactgacattacctctgtcatttgcattctgctattgggcccatccagtgaatttatttcagatattgtgtttctcagttctaatatattgccatttggttcttcttttatataatttctattgcttgactgagaatttctatttttccattcattgtaagagcattcacctttatgtcacgcaggatgattataatagatgcttcggagttttttttttccagttccaacattgtcttatcttttcccttgagaactggtcatgttttcctggtccttatcactttgggtagttttaaattgtttcctggacatttcatatagtatactatgagactctgggtcctgttaaaatcataaagcatgttgagttttgttttgttttagcaggtaatcaaccccgttaagttcaacagcaagctctgtctcatcttgtgtaggcagtggtctcaacgtcagctcagttttcaaagcctttgttaatgctgtttgtgttccacacatgcacatcttggaggtgaggtcaggacttgtgctggctcctacatggaatccctttctccccctctttcctctgcaagagttccgtcttgccggaaaaggaccagctccttttcctggtcctctggctagaaggatggatttctctcagagctggagccgctgatgatgtcacaaagtttcatgccacttggccagaccttagagcaaagtgcaaggggaaaaaagtgaggactcccctgatacttttgacataacagggaccccttttctgaatttctgtacccaaagggacaggttttctcttgagattttagtgctcaagctgctgccaaggtgatggcgatacagtttgggggctgcatctgactgtgtgtccaagctgagagagaaaaaaagacaaagattttccccacactttttgtcttgcagaggccccttttccagattatctatccagaaagatgggccatttcttggggttgttgctgtctatgactgctgggaggtctcatgattcagctcacccttgggccaaagccaggagaaaacaaattccaggaaattcaccatcaccatattggtcattcagcaaattttgacttcttttcgcaatctagctgcttttagaggacttttcagagacctcagttaattgttttttttgtattttgttaagagtgtttggttgtaatcagtgagggagatagtgtgcaatgcatgccttccatttggttggaactagaagttgagcaacacagttggaattcatcttttttggttagtgcttccccaggactttcacggacagaatcccaaaatagaacctgtatttgggaatcctatattccctggcctggtggtggcaggtcccaggagtctatggctccaagttttctaccttatttgggtagacacttaaaacaatgctcattcaacaaagacgtagtgggtgcccaccatatgctatatcctggagacacaaaaatgactaagacatagtgcccaccctcaagtagctcatgggcgagtggaataaagggattttcagtaaaaatttaagatccaagcttgaaagcttctttcccaagacatcttgtggatctgagaaccacaacaccttgtcagagagcaatttctagcctgattctggagctttgcccttctagaaacttctatcattgtttctctcctctgagcggaaccaacagtaaagcactatatattaaaaaacagtatataaaattctccttttgttttgtgaactctacaaatgcctagattacctgtttttaacagtcttcttgcctactaaacatagacttagagaacacagtctgttttggggctccagaactcaaaagggaagtgaagacaatggagagtgttcagatagcacttttagtagatagaatctgatatttaaaaataaagagtgggggagttgggggccatctgccaaggagataatccttcataaagcagattaaccatatctttgtcttagttcaaatcactataacaaattaccatagaccgggtagcttaaccaacaaacatttatttctcattgttctggaggctagaaatctgagatcagggtgctagcagagacaggttctggcaagggtctttgccaacttttgctgtattctcacatagcagaaagagagctaaaaagccgtctggtacctcttcttacagaggcaccaatccaattcatgtgggctccaccctcatgacctaatcacctcaaaaggtcccaccacataataccatcacactggggattcaatttcaacatgtgaattttgggggaacacaaacactcagtccataacactcccccagcccacctctgctgccttttctctttgaaagcacttaccttctctttctgcattgatgtaatgccagaggattggatctgggaaaggaagtaaatgtgggagggaagaatcagggttcagccatttagcgagcacaagtaggtgccgtgtgtcagcaagggtaccctgtgcatgagttattttaccacccttacagcaatccagcaggcctgtgtgataagtgttgtgtttcctgtgtggtagacgaggagaccgagactcagaagtgacgtgatttttctcaaggtattagctggcaaattgtagactagaatccaggtctcctgagtgtgggttctgtttatctagtttacctactgcgccggcctctaagactttggggtctgaatatgtacctcttcataccactagagccccagcagtcttctaagtgacatgtgagccatactggggaggagtttggggaaaggagaccttaccactgacagcagagtctgggggctcacaagagaggaagatgcccactgggaagccagatctcaggttcttcagacctatacctccctgggatataattcaatcaagtgcttattcccctctttaaaaaaaactaaaatgatgcagaaactaactatgaaacaaaggaagaaaaaacaagagaaggcagggattatttcccaggacattttcctctgaccaggagggtaagttggggacagaggaccgacttggtggggatcagaggcagcccaagggagaagagtcattccttctactctcccacctgtcctcattgctggctctgacccagatgagagctgggggcgttgacatgggaagcttctctccttcctgagtggtcagtgaggggcagcttctcctcctactccaggagggttgcgggaacctgcatgttgcatcccagagcagccagagcttcttcttgccagtctcctaccttccctttctggctcctttactcccacctcctcatgccctctttctcatttaatagcagggagaaaggaaatgaaacttgatggagcctgactgtgccaggcactgtgccaagaactttgtgttcatttgtttctagaagagggcttggtatactgtagatgctcaataaacgttaactcttagctttagtgtctccggtccttcacttcagtgatctctaggcacagttgatggctcagtttcacaactgctgcagagaggatgaaagaacaatgtcaagtggttgggtgggggaaaatgaaactggcattagggctaatcacatacatttctcagggtgctcctcttttgaggccctatttccatgagaaggaaattgaggcaaacccagaagttgacagcttagctgggaaccaaagatgatgatatacgggagcccatggaatctcatagctcgagcagcacttttggcaccaacctgcacccaaagagcatctttaaaagttgtcacatacttgctccgggcagctctttcacaccactaccatgctctgtgccagacatgactaattttttaaatctctgacactcttaattagtcatgagctaattctgtaagaatgttagagtaagcacactaaaattatattcttctgcaaagagaaagaagattacctgagaccacttgtcccccctcaaagaagcaaggtctcagccaaaatctttgaagccttgtgacatcaatagattttctagggtggcatcatgtccttttgatttttctgtatatagtagttcaaatgccaccttctcctctcctttccattgccactgccctggctaggtcctcatcagtgccatcaactctcaccaggctccctgccaccaatccaaacaaaaccaaacactactaatcatggatcttcatggcacgtttgctttcgttggctccaaaagcctccagtggctttccattgcagattggaaaggtctagactcagcgatcaaaacttccaccactgattgcttttccaaacatctcccctacttcctgttgtgaataccacctggtttacttattatctctggcttgccattatctggtttacttattatcatcaatatgtctagacccttctgatcttcccaactttacccgtgccttttcagttctcttcttctcattcctcaccactgatggacagtcatccttccttccaagaagggcttaagtctggttgcctggactctagataatttccctcctccttagcaattccacctttgattgtctggactccttgtgccatgtacaattatcctgtattgttaattgtctttctatgtctgtaacttgcttctgtgttatagacatcatcatggcacagtgccgtgctttttcacagaataggtacttaatattctattatttaatttactagaactttgcaatttcataaagataactttgtcattaaaaatgtttccagtggggatttagggcccttgagatggtgcaagaaaaggagataaagggttttttttaagctatttgttctttctgtgcaaattacataacttccaattatttccaacgttaaagaaatagtccctctgaatcctttatgatttaaacattaaaatgattcactagtttttagaaaaaaaacaaaaaacaaaaaaacaaaaactgctgtcacccttccaaaaatgtaaaaaagaagaaagaaaacccaaatattggctcttttggaggaaaaataaactggctgtgcttttatttctccaatattctgaaagaactgggaatgcaccacaaaatggcagtgcttgtgtgtacccgagtgtgtacacctcacctctgtcttgagtccactctccctaccaagcttttcttgggtagaagtcatggagccatatccagcaccagtcacctgagcactcctctcataaaggagactttgggtttaatccctgccagggggattcaagtgctgctctcctaaggaggagagcaggttttctttgcttgactatatttcaacacctctgacagaatgactccagccagccagggtgcttttttgcttcccagcttctcatagcgccccagatgtagcatcctttcggtcctcaacatttacttccctctttactcactgtattagttttctgttgctatgtaattaccaaagcttattaatttaaagcaatacaaggtggcgcgcagtggctcatgcttgtaaccccaacactttgggagaccaaggagggcggatcacctgaggtcaggagttcgagaccagcctggccaacatagtgaaaccccgtttctactaaaaatacaaaaattagcccagtgtggtgatgcatgcctgtagttccagctactcaggaggctgaggcaggagaattgcttgaacccaggaggcagaggttgcagtaagccaagattgcaccattgcactccatcctgggcgacagagtgagactctgtctcaaaacaaacaaacgaaaacacacacacaaatttattatctcatggtaccagctggctcctctgctcagggtctcactaggcccaaagcccttttcatcctgtgtccctgtctatcactgccatcatcccacatccctgtctctgtggcatcttgtgcttcacagctcaaggtcatattatctgcatttagttttgagacaatcataacgttatgaccactttctccattcttctctgctagctgagtttctccaaggcctaagacataggccacaccctcacaattctatactcaggcactttctaaaatcacacattccttaatgcagtgaagaattgatgctcatgagtgacatcctacattgaaaggaagagacgtggccgggcgcgatggatcacgcctgtgatcccagcactttgggaggccaaggtgggcggataacttgaggtcaggagtttgagactagcctggccaatatggtgaaaccctgtctctactaaaaatacaaaaattagctgggcgtggtggcaggcgcctgtaatgccagctgctcgggaggctgaggcaggagaatcgcttgaacctggaaggcggaggttccagtaagccaagatcgtgccactgcactccagcctgggtgacaagagtgaaaccctgtctcaaaaaaaaaaaaaaaaaaaaaaaaaaggaagagacacaattacctgagggatgaatggcaaatgttctatttagaaacgcatttttaaagctcaccttgtagggtttcttgtcatgcatcatttaaaaaaataaattaaaaaccttgaatattaggctgaggattttctcttgaaagagacaaagagacatggtcaagtcactgggaatttcatgacttaggaggattctctcagaagactttctaagaataacttcaataatctccaataatctgcaacctacttttctttcattgaaacaaacaaagttagctatggaattaatatttggaaaatgaagaaagcttaaaggaaataaacatttcccataatcttaccatccactgaaaaccatggttaacttgacatgggagtgggcttgggttggaaaaaaatagggagagagttttatctctggaaagcattgctggctcccttccacactttacagcatgtattagcttagtgacactgtagggagaagcacaagccatgtaaagaggacttaatttgtcaagatttactgactagctaagggctaaaaagagatgagtggggtggaagcaatggtttccacaacacccccaagataaggggtatcacttgtgcaaatttagcaccagggagtggggccagcccagaacttcaactcaacatttgtcaagccctcagtataccttccaacccagaaaaacaataaaaatgttaatttttgaaatcactagcaaaatactaaatacaaggtcaatattttaaaccaaagtgccctgagagcaccgttgtttctaatgacttcctcctccctgatcgtctatttttctccctggtcttatctttctgaacttttttgctgcaattgttgagcgtcaaaggctgaaaccactattatcaccactattactgccctcctctctgcatttgaacaccctgctgcatcctgcatcttgcctcttcctttatacttgctgctttggatgaggtcccatgtatcatcctcagcccgggattttcaggctcctagaagacatttcctcttactgaggcatggacacgtgcaattgcagccaaaggtgaattggttgtcaggtgttccttcaacttggctcctctctgccctctcactgcctcctgccatctaatcagctctacttatctgccccttagagggaccatctcttcagttattagccattcttgtgtacacacaacctgctggttttcacttccttgtatttgctcagacagttttttccactaagaaggcagatgcctcaaaacccagatggacactgactttcagaagctctgcctaaaaaaaaaaaacccacctacatctcctacttggcatctctaagcacttgtgtgtttagcctgggctgtgtgtattttcacatgtttatgttgttttcattcttgactttatagtgatgacaatactaattactacttatttaaggactagcatgttccaggacatgtatctttttttttttaaagggcataggcagaaggagaggaaaagcagttcagagtactaaggggctatgattggaagggtgtcaagaactagctctctcaccctcaaaaggcctccctggcccagcctgtcctgcctaaattctctaatcagagtgcaggtcactggggagtgaagattctcaacctcactcacctctttcacccctccacatctgcccaccccatctccactatttagtgcaaaggctcctgggaacagcgacattctaaactgttaacagctgaagccttccaaaggattctgtcccccagtgacagttggctgaagactgtgaaagagaaagagcggtccttcagggttgggagaccaagagggaagggaaattactagcctcaggaagaagcagactcccagcctgagctcctcacagcctactcctccccaagccatgcctgcaagcctccttgagggtttatggggcatagccctacaagggacccagagatgaatcagacatggatcctgcctttgaggagcttactgtctactggcaaaaagtgccgagtacagtttcaacccagggcaatttcaagggttgtgggacttcagaagagagaaagacgtgggctggacatcaaagaaggcctgccagaggaggtcgcgtttgagctggacctcgaaagatggcaggggactttccacaggcagagattggaggtggtgctagttatgaagccagacaccttcagtttgaggctgtgatctgtgaggacagtggggagaggggaaagccagagaagggtaaaaggctgaggaaaccctggccaccttctctagtaagaggacaccaaggatcacgctttgcctgctttaacatcttgcctaccattgccctgatgaaaataggccactgttttgaattagctaaaagttgagaactcagacttggatttgacaagggccctctgagggcagttaaaccaactctcagccccatgattctatgagtctgtgattcgcaggtggagccaatgacacacctttgggactaggcaaggcctcttggtcagcgaattccctcaggggaataatgctccttcacaggagaatggcagatggaaaaaccccaaaaagtgaatatgcccaggactgctcaattgaatttacaatagttccagattattgactagctcatgcctgtcagcagagccagaatggacacatactttgaagagtatgatggcaggtagaggtgaaaaaaaagactgaatgtgactttagatggcaagaacatgacagtgaggtacttgatgagaaccccccaaaaatgatcaagaaggggtaactgggtgataaagggggagattaagaagcctacactttattatacccagttctttttttccccactgttgctattttagaattgcagctctacattttgtggaggttacagaaggaatcttgtgaatattttttctctgacagggaaataattatgaaaatcttaacttttataatatttgtgcaaatttcaagaataagttttgttttatctttggtggcaccacatgctttggacttttgtttttaaatcccagcataaccagtattttccgaggattctaatcattcccagtgggctgaatttagccagcagtaaccctagccttgcaaagacaaagcaaccagtgatatttgataaaatagaagctgacagacaaatcaggtctagtcaatcaaaggatgacgagcagaagacccaggccagagagagcactagcacgtcttggatggccagaaaaagtagggaaggaaggcacgcggggggtcagcccaaataggggtcagtatgcagggctctggcctccaatcctaagaccccttgggaggggaaaagcattcattttctacttcactttttatgtacttgccttggcagaaggagccttggtcttggaggtgtagccccggcatcccaaatgagatgaagcctgcctctggtcaagttaggaccagaaaggctaaattgatctaacttggaaaggaagctttgtgctatctcagttttatgctcaatgtctgcctttgaggggcaagaacagccatacaggagaacaaagaatctcagggtatcagagagaggaggcaacatagccaagtccagtatgagaaacctgccttctggggatttcttcatatagctgttctttcagctggtctttccagcttctgtctgcccccagtaggttgcctcaaaagcccagttttcctttgatcattccaagccccagcgaaatacctctttaatgcttaatgtggcagtcacctttggatctgacttcccttctgacagttcaccaccctgtgaactggttccattgtcttccctggaaaggtagttccctttcttagcctcctattcacttctgttggcctctttttccttcctgctgtttctcctaaaacattttgctggccttcaataatattggtgtccaaattcagtttggggcctaccaccgttttatgtctctgtgggttacaattttctttgaggaatgtcctcattaccatatatttttaaactaaatagtttgcatgaacagggatcctcaagcatttgatacaataagaaaggcatagaatggcggtgtaatttgggggcaagcgtgtttgctgtaggagggaaaggcagcggagaggctggttcccagtatagggttggaggaggagctgctgctggtactgctcacatgctgcattcaggctgctggcacagggggttctggagctccaggcctggcaggcgtggtgggaggagcagcacctttgtggtcttctttttgaaactctctgccttgacaactgattggggaacaaggagtcagtttcactcaattctcctataggtgactcaaacctctatcacacccaatcatctgccccagagatgatctctcctatgaaagcagttgaaatgcaccaaagtgatttcttgagagtcttattcctcactgagaagctaataggctgcgtgcggccctctcgtgagttgtagcttaggtcatgagcataaaacccagtaaattgtgtagaaaaatgttgaaagactccacagagcctagacaagaagtagagatcatggatctgccttctctttttaaaggctccttaggagtcacttcctcctcaaaacccttttaatggatttctatgaagaaaatcatctaaataagagttttactcaaactggggtcagtacttcctggtggctcaggactctgaggggagctgatagacacgctgtggaagcacactgacaatggtttggtcctgcctaccggttgccgtttcactcttcctgttgctcagattggctgtgcattctcttgctttcaaacaaatgtaactgcatgaatgaaagcactcccatccccatttctgcccagtgaaatcctacctctcctcttggctcagctcaaatgtcgcctcctctgtagaaccttcaatgagtgtccagtgggaggtcagtgtgccctcttctggactcaacaaccatttggttgggtgctcccctacactctaaaatgagggtgtttagcaaaggtcttatctcccctgctgggctgtgaacaagtgagtagaaggttgctgagcatcgaagctaggataagccagaaaggtggcacttgttttttcagctgccattaaattcctgtaaaggaacttctcactgagggtgctcattctgtgtgtggggaactgcatgaaaacactcctcatggccttttgtttgcaaaggcacagttaggtctgcaaacacagaatttgagcagctgtggcaaagcagccctgatcacatggcccatcttttccattctccagctgtcctgaccaaaggccacgctggaaacagctctaagagccactaagagctgtggaggcaggagtagaggaggaaagacaaatgtcaaaattattggatgatcctgggtagcaactggccaagggggattagaatgggtgacagagcctttcacctttggggtcagcagcatgtctgacttcaggaccagaaggccaaaacatctgtcagctgagcagcagctcctgtgaatgaatcgcctttgtcttgttggaggcggggatgagtgtgaatttatttgctcaacagaaagccatgtaaacctgagatcagatggaagctctggtggtggcaagaagcccagtagcccttcagacagaagatgcccatcaacaatggaaaggagtacacaggacctcggaaggaagggtcctctctcttggcggaaggcccctcacctctttgtgaagccctctggggcagaaaaaggccttgccggttccagcaaaacttcatggagcatgggggtggcagatggggtgcctggtcccagccactcctctcccaacttcccactagccatgtgggcaagctcacattagcaatgagctcaggcctgctttgctcatttaaggaaaagcagtgatcccattatcccaggggtgattctttgccccagacgcagctccttttttctaacttccttcagccctgctggcttctcctcagcagtagctaatgtgggatgatgatcagcagcagttgagctatttttaagtcaacaaactaccaatgctaagagttcctcagaaagccaggaaattcggagcctcagaagcaaatgctaaacatgattgatgggcatggaagggaatgttttggactgctgttcacaaaaggaatcccttgaatttaatcctaaaaatggccaagctagaagagtccttagaaaccatctagtctgctttttccctccctagaaaatttctacagatgagaaagtaaagtggatgatggtttagggctgaggcacttagctgatctagaggtggaagccaactcttcctgattcctatgtgaatgctctttccacaaagatcagtagaatgtttctggatttctttgtttcaatgagcttcgattatcacactttatttttcttagcatgggctccataaaactaaattattgtacaaaatctaaataagttaattaaacaagcaccagacacagagtaacttaaatgacatcagggtgctaaatctcagtttatagtcagtggacagataactctgaaatatcagctggtggcatatccaaatcagtaaggaaggaccatttggtttttatgccacctgaacagtggcggcattccagctggtgagtcttcctggcctcttgatgcagtactccccttcagctgatgctttgctctctggggttaattcaatatccaggggcagggagccagacttggaaggtcctctccccacatctaactcctgcttcaacacccagctccaacgtcttctctgtgaagccttcctacatcttcccccattcctcagagtagcctaaatcctctcctaatgcccctctttataatacccctacagtcacactgtaaggttactgtgttaggcccccatcaggcctagggtgtgtgtgtgtgtgtgtgtgtgtgtgtgtgtgtgtgtgtgtgtgtgtgtgtcatgcctacagtgaatctctccagaaacaccaatgaacaggtttgactacaaggagactacaatgagaattttattgccaatataggagatttgggacccacaccaggtagagtttactagaaacaagatacccctactgcagtaggcattgagcagggagggagacaggggagggagcagagcagagcactgggggtgtctgcaggaaagccttattgaaatcatggaagctgaggtagcttatgggagcctgggtcttagaactgacccctgggtcattgaaagagaagcccctcttggaggggaatgagaggctgcagcaagcagctctgagtcacacaatcaggaaggcattgaacgcttgaggcaaacagccattatgacaaaggagaaaatgcactttactccatgggactctgtctcccccggtggacctagcatgctgggcaaaagcagctatcgtttggcttgaggctcatctgttaaagaggaggctggtgtaaacctaagcatgggggcatgtggagatgagggagagggctggccgggctgtttggagtctgggcctgtctcagctctgccactagttggttgcatggctttgagtaaatctgctccatcagaataatgtgggcaagataaattctcaagttcttccaggtctaaaggtctgggatcctagggctgcgcgaacctgttcccacctcaaacctgttcattggtgtctctggagagagatggacacaaaagtcgtcacttggcccttttggaaacagttgagtcaaaaagtcttggcctcctgctcatttttaaccagggcctcacagaaaacagttcgcaatccaactggtacactggcatgaggttgtaaatcctatctgggaaagcaaaccagaaacttctaccctttggtgttcaaaaatacttcatttttcttaaaattgtctttttaaaactgtaaaggtctgtaaacattagttttagaacaattgctccccaataatttattttacaaacaggaatatgaaaaataaatggtggtaggaggaaggacccactaagaacaccatttttaaattttgctaagtaaggacattgagggaaaaaactcaaactctgatctaccatcattgtttaatgttcggcaaacatgaagcattttaataccaaaaaaagtgaggagaataaatctcagcataaaggaacaactttttaaactgaatttagcactatgaaaaatgtacctcattttctgtaattttagcgagtttcccgcggatgtacactggccccatggattggcgctggggatcaccagtttagaggtgccagtgccttctgacaaaggcccatggatccatatgactgcctgtctgttctttttagagacgggcccacactgcagagaagtgattgtgaaggtctccaaccctgtcatgcccccacctgccaccttgacttgggagagggacactcacaaaagcatgtcaaatcgacatccatttctttctctttccctcaggtctcagggagttttcctcttctcctcggactctttctctcaaggcctcttctacaaaaacccctgcccagagggttactgctaaaatgaaactcccgtgtctgtccccttccctggcccccaactgacttgcctgcctctgcttgctgctgtccctgcctattccccttcatgctggctctagaaagatgcaatctttttcccaggccccagcctctctggcctccctgccatccagcttctagcctcccttctctggaatctatggaagaatcatcaagcagcttctggaaatccaggagtctgtccttggtcatggtcatcttcaacctgtctgtgttcttgagaacgttcatgtgctcccagaaacattctttttgtctgcctttcctggtctggccacatttgactgtgtcacttctctcttttctcactcttctctgccctccacagacctccgtgctgccaggacttcctaacggaagggcttggctggctccccgaagccatccagaactggacccgagggacccagctcaacttgaatgtccttttatctgcccaggagatgggaagatgctgagaccatgcttcagtgctgtcccacatctgtctttctgagtttagacttggtttttccattatattccattcaactgatttttccatgatattccacaatgtcttacctaactctagctttctatactcaacagcaatgcctcctgagagcctcctgggtgtcaagtactctgttgtgtgcttttgaggactagggtgttagcaaggcacagtctctgactttgcagggctcacagattcatggggaaaattgatgttccagttacagtgaggcaaggcaatctggcagtaactccatagagaggaatgacaggctgggcctaggaatggaggggagcgggtaatagaggatcctaaggaaactgagagaagaggggctggagtgcggctggtctgcgctcctgtgcattgccttggctaacattttacttgtccttctgaatcaccctggcattgtcaacaaagaataatgtatgatccttcttggagtaaaaagccttcagcagtgcttcacaaaaaattctattgtatattttgtgtcctacctcaaattaattaaaaaaaaaaaaaaaaaaacacgttgttaattcgctccaagcccactcagctgctgaagaattttgagtattcagctagagatctttgtaatgaacaagtagctcaattattctggtttcattatacaatgtatcaggcattctttttttttttttccccaaggcagaagaatttttcttagtacagaacaaaatgaaaagtctcccatgtctacctctttctacacagacacagcaaccatcctatttctcaatcttttccccacctttcccccttttctattccacaaaaccgccattgtcatcatggcccgttctcaatgagctgttgggtacacctcccagacggggtggtggccgggcagaggggctcctcacttcccagtaggggcagccgggcagaggcgcccctcacctccctcccggggggcggctggccagacggggcggctggccgggcggggggctgaccccccacctccctcccggacggggcggctggccgggcggggggctgacccccccacctccctcccggacagggcagctggccgggcggggggctgatccccccacctccctcccggacggggcggctgccgggcggagacgctcctcacttcccagatggggcggctgccgggcggaggggctcctcacttctcagacggggcagctgccgggcggaggggctcctcacttctcagacggggcggttgccaggcggagggtctcctcacttctcagacggggcggccgggcagagacactcctcacctcccagatggggtcgcggccgggcagaggcgctcctcacatcccagacggggcggcggggcagaggcgctccccacatctcagacgatgggcggccgggcagagacgctcctcacttcctagatgggatggtggccgggaagaggcgctcgtcacttcctagatgggatggcagccgggcagagacgctcctcactttccagactgggcagccaggcagaggggctcctcacatcccagacgatgggcagccgggcagagacgctcctcacttcctagacaggatggcggccgggcagagacgctcctcactttccagacggggcagccaggcagaggggctcctcacatcccagacgatgggcggccaggcagagacgctcctcacttcccagacggggtggcggccgggcagaggctgcagtcttggcacattgggaggccaaggcaggcggctgggaggtggaggttgtagccagccgagattacgccactgcaccccagcctgggcaccattgagcagtgagtgaacgagactccgtctgcaatcccggcaccttgtgaggccaaggctggcggatcactcgcgattaggagctggagaccagcccggccaacacaggggaaccccgtctccaccaaaaaagtacgaaaaacagtcaggcgtggcggcgcgcgcctgcaatcgcaggcactgggcaggctgaggcaggagaatcaggcagggaggttgcagtgagccgagatggcagcagtacagtccagctttggatcggcatcagagggagaccatggaaagagagggagagggagaccgtggggagagggagagggagagcgagagcgtatcaggcattctttggcatcaaggaattaaagcacattttctctggcaaatggcaacagtgtctgatttgaagacataccctacacaagtggttcttgactaaatgtagttccatttaaaaataagagttaacctcttgtagtctggtctcaactggctcattccagggagttcttagctcacacttgctaatattttgtttacaattgtgcaaattctacagttggcaatattgtttaccaggcattgaactcttttacttattaatattttaataggtttttggggaacaggtggtgtttggttacatgaacaagttctttagtggtgatttctgatattttggcgcacctatcacccaagcagtgtgcaccgtacccaatgtgttttattttgtccctcaccccctcccaccctttcccccaaatccccaaagtccattataaggcactgaactcttaagccttgttccttgttcccacagctcggccaattgtgttggtccttccccctgctttatttagtcacttcctctggaggctggccttttctacccaagacaccatgggcagtggagcactcaatccatattctcccagacatgcccctcaatgccaagcagagaatcagagcacctggtgtttggggaccagacctgtgtccactaaaggaccccagtcaaaggaaatggcatctcttggaaaaaaaaaaaaaagctactttctgcccatgaagaaggaccccgaccttcccccagtgtaaatgtataggcaggacccccactaccctgtgctcctttgtgcagttgaggaaaaggtggcccatctggatggatacaaagcttggcaggaaagcaggggcaggatttcagctcccttggcccccgtgcaagtgaaggaagctttcccctgaggtttatttgacattgttctccccagacagctgccttcccaattcaaaggctcaagactgttgaaaagcatatgccaagggacagactaaacctgtgacagagatgattgccagtttgcgaaaatgctgaaagctttccataaatttgggatccacaaggcaccttgtcgtcacatgctgggtcaatcccattgcagtggggagtggaggactggactggatgatgtccaggagcctagcactgtgttgaaataaattattctgcaggctggtggtggttataaactcactaccagcaaggagttggggctgaaaggagaaacattataaaacggttgccactaaagtgtagtctgttcagggccaataattaaccctagttggagatgatttctctctttgactatcaccagggttgagagccgagtgactctgcctgtccaatttgattgctagggtggtccaaaggagagttccttcaccttcatccacctttattgggtctctcctctttcttttactgccaaatttcttgaaagaagagtccagacttgctgtctcaatagcttctctgccttgcatctgactgactgagtgactgactgacgagaggtcacagtgtgttggactgctaaagtagccagccttttcttgttttcccaccctatttgtcagtgtaaagtgttctaagctgatggcttctctttcctttttttctactttcttccttggactccagtgaaatgaccctctccaagttacctctaccctcgtggctgcttttctgcttcttcattagtgcctaagctgagtgtattgctcatggttctagcctgagcttttttccctgattatcttctgtgttggagatttgacctactcgtggggtttccatgataaccactctgcaacagactcccagagtcatctcagccagtctcatctatgtccagtcctcaatgcccacatttcaacatgttcaaggctgtcatcttccctctctacgttggtcttgctgcggcttctttagagaaattatcaagactttggagtcatacacctaggttggaatcctagttgtacacttttctgtgtggcctttgaaatgaagtccttttttctcatgttctgtgaatgctaccaatgctcattatacaataagcacttgtcaaatgctggtctccttccccattttttattagcatgaacatttcccctctctagtgggcttggaatcatctagtttttcattgtaataatgtacgttctcctcctctacacctccgcaagcccatttctctggaaacacctctcacgttggtcctgtcctttcaatattaagggatgtcatctgggcccatgcaaccagtgtctctgcctacccgatcctctctgcccgccactactgcctgaagcatgtttcagatcatattcccacccaaaaactgccagtgcccccactctcagttccatacctttactttcaaggtttttaatgatctgcctcaaacctagttttctgccaaacttaggatggctcaatcacatggcatgctgggacctcagtgacagaatccaatgggatggggtaaccagggtagcccgtgtctatcccaaagcctccaatctggaggttggggcaatgctttagggccataatgatgctcaacgtgaaatggggcttcacctgtacttgggcattgggctctggtcctcagggcaaagatcctaggcaagaggatcaatgactgggccccagccaagctgcttaaaagccagggcagcactagaggaccagttggaagtccagagtcttgggaaaaggaggcaaaatctcaacccctatgtatagagcaacatgacgctcggagggaaggaagaaggcaatgcagtggtcctgggcttctacgttaattctgagagtggccccgcaactcttcatctttctcttccctggctttaggcatgtatcttgcaactagcacttgcttaattgatttgacacacctccctacacttacccctttccatacaaagtgccaggtcctctgaaagctccctatatcacctggccaattggaattttcacagccaaggcagaaaacaggtgaggtttggttgtcaatctccatcttaggcattgaacaggatgtgtagccagttcatggaagacctttttcactcttctgaagacttaggaataaaaaagggctcttactgttatcatgtggtcagaaggcattctttttccactttaaagaaccaaaacttcctccagttcagaaacagtaaatgaatggtccaccatgtgctgcgaactttgctgttcaccaccatggctgctcctagcagcatctatgcaagcaccccatggatgctatccagggtttcttctttttattattaatagctaacatttactgagtgcttactatatgccaggcactgtgcaaagggaaacacaatgcctcagtcccaggtagttcctgggaaactgaacagaatcttaaatagaaactctaaggagttagggaagtgagggctcactggggctgtgaccccaggggagaccacactcaaaagatggttttgcaactcaacctcagtttcaggcctgctatatcacttccactcactcagtagtaggcttggcatttagtgggggacagaggcatggtgggaagttgggggtgctgttcaggcttggccctcaccagcctctgctgggactggtagcatgaatgctgtgtaggatgttggggagctggaagaagactcttccgcagcccctccctctctatcccattcccctctcatctccccacccttcaaggttaaatattaaaaattcccttcacggggtgagctttcagtccttgattcactccaaacaggcttcaaacgcaaatagctgtagagaagattaacaaggttgcctcaaattatttggcaaggggtggggagaggatgcccaggaaccctggctggctggagagtggggagaaaagggggcacagtgggaagctgcaggcaaacacctgccattgtagcattgcagaaggccccaaaggacccagccaatgtgagacaggttggtttaaaagcctcccatgggaagaaacccagaatgatgacaagcagagccaagttcacgtccctgtgggtgagagtgtgggtctgggaatgtgaagcctggagcaggagtcaggggcaggggctctaggagagctgctccatgcccagaattgtgcagggaatggcataagcagtggcccagtcaacttgcttatcccaggcccccttttcccaaatttatgatttgaaaatgaattattttaaaatgtctctggaatcttgagtacagtctaacaaggcatttgaaatgtaaagatttatgtatttaggaaagcatgaggtaaattaccttcattgaaatatatacatagagagagtaccacagggagtaggattgtctcaaacaattccacatgtctgcttctcagggacctgtacccaccaccctgtccttccacaaagaatgtaactaaccaaaaaccctagttctgtagcaatgaccgcatttgagaacgaccccacaccccgcacttagttcaccatcatttctcttggcactgcaagaaggaggtcagaatgcagttatgttgcggggaggtcactgccacattgcagatcttttgctcataatgaagcttggcaagttaggctgggagacggcagggctgtctcatcggtgttggtttagtcgctatgggtggggccggctgggagggcaaagggcacagccatcccccatgcaattctgtaatggacagtaggatatgggggaagggtgtctcaccagaggagcaaggcagagcccagatcacagctgtcatgcctgagaacagtctgcgtttaacaaggagcaggcttgtggggccagaaggtcagatctggactctgatttttaggaaaaagcaaggatgggagagtgagtggggacaagaacaaaggaggaggctgagaggagagtttctctgtagtgggccacaggagcatgccaaagggtgagaggatggagcacttaccagactgcttatctgaaatgaggaaactcccttagataaagcaggaacgcggtggtgaaacctgaggtgcaagactccaggtttcaggaacccccaaagggtgtgggatggtggagaagctgtgactcaagtagcagctgtggaacactagtggccaacccaggggtggactatggggggtgggcggtgagttgctttggacagtgggcagagcggtggcagcttgaacaagaattcctgtctccagattgggctgggagtatggcaggattgagcacacaggtaactcagctgtcaggacctgatgagggccagggatggtaggggctggggacaggaggcaaagggtaagtggtttcattcattcaaaaatcactgcacaactgctgagcgctaccaacaccagcaggccagggataggaagatgagtaagacatggtccttactcttgagaggtttgtgattgctgtaggagatctagactggggaaaatagagactccagtgccttaagaaatttagtcaaactcatggtgctttgaaagtattagacaaaagcagctctctattctcatattttactccagtaatactctttagcttatgcatatcagatttatttacccattgatttttccactgaggcattgagcttttgaacattccaccttcaactcagctgtaagatgcacatagactttagttgccaataaaattggctggcaacctgggactgcttcaggtcagacaccaaggaggtggtacttctgttccattttatagtgttagccccagaccattgaagaaaaccaggactcagttgaataattactttgggggtcttaactgaacaactggttggagggcatgagggaaggtgagggcatttgagggtaggatggagacctggccagggcagagggagggggaaaggtgtttgggcccaggagacaaagcctgcatgggagaggctgccttctgcacagcagcgataccaatgtctgagctgtggctgcccaggagtgctgacgaggcccacacagcttcagaagtggcacttgtagcatgtgagacagcctggtgtgaagaagccccaaattcaagtgggctctgtttccgggccaattccaagcagacctgcctgatatgccagagaacacaggtatcaaggttcgcattgcgttagtaatgcctgtgggagacaatagggtgaaccccgcagcaatgtttagctttcttctcccttgactgaggagcctcggttgttttttcttaaaggatatattttccactgttttgactgggcttgtccaggggtgctgggaagaacaagataggcaagaagggaaggactaataaattttcttgctcattcctaaagtcctatttttagattagatttttagatcttgagctcatcactatgtgcactagctgtcattggataagtcatgtccaggtgggacacctggtggcggctccactcttgccaaccctgccctctattgatgccacccacctcacagatgaatgtgctgggtaggttcagccaaaagctctttcttttagaatcagcctcagcaagactagagtgacctcctgtcccctctagaggccatctagaggtatattctgaatctgctgtggctcacttctctcaagatctcctgggtcaggggtcaacttctcacctgtacttcagccaatgtatcctcctatgcttgggtccctgccttttatttctttatgggtgattttcatctgattgccttgctgcacaggtacaaagcaacagatctgcagaatgaaaacagctggggaaccctgagtggggtgagagtagaatggaggaggtggtggtatcttcttaagggggtactcatggtggaagggtcttcgtttttcttggggaggattccctttgtgctgtccaaggagacttccttacaccatgggctttggacatgcttggtagtcagggcacacttggctttgaaatgcaacgagctaagtggaataagcactttgtaccatactggctgatggtaccatactgtgggtcagataggaatcaaccttccaggggaaaagaacaaacaaacgaaacagacaaacaagtgcctgaagacagaaatttaattgagtgcttcctggcttttattttagcccccctcatctaaagatgtgcatctgtcccagatttgagctatgatgtgtggagaggtagaagagagaatatttatatgcaaataagaggtgttgaccagaactctggggatttgggtgaggaaggaagccaggttttctgtggcaggggtaaaaagagagagcaagggagagaaggggcgatccagcaggagagaggagtagagttgttatagatgacttctcctggagagttggatcaggcccattgcgggtgagagggcaaatctttcccaagaacccaagtggtagaatgggtctggccttccctttaggtggttattggagaactggtgggtatgcatgtggagacgcagatgcctgacaaagctggtgccgtctggatggggggcaagtaaggtgtttaggagtgagactgtggtgactggtaccaaaaaaagaatgttggggtgatcagatccaacaccaggccttggtggtgacgaagtctggcggagtcaaaggaatgagaaaacacagtttgagagagaaaacggatcaagtgggctaacgcaagtatggaggctgtgaaggccctgagctctggaagcccagactatttattggcgatcaaacaggtggtgagaatgtgggggtcgaaagggcaagtgcatgatctacagctgtgaaagtttagcatttcctttgaagcatatggaatatattctcctacttgagataatggggagcatgtttttccagtttaagctagaagcaaggagccagcaagtctagacccattccagaggccacgaggggttttatgcgccgagccctggacattatgtcagacatgcaaaccctgcctcagcttttttcccaacactcagctttttcccaacattttccccttctcttttttgtaaaaccgccacagctatcattattactagcataaaaggtggcctctttttgtttttaaattaattgagcaaggcaattgcaggctgtgcagcctttgattgccagttggtgatccaacttcattgttcttagcccttattcaaaatggagtcgctctggtttgaatgcttcccacgtatctcccctttcccttttacaagaggacccttaatcctaggggtttcaggatgaaggtccatgctgaatgggggcaatgatactcctgcctaactattagggtctcttgtattcagggtagagaggcactcagtcagaaagcattggtccgttaagcatctgtaggtaaaaccctggcgctccagcagtttctcagcttcctgtgcggttttcttgatctgtccccatgttatggggattgcacccacacggttcgttcatctccatgaggtagaactttccactgataatgagaaacaggccccttctaatagaaggcacagagaaagcaaatggaggcttctcaaaccttcaatttgcactgtacaggtgggtccgctagatgctgtggctcatgatagatcttcagatgtttggtgggcacccacacaggcacctgattgtcacctggagagacacaagcaaatcttcttccccatataattatctttcctttttcccagctctttgtatgtgcattcctccaccatgtatcttgtccagcctttttattttccttttgtcctgttaggtgttgtttcactgcagttatgggttgatctttttgtaaatttaaaaattttaatgttaataaagctaaatgcaattacatatgcagtgtcttatattcctggtccttctccaagtcgatatcccatatttctcatcatttgtctactattattactatattgatccataggaatagatatttcagcatcccattgttgcaataagtctcttccccataaattgacaggaataggtgtaataatagactgaattgtcccttcctggccatccagtccttgacatggtaaaatcaaggaactgtgaaaaacctctgaggcggttcctacgccaatgatacccatggaagccttttgtttgggccagtgtcggggtcattgatttagagcaataatagagacatcagctccagtatctactagtccttcaaaatcctttccctaaatagtcactatgcaaataggtcttttgtcagacacttgattaacccaatatacagcctttcctgcaggattagtactaccaaagtcgcctgttctttcactgtgctgcttcctagttttgtttagggtagcagcagcaactgagcaattctttctcctggggaggcagaccacagagttgaggaactaataactaattgaatttctctggtataatcagagtcaattattcctgtatgcacagcaacacctttcaaatttagactagaccttccaagtaatagaccaactgttcctgagggtaagcgtcctctaactcccgtagggaccttttttggcagctccccaggaaacagggagatggtaattgtgctgcaaaggtctatggcaacactgcctgctgtggcaggggacaattgttgtacgcttgtgagggcactggctgtgccgggtatgcctcggtttgttgaggggcctgaggtgggccactcttcccatttcctgaaagaggttgtccatctttagaacgacactgatttgcccagtgattgccttttttacaatgggggcatacaccagggcttttctgttgattgacggtagtagttcttgccttttgatttccttttctacattccttttttgtgtccaaattgccgacaattggaacaagagcctgagaaatggggcatattctttcctactcttaatccagccatagcctgagctgaaagagtagccttatgtaagttacctccaatgccatcgcaagccttaacgtattcagagtaatggcttgcttgaattccttccctccttgctggattatagtaatgggaaattgccatacttcaaggtctccctcggctctagctttttgaatagaattttgtatagcaccaccaattgctccaggttttaatgttgcaactacaggagtggtgtttttcagctaattcattttctcgcccattaatgggagagagaagaggtggccattcacttaattcagcaggtggagccaacgggctagtaaaacatacttctttcagtttccctttctttaatttcctccggtttctgttcctcacattcagaatctgaaattagttctttacactcgtcctcctcttcctcatctgaatctacctcatcatctgtttgaaatggctcaaaagctgcctttattatcactcacattgaccaaaaaaaactggaatttttgctccatctttatacgcctttttaaaatctctgccaattatctcccattcatccaactccatagtcccttgttccaggaaccatgggcaaaactcctttaccgtactaaagagtgataacaaattctgagtactaactttcacccccactcttcataataaatgccttaagaaacttaaataagcagaatatttgctttcactttgtcctgttgttaccctggttcttccgagccctcagctttcccaccaagcttcctttagtcatccttgggtgtcctttgacaatgcatcccctgctttcacatgctctagtgttccttcaccagggcctttgtcgccccacgttgggcagccaggaatgttggggtgatcagatccaacaccaggccttggggcaacgaagtctggcagagtcaaaggaaagagaaaagacagtttgagagagaaagtgggtccaggtggccaacgcaagtatggaggctgtgaaggccctgagctctggaagcccagactatttattggtggtcaaacaaagaaacaggtggtgagaatgtgtgggtcaaaagggcaagcacatgatctacagctgtgatagtttagcatttcctttgaagcatatggaacatattctgctacttgagataatagggagcatgttcttccagtttaagctagaagcaaggagccagcaagtctagactcattccagaggccacgaggggttttatgcactgagccctggacattatgtcagacatgcaagccctgcctcagctttttttcccaacactcagctttttcccaacaagaagatgaagtgttgtatcttaggggctccatctacaaggatgaagtaagaccggagaaaggggtgaaatcagcaagggtaactatcatcatgtgtctggaggtctgctgctcctttactccagcctctctgtctcagttcttctcattccagaggtccctgtggactgtgacaaggatttttcagaattcagagagggaaccaacaaggggcaagcttggtttatttctctttatttggtttattctcattattatttttcttgccttttctacctctaattccttcttagcccttccctttctgcttccatttctatcccaaaatatgagccacaaagagaaatttggggaattagaaggaagagacttaagggaaaatgtatatgtcattggtgtatgtgtcagttttcagtcataacttgggttgggggaagtcagtgtaccctttactcttgctgaggaaatttcttctgagccttagccacatcccacttgcccagggcatcattcttttcttttttttttctggcatatatctctacttcagattcaaacttggccattacctctggccagccaagcagctgtcccctgagaggggggccaactctcctgcccctcactgcctgcctcccaaggctgccctagggctcagctgaagaaggcggttgtgctttgctgccccctgttgctcaagtcctgcttttccataggagctgccgggctgtatgtctggatgtgacttctccaggcaggtcctcctctcctgcccgcagtgctctggctcctcagggtaggtttctgtccaggacatggcccctgaaagggcttggaaaaagcccccttgcgtagtactggctgagcttctacttgctgccccaggaacctccagagagtgacccaaacatctggtatagcctctaatcttacctagtcagtcatgtttctcttcaggcctcttctaagaacagtttcctggagaaacagaatagagttgtggtcactacactggagtcttcctggggtaggagtgggtcctttctaaagtagaaggggctgtgtagcaagggggctgtgtgagcatttctagaaatgttgtctgctgaattttccactgggaaagagcaagtcctggcggagttagcagcagctgggcagtaggcaatagatagcatcagggtctctggatgctcagtgggggtggcatcagggaacactggtttccccagtaacgggcgcctgggcctgcagtggcagtcaattccacagaggatgccccggagcttggcatctctcactgtgctgtcttcccattcctgagactggaatatggagctcatgtgggctgggcagcttcccagcagtggttggtcaggatgtgagagtgctgtggtccaggtacctgtggacaagtgacctgccacactgcaagacccaaaatgacactggactacattcgttgacacagttacagctgtaccaaaattttttttccaaggttcaagttggaacatttgtaagccaagccctcatgggtccaagcctattttcttcaccacaccacactgagtgagggcagtggctcattacagaccacagtatctccccacctccacccatgtagatgagaacctggagcctgccaaggactagtgtccagaatggtgcccaagtcacctcctgataggtaggaagtggccaaaatgaggtgtaggacctcatgtcctagaggtcaaagctaagagtccaaggcaaatggccacaaggcagaaagagccaaaccagagcccccctaaaatggggagaccaggatggatagataagaagaagggcaggctttggctgggcgtggtggctcacacctgtaatcccagccctttgggaggccaaggggggtggatcacgaggtcaggagatcaagaccatcctggctaagactgtgaaaccccgtctctactaaaaaatacaaaaaaaattagccgggcatggtggcgggcgcctgtagtcccagctactctggaggcggaggcagaggttgcagtgagccgagatcgtgccactgcactccagcctgggcgacagagcgagactccgtctcaaaaaaaaaaaaaaaaaaaaaagaagggcaggcttttagttttagatctaagtccaaagtacaaatgtgagcagagcgggctcttatggagggagccagtcacatggggtctaggatggagtaacagttcaacccccttagacccatcccttctctctctgtttctcctttgacttcgaagttaacaaaaacatttaatcgcattctaaatgcaaaagccccatgcaaacacttggaattgggaaaagaggagaatacaacagtttctgccctcaaggaacataaagtgagttcacagcctctttctctttcagcctcctcttttctctctcattccttcacctagcaggtgctaggcagcaactgtatacccagacattattatttctcttgccttttccacctttaattccctattagccctttctgcttccatttctatcccaaaatataagccacaaagagaaatttggggaattagaaggaagagactttaagggaaatgtatatgtcatcggtgcatgtgtcagttttcactcatagcttggtttgggggaagtcagtgtttttttcctcttgctgaggaaatttcttctgagccttagccacatcccacttgcccaggtcttcattcttttctttttttctggcatatatctctacttcaaattcaagttggttgtgggtcttccacctactttgtagatggagatgtgggggttgatgccaatctgacagtgaccagcactacagagtggaatgggaaccttctcatcttcctgctgggctcccatcccagcccccaggcctcaccttgcctctcctgcgcagtggggttcattccaggatgccctcccaataaagctgagggcatgaaggcttcttgaatggcaagcactttggaggctaggaagggaacaaatctttaaatcactaggtactctttttacttctcatcttgcttttaatccaagtctttggtctcttacttgcttgctttcttctcacccaggacagagtcacagagaccttgaagaatggaggaggtagaaaaaggagaaatgcaggaaggaggtgtgttatggagttatccagtggaggctcgcatccagctttattttgcctccaaagatcttgcatcctacctgttaagaagcttggaatgccactattccattaaatcttaaaggaacttgagtctttcatttaaaaatgtgttcctaaaatgtaaatgtccctatgtgggacagtatttagccgacagtaaatttgagaggagggtctcaaggggcagtgtcaccaggaaaagagagaaaggctcctctccccaagtcaaaccttaccttacttaaccgattgtatttcctccctcagaggatgccatatctcagtacaggagagaaaatagaaggtagagagacttttacccaagcaccccctgaaccccaggtgtacacaactgaacctgatgcagtgacaatcacgttcacacataaaacatctggctaaaggctaagatcacttcggatttccgacatacattttcctaagcagtgcatttttctttaattttccttagaaaaagactgtaaagtagccccacaattcccacatcttcatactccaccctgcattcaagttttcctgggacaggtatctatgtgtgtgcatgaatctatttttacggcatatgtctaggaccccctacgaggagccaaagtttcagagagcccagcaactatgtaactccatggaagggaggcatgatattactctctgttcacaggagcgtacgcacagatcttttctcctcctcatggtcagttttctatttgtgattagtaattagcttctcttggtacgctacgatctattacaaaagccaaacattcagggggcgagctgaaatgacaaaatttggctataatttatgttggcccctgacatatatatttttttaatggtttggtctctaagcaactgatctcttagcaacaagaagcacctttataaaagatggcacacgaagagtgattgccagaaaagccacctggttcttaaacagccgcgcatcattagcaaaactcaccatcttcaagagtccaaaaactagaagtgaccagcagacccaggtaaccttgatatttgcacattttcctggggaaaaaaaaaaaaaaaaaaaaaactcatgcaactattgaagagaacaaaattctttgaaatatgttcatttttgaggtcttattagttggtcttgactaacttttaataatagtatgtattcttttaaataactgctttttgatttttttaaaaaaacgtgatatttgtgatcagaaaacagttcacttgaaatatttcattggcatgagaatggaaggaggggaacaatctatctgtttcagaatttatttctgtaggttttcatttgatgggaaaaaaatccacatcatggcaaaaataggagtatacagaatgtcacccaagtggtgtgcactattagggaaatacgcgtatttattttctaatttattttcatactgcttaaatatttaaagagtagcaaaataattttactttcaaactttagctttttaatccaatgtcaattccagtagaaagtgatagtcttttgttgcaagtgttcaaggactggttttttcatttgctttcattgccgtaagaaaagattcgttccaaaactaaaaataggaaaaattacaggcatctgtaccttgtttgcttttttcaggtacccagggattgaagacttaaatgtctttccagaaaattggaattagaaatgagaattgttacttcatctgtactccttcaataaagattgcgtaattataaacccacttggggcactcaaagggcataaaaaaggagatattttatggggatgaaataaaaatcctcctaattgagcttggaaacagtgttacacagagatactgcagatctaagaaaacagactagaaaattgcagtttcaataaagacaagttgaaatagtgacacatagttttattttttataagaactgcttgtaccactttctctctttttctttctttatttcttttttctttctttctctttctctctctctctttttttttgtgccctttcagaggtgcaaatacctctttaaattgaactgtatgctgacattctcttggaaccagaaaatgggatgctttgtctgaatacaaagcttggtaatgggtcagggcattcaaaaccaacacaatcccacaaattttgggacttacagttgctcctctaagcaaaggcacctcaatagcacattatgattacgtttgattttaaaagctgcttatgacttgtatttctgttactgctaccgacttcaggcaggaagaattcatttttgtggagactttgcttgaagttagaaagttgggtgttttagattgaattgcagaaattttttaaagcaatgcactatgaaatcacagagaagcatataggtttgtccttcagaactaaaattgtatgtacttgcagtgtggtaattactgtagaaatggtttgtggctttaaagttaaggaacttgcataaataattacaagatgtaacttgtgtttgctatgtctggatatgttttcagttttaactgtactgtagtttcctaaaatatgaagggtagttaacatgaaagcaaaggtatggtaacatttatattgcaagtggcagctaagtttttgcagtggttctttgggactttgcaaatcgagtcactgtgtctttcgagttcatgtgttctgagttttatctatacatgaggaaacaagggggtcagtgggcctgtagagcttgtcattttggctggcataatgagccatctgacgaagatggacaaactcctgcaagatgtgagatagactatgaaatactctgattagactggctgctatagactaagccaaatcattctgctgtgttaggattagttatttctgagacacgcacttacattcacacacatgcctgcatataaatggtctcaatataaatctggaaatcaaaacaagcctctctatcagtgagagcttcctaggaaaaaggatagttttaattttgtgaaggacagtttccatcataatcttcatttagcgtctaaaagtcctagacaaacttgacggcccttttccttcaaacctcaggctggaatctggtgtggggctggccggggggacacagcagctagcaggcacactgtcaagcagtcctgctgtaggggcgatctatgttacaaatgaatccatttactttggacactttactacctgaacggaaacaatcaggcaggaacttgttcaataactacatggttggcctttcagcagaatttttgaactcttataaataaaccatacttgggataatttagtctttctctggtgagaaggaaacaagaaaaaaaaatgtgagcagtcactcttgagttaggtgcttgacgaggactgggcaatttacaacgtgcagttttgcttaacctttacagcaactgtccagaagtctccgtgtccccatttcacacatgcctaagccagatccagcagtttgccagatgttacctaaacagtaaatggcaaagttgggatttcaacccaggacagtctgactcccaagcctgtgcattttccttgtgtcagaatggcacaagtagcaatttaaaactgacactaaataatccctctggtcttagtaaagcaaaagctctgagtagggctggaggtgaagatttaggcatcttttcacagaagagactccttaaccactggttctgttgggtggagtgactcaggtcctgtgttttcaaggctgccattggctatgagccagaggtgggtgctcatttaggctgtggccgtggtggccacaggccatggcaccatttcttgccatgatgcacatcccaagtgaagtggggtaggactctttgaggttccctttctgtgtgaacagttctgagaacagggcttcctggatgtcccctcccaccctgacacgggccacaacagttagggactgcacaagcagagtggaagccaaaccacaagcggagcggaagccaaatccagaatgggccaagtgacatgtcaccaagttaaggtgaaggagggagagcccaggtgtggctggggcaggcctgagagtgggggtgagatgacaatagagaaagcagagctttctccccagcgttgcaggatttcggtatgctgtcccctctggcttatggtgttgccccttctttcttcttcaaatacccctgacaaagggatcaatcttagagagtttattaaaaaaaaatcttcttctaaatagtatttgggcaggagatgatgtatacaggagcgagggccagggaggctgtagccagtcctagaataaacactctgtgcatctctatttcttgtgatccttccatcactcagacacctggagcatcgtgcctaaagccagacagttcatgtaggtgggatttaaactcaagtcttttggctagaaacactgtggctctttcatacaactgggaaatatgatggtatttgtaggcagatacagattctgaggtggtctgccttgcatttggcatgaccatcaagtgaatacgaagagagctcttcacctgttacacttcagttcatcctcagaggagggaataacgctcccaagaggcataagaggcaacctcccatttctttttccattccctccccactcagggatatctatgggtaattcctctagtcatgagtcagagggctgatgggcagctcaggaagtctgaaaagaatgcccagtaataggttcaatttttgtacaaaaatcggtaataatccttgtgcaagtaatcttcatgcctctacttccctagggtccttgtctccaaacagacatgttcaccctgcttgagttcttgcctggtgtgtggtactattgatgtatatggctggcacattgacaccacacacctgccgtggacagcacgtgcccagtcccactctctacctggtgcaaaggaagtctccttttatctggcaattctgggtagaagaagagggccacttatgtcttttgtgtgtgtgtgtgtgtgtgtgtgacaaaatttcactctgtggcccaggctggagtgcaatggcatgatcttggcttactgcaacctccgtctctcgggttcaagcaattctccagcctcagcctcccaagtagcagggattacaggcgcctgccaccatgcccggctaattttttgtatttttaatagagatggggttttgctatgttggccaggctattctcaaattcctgacctcaggtgatccacccaccttggcctcccaaagtgctgggattacaggcatgagccattgcagccggctgtcattttttaaaaagcatagcattcttactctgggaactgacttagaggttgcttagtttggacttctcggaggtgaggggcctgagttgaagtgattttcccaagggctgtgcagctaggcaaaggtgggatagagctcagttctcttgactcccattccagtgctctttcctctgtaccataatagttgctattcctaagaagagggtgagagtagactattacccttattttacagatagaaaaactaaaggcatagttagattagggataactgccactccaaaactatgaaagttattaaatctatgagagtgatttaactaactgcttccctggattaaaaatttttattttgcctgctgaatataaacatgtaaggttcagtgttaaaatgaacacatcagagtgtccaaacactattctgcctattgatcatatagtttctctcctgtataaaaagtgaggaagggggtcgggtgtggtggctcatgcttgtaatcccagcattttgggaggccgaggtgggtggatcaggaggtccagagttcgagaccagcctggccaacatggtgaaaccctgtctctacaaaaattagctgggtgtggtaacgtgcacctgtagtcccagctactcaggaggctgaggcaggagaactgcttgaaaccagaagggcggaggttgcagtgagccgagatcatgccactgcactctagcctgggcgaaagagtgaaactccatctcaaaaaaaaaagtgaggaaagaaatggaaaaatggtccctcccattatgaagcctgttgtcctaaccgagtatgcatttatggaatccctgaaaaagacgaatcagtgtatatctgcatatctgtctatctcaactgtcacagccaaactccacaccaaaaatcataaccaggggcattgtaagcagtggtccttgtggatttttctcctgctgggccagttttttcccctataataattacaaacttcatacatgagtttggtactactctagaggaggctctagcaaaactaccctgctgtagaggagcaattataggaactctgcaattctgatgacagttctaaaaacataatgtgaaggtacgaactcattaatatacagttctctgtgccaggttctgtgctaagaccttcatgtagcttttcttatttagtgttcactacctatgatgtcgatattctgagcaccattttccagatgaggaagctcaaactcttctgccaatgaggccaacaccatagagtggtgtttgtttataaaatgtatattttattgcactcaaacgatgtacctggcactggtctagatgctggtgctataaagttaaataagacatgatccttgtcttgaagaagctcatagcctaatgaagctcatttccagttacatttgagaacttctgctctttggggctagtctaatagcacacaagagatttactcaggaacacgtatcttgaaggttgggaagggttggagaagaaatacgaggataggaaaagatatggctgaggttaaaactgaagggaaaaatcgaagatggacagaaagttggcactcacggtgtgtagaatacaatgggcacaagcatggatgagagagtgctgggttgtgcaaaagtgtcagccagcctggtgtttctctcttggatgaaggagttccacactgaggcacaatataaacaatgaacttggtgatataggacaatagtagaaaatcctaaaaaccaagcaaaggagtttggatgtagtgaacagataacgaagaactggtacaaaatctgctgatgcaaacactgctggctttttaatatcaccagattgtgaacacctattatgtaaaaagtgccagaggaaaagatttttgtcaaagtaacattgaccctgatggggggataatatgaactagaagatcagtctttggaaatccttggactaatcaatcaaagagtggcagtagccacagaggatacagcctgacctcagactaattcagagaaaacaatgggcttgactcagtgagtagatatgggagaagagaagaaggaaagaaaaccaaaaggatggtgggatccctagaactaaagagaagtctaaggcttagctacctggttaggtagaactgtggtggagctagtttgtcaacaaggtttagatcttgtaaattgtccacccaagtgagagtattccttggagatgttaaatatgtcacccaaactataaatcaagacacgttgggtctcagaaaagatgtactcttctgagagtacaggaagacaggggaacgatctggaaaacatcatttggatgctaaactattagaaatttcaaggtgttataattttttatgggtacattagggttaactgggtagtcagaactttaggtgactcgcaggcctggttagaggggtattgctcccacaggtgcttgaaagagcatctctaagaatgagagagggacagaacagaagatctggagaccacagactgtatgacctgggtgattaagaagagggcgataaaaaagaatcaggacagagtatgaataagaagtgaacagagatgtgagaagagaaccagaaacaaactgagccacgtggttccaaggagacgttctctgcaaaggcagcagagaagtaaaaaaaaaaaatgcttagacttgcacatagttcatcagacagggtgagagggaggccactgataccctcagaaagcaatttgggaggaacaggaacctaggaaaccagactgggtggcagttgttgtgggggtggaatcccagagcctagtcaggcctcaagacccacagggccacgtgctgaatgaacacaagacagtcggtctaaagacttgggcctcagcagaaacccattttggaatctgtctgcctgtgtagcctggggatagtcagcttgcggtgggaggaaagagcatgaactctagagtcagacggatggattttggtctttcctcagaaagaaaccaactgttgagaccctgtcaaagagatttaatctctacttcttcatctttaaaatggagctacttctacttatctcacacagtggtttccttttttaattttaaagactcaaatgagataagatgcctataaaatatgggggaggtgttcagtaaataccaatttccctagaacagtggctggttatactgtgttacttggagtatgagatttcttcagcaacttctagaagctgtttttagggtgaaggggttccaggtagggatagggatactgattggaggagctccagctacccacatcccagttttaccagagcaccgggatcccccaaaagcttttgcttaaggcggtaggggaggaagcagagaccaaactactgggactagtaatgaattcagcaaggtttcagttcaggatacaaggttagcatacaaaatccaattgtattcttatatactctcagcagtcaattggaacataaaaaatttaaaacaatttcaacacagtagtaccaaaaaaaaaaccaaagaatacttaggaataaatctaaagaaagatgtctaagacctctacaccagaaattacaaaacattactgagagaaattgtaaaggacctaaatatatggtgagatatatcacgttcgtggataattggctgtattgatctatagagccagtaaacttccatttaaaatttcagcagactttttggggtagaatttcagtgtgtgtttgttaggaacctttaagaagcagttggcaagactgcattaaacatacaagaggtttacaggggcaaatgactgggaaagataaaaagggagggagcgggagtaggccaaaaagctttcagtccccagtgtagtctggaatctgtgaaagaagagagggaagggcgagttgtgtggaaagggcttcagacaacagtatagctctgagacagtttcagtcagcagtagggaacccccaagcaaagattgcctgttggaagagtcctgccttggctggaatgggctaccactagtacccttagcatgcttgtcattgtttaggagctacccagagaaatatggcctttctgtgaacatggtggtgaatccatagggtggaactgtcaactatgctccaaatagtagtagtagtggtagttgttgttgttttaaggagatttgagcagtccacctccatggcaaccccataaagtaatttaaaaaaaaaagaaccaagttggagagctcatcctccaatttactaatcttgcttttatatttcaagacctactatagctatagtaatcaaaatagttttgtgttggcaaaaaataaacatatagattaatggaacagaacagaaaatccagaaatagacccatgcatatattgccaatttttaataaaagtactaagacaattcaatttgaggggggaaaagggccttttcaaaaaaacggtgctggatatatccataagaaagaaaaaataataaccctattaacccttacctcataccatatacaaaatttaactcaaaatggatcatagacctacatataaaacctaaaactattacacttacagaagaaaagaggaggtgaccttggagtagacaaaggtctctcagaacacaaaaaaagtaggagccataaagacacttgacaaacttgatcaaaaatttaaaacttaatcctcaatagacacaaagaaaataaagcagagcacagactaagataaagtattcaaaacaacacgtatcagacaactcgaatccagaatatatatatattaaaaaagtcaataagacaaccccatttttttaaatgggaaaaaagatttggccagatgcttcataaaagatatatgaatggccagtaagttcatttgaaaatgctcaaaattattaataatcaggaaaatgcaaattaagatcgcaatcagatacctctagaatggctaaaattcaaagactgagaatgtgaagcaactgtaactctcatatactgctgatgggaatgcagtggaacctcggaagataatttggcagtttcttaaaaagttaaatatacacctgctatacagccactgttagatttttactcaagagaagtgaaatatatgtccacacaaagacttgtgcactgacatccatcatagccttgcttgaaacagccaaaaaaaaagggggggggggaaggaaacgatggaaatgctccttaagaagtgaatgggtaaactgtggcatagctatgcaattgagtactgctcagcaatgttaaggaacaaactattgatatgaacaataagaatgaaactcaaaatcaatatgctaagtaaaagaagccagatgaaaaagagtacagactgtttgattatgacaatagaattccagaaagcacgaactgatcaataatgacagggagcaaatcagtggttatcaggggatgggtgtggaggaaggatgggtgacaagtgggtgatggaaattaaatgccaccttgattttgtaatggtttcacaagtgcatgtgtatatgttagagctcataaaatagtacactttaaatatttgaggtttattgcatgttacttatgctttggcgaagtcctttaaatgggatgggggagggtgggtctgatggaaggaaagcaaccccacctctacagtaaaaagatttgacacgtgctctggaggaaacctaggggaaagtgatatggtactttgctttcatatttatctacttagtatctgcttcttccccagggtggggaggggcgaaggcggagcaatgcctagtgccaaccagttgtggcgttcaggctccttccagtgctctcgcctgctaagctggggtgggcacagggaagacccttccccggggcatggggagccggcagggctggtttcaatggcaatccgccatagggtcccgcgctcagaaggggtcccgcttggaatctaatgaatgctctgcagtcaccatatgaaattcttaatcatttttccttcaaattcgtgtattgtaagtgaagtgcaataacacagtggatgcttgagagcttggactcttgtctcaccccggtcgcgtctcctgcgtcttcctgggacaggttctgggcccccacccggcgaacaccgctgccctccgccctgggcagtggccggccacggacgtgggggcggcgcagacctcggcgtacagccaagggacctcgccgccacgctgggtcgcctgtgagggtcggcctttggcccgccagcgtccctgtgctcaagccagcgcaacttaactagcaaataaaccctgccgagacaggtggacagaaagaccacgggagaaagggaaaggctttttcctgctttttgaacgcggggccccgcgtttttattttgcactgggccgcgcagattctgcgggcggcaccgaccgcaggcagccggctggagaccgctcgccgcaccccctgcctcgcctagtgcccgagctgctccagctgtgaatgggacacaatacgaggagctggttttgctcctgaaagcgtccaacaaaaatctggctcgattcgccctgcttgggagtgacagagacccaatctttgtcatgaaaagcaggaaacgggagggcagctttgctctccagagcagggaatgtgtctgggtagaagcagggaaagttcctgcccacctcagattttcttctggatgcagactgccctgttctttgacttcctctccagtgtggaataaggctgagggtctcaatttggtgaaaaaagtaaccatgacaacagtcacatcgtggagagcatagtaaaatgtgtaaagctcactggcaatgccttcccttccagaatgaaagctcctctagtcagacaacgactcaacggcaccaaaagagcggaagggaagaccagaccagggaaggctttccgtgccctgccctggggccttccacagattaggggacctccgtgatttgtcagctctttgcctccagctttctcacacggtccggggctgctttcgagagcttatactaaaagggcaagagcagagatgagctgtttttaggaaacatgtgctacaaatgaagtaaacccatggaatttcaaaataaaaataaacttggaaagttccactaaaaggcttagggcctgatagaaattgtgcaggaatcctcgactccgaggtttgaagaaggactggcagaagcttgtccaccttcgtctagatgaggagggaggtgcttctcttcctgccacaggggaggcttcccactcagtcctccttccataggcaggacgaagcaatcgcatctttagggggcactggttggaatgagagacaggtggcctgggctccaaactctgtcactaattagctgtgggaccttgggtacatagtttaacctcttaggatgctccagtgcttgccctgctctgtccgtggagatgcaagtgccttgcaaggagaggaatgtgtcatgtacataatgtgatttgtaggcacacatcctcatgtgttcatttctctttgctcttctcccagcctggcagagtagggttgattggatctggaagctttttgtgaggtgagagcaaaatctttcctcagttggctctgggctgcacagctggggagactttgggagagaacagaagcttcttttacctttgtgcaaaggaagccagccatttccctcaaggttggcggaagctagatttgctatgtttctggagctatcactagatttatccagaccaggcatatcctctagcctgtagcctgactggctcagtgggcatccagggatccgaatgaagctcaaacagctaaaaagggcaggcagataacgaccagagtataataaactgtgggggaacggttggcactgaggagagcggagagcccctgccctgtggaaagagggcagtccttgcttggggacagctggttgttgccacaaggtaatgtgattcctctagagccagatctgatttttttcttaaaagaggcctgtaatctggactttaagatatccaaaattttaaataaagacaacgaaagcaaatgtaaaactcagtataagccaaaagaagacaggtgagcaggtcgagtgggtgaatgataggaaactgcagtcaggactgggaaatctgagagcaatgcacttttgcctgggttcccacagagagccctaacaggagcaccctgcctccctcagcctgtcttcctccctccgggctgaggagactttctatctgtccccatcccttttgttcaagccaatattgtggccaatccttgcctaacttttatgggatctggattttgaaactcaaaatatttattttttccatctgctttctgcttcccttaggcaatgaaaaatgctcagctgacttaatgtggggagggagtaaagggcaaacaggtcaacatctcagagggaagggaggacatggaacgctgtctgacctgcccgcagccaggggaggtgggatccagaatggcaggctatactgggtggaggaatgccacacacatagccttggaggcccaaacggggcagtgtgcttgggaagttaggcccagtttgatagagctgcatggagcgcagggcaagtggcaggggatgagactggaaaagtggatgaaataggatttatgtaacataagaaagtgtaattggctcaaatgtctgattacttatgtgttatttttgtaaagctggtgacccaaccctacattggttttgtataatttaacatctgtgcactttgaagtgacatacattgaagaaccttcagagtgtcagaaaccatgacctggaaagcacatctatcctaatttgggggtggtcttgatctctatgaagtatccaaactgatactgattggactcatttgaggatatcaagtaacatcagacttcactgagaggtgtgccaccgctgtaaccaagggactgctactactttctgcctgcaccccaccccagttcctattccctgtttccccagctgcatccaactcttcttgttccccggtgatccttccaactctttctcttcactatattggggctggcccctgaagactccattttttccttctgccctgcgttttcaataataaattctataatttcagtgctgggagctggtgttagtgtcttccaggcaactcactgctgtcccttgaccgtcgttactctttccttctaaaagactgaaatctcctgtaaggttcacttcacactatccaccaattcaccctgtctcccctactaaccaaaggctttggtatctttctcggggtcttaccctcccccccgactcctgccatcattctaagtaactgaatgtccttgtggctgatccaaccaatgccctgactacccagttccatgatgactgcaccgtcagtgatgttatttgccctttcacctcagcacactcacatggacacagcggtgaacctgtcatcatcagaaactgtgcctcctctgaaatctcattctcttgccaccaccctccagctcccttgctcaagtcccttctctacagcagttctccagcctcaatgagatttccaagccaatggtccctccactttgcctatgtccataaatctcctcctatcttcattttcttttgtatctagctcagaggccatggttcttcctacagtgtcctaaaaataccactaaatcctttgttgacctctcagttgttcccagatttactcatgcctgttgcctgaacagatcagaattactggagaatgtgacacaactgggcattttggcatggctccaacttcatgctctccaaactcagctgggacctccacactgcctagcaggtttactgtgcttttctagaagctccctccatgttcacaatcacaatctcatttcttcctctcagagttggaatgcttgcaacccctttattcccagagcagcagcctgggaggattggatgggtccattggatttgctcctgtcctctcctttcatcactgcctccagcaaagtacagtccctccacaggtgcctggatctcatgccttcctccctggtcagggctcttgttctgtcagctataccctctcttttccaaatctttgacctcttcctcactactggatttttcccttcagcactcaaatatatgcaagaatccaccctcacaaacaaagccaagcaagtgaaaacttccctaactccacacctctgtcaagttatcacccattctgtctattctcctttaacagccacgctttttgaccattatgcataggcactgcctctactttatctcctcctctcctttccattctggcttcctgcttcaccacattgcagaaactgctcttgtcgtggtcaccagtttatccaatgtcaatgttctgcctgcatctgacttgaccactcagcagccctttatacagttaaccatatcttccttcttgaaacactctctcttccgcttcagtgataaaataggggttttttgtttgttttatttacaccttatgacagttctttctgaggattttttttttgtctgttccttttcctaccaaattctaaattcttgagttctttgggagttcatatcacaacatattctgccttgcaatttcagcttctctcaagaccttaaataccatctctacagtggccaaatttaggtccctggtttaatctttcttgaaatcttaacttttccattacagaactgaaattaagtacttatttgggtgattatctatattttgcttgtctcccctcctagactataggctccaggagtgcaagcattgtcttttttttattcaccacttccataatccgttgagtcagcttcaatgtcaattcctacccaatgggttcatgctctgtctgccaaaggccaaagcaagtatcatgaaattttctaagagctaggacatgtcactgcagccttttctccaaatttaagtgtgcaactatattttctttattgcagaacaggaagtcaagtagtttcttttgccagaaatggggaaatcgtatatcaataaccctagcactgggggagtgaggaggcctcaagtctgtgagtccaggcatgacatggcaaactctatagattttggaagactaactgtcagcagtaaggaagaaaaattggtaggaggagagaataggggcagggttatttgttgtgattctgtttcaagagagggctgatgaaagctcatggatggccttgagaatagagagtgctgagaccacctcagctggggagaccctaacccagtgcgctagaggaattaaagacacacacacagaaatatagcatgtggagtgggaaatcaggggtctcacagccttcagagctgagagccctgaacagagatttacccacatatttattgacagcaagccagtgataagtattgtttctatagaatatagatttactaaaagtattccttacagaaacaaagggatgggctctggctagttatctgcagcaggaacatgtccttaaggcacagatcgctcatgctattgtttgtggcttaggaacgcctttaagtggttttctgccctgggtgggccaggtgttccttgccctcatttcagtaaacccacaaccttcagcatgggcattatggccatgaccaacatgtcacaatgctgcagagattttgtttatggccagttttggggccagtttatggccagatttgggggcctgttcccaacagagaggaaaggggaaaggagggactttcagagatgaaataacaattgattgggggagagatggtgggcagtgagaagtggcccagaacctgaagactctactgcttcacccatcggcctctccaatgggccctcacttgcatgctattcttactccctgggaggacctgccccacacttctctccttggaattctattcctccaccatgacctctctgaaactctccttgactaccctgcgaaagtaactctttctgttctctttacccccacagcacttgtcaagtggtcagttttatttccagttgtatgcaacacgagtgcttatgcagttagctatatcaaggcattgtgccatctgtaatgaaatggctaaaaaacccatacatttgaagaaacacacttgctttctttatttccttgacttgcagttagtattaactgaccaaaagcattatcttcctctttttgcttttttatgaagttttggtaggtcgtgttaataatacccattactcatttctctgataagattatagaactgcaaggtcttggatgacattggcctgctccttctgttacgggtgggtctttgttcttagagctcccaagatggtggttggccactcccaagatggtcgtgggccactcccaagatggtggcaagccttttgttgtctgacctggggttcttggcctcacagattccaaggaatggaaccttgggccatgcggtgagtgttatagctctattagaagccgtgggtcatggaagagaaccgtggaacccagcaactagtgttcagctcgattaggctgaacctgagcacttagccatgcaggaacaatggcgagcctctagcccgatcgggagtggcgatgggcacctcgctggatcagaaggtcagtggacaccctgctggatccggagaggtgggagtcaatggtgggtctgtgatggtggcattcagcagtggtggactgtgaatgaaagctcagctcgagccagaacaaacacggaccagaagagtgtgcagttgcaagatttaatagagtgaaaacagggctcccatacaaggagagaggacccaaacagggttgcccacacctggctcgaatgcctggggtttatagcctgatcattgtccctccctctgtgctctcaggcaatatatgatttgactatttctttacctcctgcttttagcccaatttgtattttagtgagccctctttactacctgattggccgggtgtgagctgagttacaagccctgtgtttaaaggtaggtgcggtcaccttccccagctaggcttaggaattcttagtcggcctaggaaatccatctagttctgtctctcacttcctttgattttgaagtaaacaatctcttaactttgggatagcctgagacaccacctctgacttctaaatgactcaatatcccgaaaacccgtggtaatctcagtccgtctcagctggttccaattaacctctttccaagctatctgtgtgggcctgctttagccttttaaaaggaaccagacgtttttagtcacaatggatgcatatgatagcatggtttacctcagatatgctgtgggttagcttctataggctttcttatatttaatgctttcccctgacttcacatttaatgcttttccaaaaatttcccaacatcactaaggcttcagcagccctttaggaccagtatttctgggaaaacactcaaaatacatctgaatctgtgtcgtatatcatcacctagagcatgccaccatctagtttcagcaaaatcctagtgattccaccagacaagaaagattgcctcactgggagacagttgctgattcctgttgcccttcactggtctactttgataattggcatatgcctttcctgcggcattttatcacataaagctttgctgtttttatctgtgttcatgtctttctctctagatgtatcattaaaggcaaaaacaatattcatttagtgttcttcttacctgtccttctctccccaatactggaatcctaacaccatgcattgcacttttttggtgttcagggttctaggaaagctggtaaatggatgaatcataaatgtaatttggggcaattttttcacaaaatgtgtcacctatctttgtcttttctctgcccactcatactggctttctgtggcttctccccatctgtctagcatttctctctacctctgaagaatatcagtctggtgcagccctagcaccttctttggactcattgttaaagatgttgaggaaggctagctccaaggtttaccgtttgcatttagagaactgtcttaccatgcctggtttcttcagccctgataagactatgccatcttcaccctcccttcccctgacccttccttagccacctcatccaacctatggcaactcaacaagaaaagcttacaaagtcttccttggcaaaagagctggttgacttgagccaaaggaagctaggtgcagtgtccgattcactcccccaaatcccccttgaaactggagaattgaaaacaatctggtttctctctgggttctttcattataccatgttttcttgcatatagacagaataatgtggttgttacaattatttataaatgtagtgtatgccaggaactgatcactgtgtgtaacggatacaccattatttttcaaggaaaaaaaatattttgggctttgatgattactagacagatgtccttggtgataataatcacagtaagtcccaactctacccagtacttcacaattctctcagtgctttcctacttgttgtctcctgtaatgacgtatcatatcctgaatggcgggagggcaaggatcattagtctcattttacacatgctcattctgggactgggagagagatttcctgatttgcctaaactgccacagtttgtcaatgatggtggagggatgggggcaacactgaacctccagcttcctaagactttcccactttctcaagcttttgtcgaatgtgtcattagtggcattcactttggtcaactttggttccttgggtattgctggctccccatttttttggatttaaactcttcaaattaaataaatcagatttacatgttaaaaagaaaagtcttctctaaaagactccttcatttttgtaaatctttgtaataatttcaacagaccttaccttagaatttcaggcaataggtacatatcgtacacctctgttagttcttccagagactggcgcaggggttggagatgggagggaatagatgggggaaggaatgtggagcaggggcctggactccagtccaagctctgctgaaggagggccttttccaaagtggatcctcctgaaggcagaggctcttctagaacacataaatgtgcagcattggctagtaggagtcctgctggaacgaggctgaggcacatacaggatagtttataggagagtcaagtctcatgcattaaaattaaacaagcacttgggctttgttggaataaagatatgctagaaatgtcaccaaggatatataccaaatgccaaatgtagtcatatacaatgaaggagagcaatggtaggagaggtgtcggcaggctggagagaacaacaagtgctgtgggctaggaactgtgatttggaagtgtgcaacccaaactaaaaggagagaaaatggttacagccactggcagcatcccagagtcttacctactgcctccggtcctttgcaagtaggtagggtataaatataatgttatctgcccagcacaaaggagaggggagaaaagaaagcaagaggcagtcaaagggacagagcctagttctgagtcctgttttaccactcaatccctggatgaccttgagcaagttgcttctattctggacttcattggtaacagctaactcacagagtcaatatgaggattaaataagactattggctaaaaggtgcttagaatagtgcctagcacagagtaagcacttaataagtgttagctattattgtgataatacatgcatagaagtatatgcatgcatgtacatttaccagtatgtacacatttgcacacacaaaatgcccattgtgatctgcaagtagcactaggatccaaaaattaaaagttattatgttccacaggccaccttgaaaagttaggggaaaaaaaaaacttgaccttcatgtgttgttgctgtttttaagtggctcagcactttgaaataacatttggaggaaagcattgcaatggaagcagcgctgtgtgggattgatcctggagacctgggctcaggcgctggagcacaatgtccaggaagccaaggcctgtttggattccttacgccatgacatggaggcaaagctcctcttggctgccaacccaagagcccacagtcctgtgagcttcacccttcctagggctgtttgtggtctgggccctcgaggttgtgggagaccagtttgattgctaagggaaaatcccagaatggctcttcttgtccttaccgaatcactacccttcaccttcctgcgtcctgccccagcctggagggcctacctaggcctgctattacttccaacccagaagtgtagcgaattggggccatgaccacaaggtttacacttggttacttggtggaatatgaactcttgggcaagttacctaatattgccaagccacatctgtaaagtggatatgagaatagaatctacttcatgggtctgattgtgaggtttagatataataaggtgaagtttggcactcaataaaaggtagctgtgctcattcttaccagcagcaacgagggcagtattgatgctgcaggcagagagaaagggggaggctgctgcctaaagcacccttgccactcacatgtaattaggtgaccatacaatttattatccaaaaggagacacttaagattggagggggtgcaattaataatggtgccaggacaacaggcataaattgggacagtcttaggcagacttgcccatgattccttacccactgcccacccatcatctgactacacctctttcttcaaagcatagatctcagtgggatatttttcttcttcctgatcgctttgttttttgaagggtatgatcgctttgtttttgaaggatatgattctgccattaacattagctatcacttactgaggagcaaacatgtgtttgcctttgtgttaggtgttttatggaaatgagctctaaaatccttgcagcaaccttgggaggcaggtgctacttccattacccggttatagaatgtgaggcttagggaggttaagtcacttgcccagccaaggttacaggtctattaaatggtatatttggtatttgccacttgccattttaacagcattttattggcctttgcggatcagaatgtttagcggtgaccccagaatgacttgtgcaggacccccactcccacctctcccctgctacactcatggggtaggtgtcagggtgtatatcttcctgtcatacatccaccaattccccaattctcaggtcatagcagtgggctgaataaccattggctgccctcagatttccgcagaaatggaagcttcttaaatataggctgttaaacctggtttgagtttctttgtaaaaggaatcttgtatagtttccataagacctaaagattgtacagctaagcctgctgaagaatttgtccttattttttccatttcagatattcccaaggttaggtagagggggtggtgttgaagagcaggctctctagagccaatgctgtttattaataagctgtacagacacgcttcttccaggaatgtgcacttttgattctgctgtggtgataaagatactctgccttgcccattaagcatttgttggtggaaaacattacctttaaataaatgtctggttctatgtgagcaaagctagggctcccataaaattgggcaatgatactctgaattcagctgaactgtttgggcaactttgtcacttctggggccatcattttcaggatagttcccacagtgtgagaaaatgactgcttcctatagtactgtcaagagtgtgaaaagagagctctttagcaaacacattatttatccatccttaaaaagcttgtcacctccagggtgcttgttcagaagtaatctcattacttaaatcatatcctagcatgtggaaaagctccctgagttccccgcctgccccacctgctgatttctcaggaccgctgataacagctttcatgtggaacttgggattaatatcaagcaagccatggattttgtctccactgaacttgggcatcatggacagtttccattccagcagttaagggcttcctgactttcaacagtggtgctgatcccagttctgaagagtggaacatcagagagcctcccctcctcagccacttgtaagcataacaaactgaaaatgtaatctgctttcaaatattctgttgagtaaagattccttttaattactttaactgggtttttgtagagacaagggaccgttctctgtttcccatgtcataaatgactttaatgagaaatggtgaacacatcaattagggcaagcccacctgcactggggctaccctcccttcaactccccataccctgttgggtagaaaccatgtgggaatttactgatcagctgttccagagacccttagaacaaatagcgtttgcccccaattactgaataatgcctacataatttggaaagagggagatttcctactttgggtaagaacattgcctccctcaccatcagggcctttgaacacactgttctctctccctggaataagtcactccttggccatttcttctcctggcaaacactcactcacccttaagactcagcttaagggagcccatgaccctgtttgaggttctggagggttttctgttacatcctcccataggaccccacagctcccttcgatccatctcatctcatttttcctgttagccaactaacaggaaatttcagccacaaatgagcacatattaagtaatcactgtgcatttgaggaatgccaacaccttgaaaggaaaccgcaagttgtaaacagagtttatacctgaggagacttactgatcattcaaaacattcaatatattcaagtatatattgaattgttagcatcagagacacaaacagatattgcatccataaaaacataaacagatagtggacattaatattttagtttttgaaataaaaatgtgaatggacgacccgaaaggacaaacagatgacaaactggattgagagagtcaatcaaggaattatcccagaatgtagcacaaagagaaaagagatgaaaaatatgagaaaccaggcaagaaatatgaaggatggatccatgagactgaatgtttgtctaattggtattctaagaagcaaaaatggcaaaaatggaggggggtggggccacagtcaaatattaaggaagaactgaagactgcttgaagtctcagaagtaaaaagtcacatacagatatctcactggggccaatccttcaatcaatcactgaagatagacttaatttgggaagcagtcaaaggtcatttgcaaccaagtgtggtagaaaagatggataatcaaacctagttcttgtcgactatgagacgtaagttaaattagatgaaaaattttaaaattatttgcaaggctgataatagacttctgaagatgcctggcctctgctatcagcacccacaggcagtttagctagttgagtttgctctgtttttctcaaaacctcctttactttcctcgtatcactgaatgggaggtaatgaacaaattagaaactggggtcgactaagagagcactgcctctcctgtattgtccctcatcaactgcctttctacttatatttccacaatagatattattgcttcctaacacaaatctagcctcttcatttttgttatcccccaactgctttatgcactcctacctccagcattgcaaatacctctcctctacttgccatcaaaatctcaaccacatttcaaggcccagaacaagtcccatcattcacgtgaagcctcctttcgtctgtatgctaatatctctttgtacttgtcaacagtaccaagcttcttagttttctctcccaatagtagactgcaggcttccctagagctgagagtgtgccaaacatttgcttaatgataattaggaacttctccaggtacatgttacaatgaaaatatcccaggagggagaacaagttgaaggattagcccctggatatgaattattttgatgaggtaatatcctctgactgggcagaggatagtaggtggatagaaaatgtggggaaatgacacataaaaggaagtgtgggtgggaaggggcactggaggcaaatgttgagaatcccaacaagtgtgttcagtgacctcgtggctctcacatgatcccctaatatagctgtgacaagagggatgtattgggagctacacgactaccccactccccaacctgctccatgttctcaagacagatatagtaaccttttcaaaggcatatagctctttagggacccctgagggcacaactccagtccaaactgttccttccagctaccccagggactgtccattattatttctgctcttgctggagactgaatcataataagtttattgaggttttgctatatgctagacacctgataaggccctaacaggctttatctcgtttcttcctcctagtaaccacatcaagaaataccactatttcccccatttttttctaatgaggaaactaaggtagagatctagcagtggacatagtgatagagggtccccctggacacaggaatgtgaatggtgtggggaggaatgcagaagcagctttgagtttccccagccaattagtttctcattctctctacctgcaatgcccttcctcagcttggtatcttgcagagtaatgcttttctttcaagacctactcataaagccataggtgaccttcctagggtagtcactttctcctctcttttcatagctgtttatgcctctgaacacttgtgcaatctgtcttccccagattaactccgtaagagcaacaacctcatttccccatattcctacagcctagagcctaaaacagtggctagtggctaggatattgtagatttactcagtgttggaggtgaagacagtggcctccacaggcgcacactccgtgtgccctccatgcactggaaccctccttggcagaaacctggagattccatgagccttgatgccctcttcagggccacagtgtgagtctgtcagtctgagggcccacagatgggatatcagggtaccaattttgcccctcactttccccttaaacgtttctcactgattctgtggaccgaaaaatgtaacaccccattatcaactgtaatttggggtctagttaaaatgaaaaatcttcaagagaaattgtattctcttataacctggaaacaactttctatcagtcagtgaaggtggttttaatcaggaaagagcctctgggacattggacacctgaggcagaaggttgagaaaggaactgggcccaggagttgttcatttgaggtctttggattgggctttagggggtctgggatcccagaattgtactgaaactttgcatgttgattcccgagtgtgtttctccagagcaagattccaccacgttcactggatccttagaatgggtctgggactctaaaagaaatgagaagagctagagaagttggccaaagtgggccacatgcaccccagcctccctgacgtctcagtgtatctctgcatacctgggcctacaggcaccactggctggcctaagacaacgtggaagaaaagaaccaaggaaggcggcagggcaaaggcacagggaagggctggggaggggcagctaagacaaagggtaagaatgctgggcagcagacacagagatacagagataagaggggccctgtggctcaaccccctcattttatagataaggaaatggacgtccagagaggctaggtggccccagcactctggggtcagctaggagcttccttgccagagtgtccctgctctaggacatctctatggcctcacagtctgttcattaaacaacagataagctctcaaggaaaggccagcagtgctgctgctatctgactgtttgggtggtagctatgggccactgagttgctgggacttggcatttggaatcactgctaagatgtgcagaaggcaaacatccctctgaggatatgtgaatgtatcattctttgatgaccccaggcctaaaaggcttaagaggctaaccattggttcacttcacttcacaaacatttactgagcacttactgggtgtgaagcacttgtggtagcccccgggagctagatagaaaagcgaggtgtgagtccttgctctggaggaacttatgttgtggaaatattgacagacattccctgtttctgccgttacaagaacttatcatatccaggtagatgcgcagaaggaagcaaggccacttgggaccgcagtgtgacaaatcttggatgccaagactcaggcatggctctggatctcaccacagaaagaggttcagggggcctctctggctggcggcacctgggctgccctaaggattgtgtatccacttggggaccttccgtctttgctaccagaggcaaggaatcccacaactccatgtgccacagagaccttaaagccggaggaacgacaaacaccaccactggcacttggctccggaggcttccctttcgccctcacctcagtgtcccgaggcagtttcagtgctccccctcagcccgggcgtggcaggcctgggaagtgaacaggtctctgagactcgtactcagctcatctggccccaaagcctgttcttgtgatgtggtctctgggtcttgtactcagctcatctgaccctaaagcctgctcctgtgctgttgtcacttctgccttttccttcctcaggttaaaagcccagttttggctggaaaattccactaccttatctactctggggccaggtaacctgttaggtcttacaaaattgaattgaaaagtgaagtcatgggaaacctcttagaaaaatgactgctgttcctggaacaatccccaactggccctttctgcctcctccataaggcgaggtcagactcctcgtgagaaaaactatggtttgggtgtcaggcaaccccaatgcaataggatctgggggatcaaccccaattcaataggctccccaaatagtgcccccactttgtctcatggcctgaaatgccttagataatcaagaagtcttttaaaacagtcatttctcactgtgtttcagaaaaacttctctgggagactctatcagatgcagcccactgggaagacaatagattaggtatctgaggaaccagaagcaccatcagacaggcaaataggctagctgagataagggcactcttggactactattgcttttgactgccaatgttcccaagtcccaggcttgctggtagtcagccaataagtcattgtgaagaaaggagtgattctacaaacccacatggagcacctcctggggaggtgttgtgctagaagtcacggaacctcagaggtgagtgagaaagccacggtcctgcctgatggatgcccaagagccttgggtcttcacacacatgtgaaatgtgggttttagcagcaggtacctttcatacaccatcaatagtcttccctatgtgggtaaaaccctaggggctgaggtctcccattggtgccttcagggctttttgctcattccacacaaatggtcagtcagagaccacagcagggatgggaactatagggtggacaaggcatttgccctgaaggtagtccacaccatgtgtatctagctgcatttttcctgttggttcctattgtcttgctcctgctccagaagaagaatgtcccagggaatcactggaagcttgctaggaagaataactggaacctcaagtgtcatgaccccagtgccaggggatggaaatcatatcacagaatgtgcacttgggtgaaccttccctgcttttaagtaactattgacaagtgaccttccctggatctcatgtaagtggttcatttttaaaggaagagaactgtattattagaagatcacagcatttctttccagtcctgatactctgtgtctccttgatgtagaagttcatgggcagctctacatgtcttcctagagaactgtgattctcataagatgtcctagctagcagcaccttcagtttgcttgtcttactgcctcccgcgtctagaaagaaaactgaatgtctgaatgtagtaccctgctcagacaagcttcctaataaatgtttatttaatgaaaccctccaaggctctgatttatatagtgccttggcagtcaaaagcagtagtagtccaagacccatgtcggagagaaaaagaggaggagtatttataccaggtaagagatggctcaggcaaggagaagaagaagcaggcttgtcttgggaaaccagtggggcagaactggatgagcagggaaacatggaggaggaagaactcagcaggtaagatgttgtggtaaagcaggagtcagactttgagtggagagaaccaagaaataaggctgggtcaagatgaatttggggtcggacatggtggctcacacctgtaatcccagctctttgggaggccatggcaggtgaatcacctgaggtcaggagttcgagaccagcttggccaacatgatgataactctgtctctactaaaaatacaaaaattggacgggcgtggtagtgggtgcctgtaatcccagctactcgggaggccgaggcaggagaatcgtttgaacctgggaggcggaggttgcagtgagtcaagatcgcatcactgcactccagcactccagcctgggtgacagagcaagactctgtctaaaaaaaaaaaaaaaaagatgaatttgaaagtcttgtagacaactggaagcaaagaaaggtttttagcagaggattgacgtgatgtaagctgagtcaaaaagcaaatctggcagcaatgtgcagaacagagtgaaagagaaggtctgagaaggagggtcttggagagtttacaatggggaataaaagccggacaaagctggagacagtgcaaactcaggcaacaggtttgtaacaagcacgtatgaaggcctggacactgttctagaagcggaatacagttctgaaagagagagacacagatccctgtcctttgggaattcaccttctagaaggagaggaaacagagggaagaatttgacttttcatgaattaatgcctcattttactctgtaagaggtgtgaggaaatttacaaacatacatccactcagaataataaaaataagtgattttacctattgtctttgacaacatcctttcattagataaaatggtgagttccctatggctgacattacaaagtcactcagaggtagcttatggcctggcaccaaagcatggctagacaaaggtagttgcaaaaagaacacaagtgactagctcccagtgtgtagctccgtgaaggttgtgacagttggttcagatactaagtaatggcggcaaatgggctggagtctccactgggctcatggagagatggtttgtttggcatcatgcctggtcctttgagaggagggctgtgctgcagtccattccccaccctccacattcatgtcacctgtgttgcccttgaagacactagagcttgggactgccaagagaggattgagggtccaccaggaattctcagtagatttttcacaacagaggcttttgagagcaattaatcttagagagtttgaggtagggtaatttttggcaaagaaggaagccaggaatttgccttcaactgaccactgagatatgctttgatcttgaatagagcagagggtagggttaaggcccattataaaaattaacatataagccagaagattaaaaaaatacagggacgtatcttgagatacagggacacgacattattagggactatgcctagaactttgtgactggatatggttaggctgggatgggaagggatatggtaggaaagtaaagggaaaagggaagtacaaaacaccaatattttgaagctggatgatggggtaatgatgtataagaaggttaggactcggatcacttgaggtcaggagttccagactagcctgaccaacatggtgaaaccctatcctccctactaaaaatacaaaaattaactgggcatggtggtgcatacctataatcctagctacttgggaactgaggcaagagaatcgctggaacctgggaggaagacgttgcagtgagctgaaattgtgtcaccactgcatgccagcctgggcaacagagcaagactctgtctcaataaataaataaataaataaaaataaaaataaaaaagtaaggacagggggagaaggtcaggaggaggttgacagattgggttttagacgtaactatggagtaatggtgaaatatctgcatagtggagttcactaggcagtcagtgcttcagacatggagaagacagaggcaagaagggaatagggggaggtgccttcacagaagtaagagcttaagagaggaaaataatgagttctcaaaaggagaataaagcagagagggcaaacgctttaggctggagagatgctcatgatctctcatgggcatgggggctgacggaggaataagaacagctgtagaggaatagaaacgatgagagaagcctgccacaaccatcactggagaacagatacaagaaggaggaatggccaaatgggtccaacgccacagaatgagatcaagaacaaacatagacagggaagaggtacagatcaggcagtagtaaggtcacgtgtcagctctcagagacaggttttggtgcgatcaggcagaagtcaggagatgaggaaatggatagagaaaaaaatgcatttctccaggagctggggtgtgaaagagggatgggccaggtttgctggagagaataagagggagtgcaagcttggcacccagccctcacatccagggtggctgggtctgtttccctgctgggccagtagcccccacgctaaaaggatttagcagggtctggtcatgctaggcagaagttccacaaggccagggcctgcctcccctccctgtggcaggctagggttagggctatagctgtactaggggatctgggagtccttcgtggcactgtgggaccctgaatgtgttcagacccccaggtcatcaggacacctgggctctgctgtgtccccagaggtttttgccctgactcaggctgaggactttgggtgtaggactcgcgttttcttacgcagaggttggtggggcgttgaatgaagttgttagtaggctccacgtagcacaggcacacaggcctagtgcatcaagtggccagagtccctgcttggtgccaggccaacgtgggatgctgagcaggcagagaccactctgcaaataacaatggtgcgacccaagaaaatgaccctgagagggcagtggagacccaggcatttgagacggcctggcaaatgcatagcacctgagggccatgtgcatgtacatgtgtgtttgggggtgaggggagggtattactggccgaggggacatgtaaacaacctctgtgcaagttctaggaccttcctatattcctgtaccactatttgaaggcttctgtttaacctacccacgtggcccattagaatgttccactgaacaggaaaaccaatgtgcattcaggagagaatctcaaaggacctttccagctgtggcattcagaggtccataaagcttaatcctttaaaaggaatcattctaaatagcccaggagtgaacataaatgaatgaaaagtccatgaatgtggggactaaatcccataatagggagcaaaatggcatgataaagagcatgggctctggagacagaccacctaggccccaattccagctctgtcacatatgagctgggtgccctagggcaagctgcttaactgccccaggcctcagtttctccatctgtaaaatggggataattagacttagctctcaggcttgtcgtgaagatgaatggcttaatatttctaaagtgcttagaccaatatctgacacatagcacatgttttctaggtgttaaaaaatattctttttgatggggttgtttgtttttttcttgtaaatttgagttcattgtagattctggatattagccctttgtcagatgagtaggttgcaaaaattttctcccattttgtaggttgcctgttcactctgatggtagtttattttgctgtgcagaagctctttagtttaattagatcccatttgtcaattttgtcttttgttgccattgcttttggtgttttagacatgaagtccttgcccatgcagatgacgagttagtgggtgcagcacaccagcatggcacatgtatacgtatgtaactaacctgcacaatgtgcacatgtaccctaaaacttaaagtataataataaaaataaaataaactaaaataaaatatattcttaccctgctggatttttaagtgatgctcttgtcggggatctttatgacatacttttgaggaagatgagaaacgaggcttcttaactctgttaaacattttagacacacaaacagtcctcacttttcatggcagtatggggctgtaaaaatgaccatgcaagctaaaaccgtgcaaagcaatcctaaaaatcaagagaaaaattaaaactgttctgtgacctttaaaatttgttgtcaaagcattagaaactcttaccataggttataagtgtgtaggggaacaaacaaacaaaaatagtaaaatattttaggacacagtaatttgaaacattagaaacaatgcaacattttaagtgttttctttctttgtgaaaataaacttactaacaggttttttaaaagtgcttgccttcttctctttgcataacttacgatactgagggaacatcttttctatgccagtgaattgccatagtcctttataaatttgcatcagcttgcaacatcttatctctttgctttcagtgttgtgaaatacctctggaagttcctataatgtgaagttttttgctgggatcacttcctgtgggacatcttcatcctttttgttgcaaccactttcctcatttatgctttgaacaatggtttcaggtttcatcaatataaatcgaaacttcaagggtcccaactgtcagaaagtcacatagaacttactcagaatgatgtcaaattccactctagaaatttaaaacctcaccctgttaaaaatagcttgtcatcaacaaaggaaccagatgataacagacacaaggctgactttttagtttcgacttatatatattaaaaaaaaaacaaccacaaaactgctcaacataagcacaatgtgctttcaggagagaatctcaaaggacctttccagtgcattttcagtgccctgcacccaagcattaatgattatttaaatggtagaataacataaaatgatgaaacaactggataaattcaactatgttgtaaaaattttgtagttgacagaaatcagtctttggactttaagatctcatatagatcagaggagaaatataatgacatactccttaagaatctgatgaaagttatggcctttctccactagaatgtgccgattacaatattttatgcagtgtttcaaggaatacacagagcccccaatatccagttagaagccctggctgtgaatctagaattttattacaggtgaaacccagcacaagtctgattgagagccattgcaagtcacagaaactctaggccctgtctaagtaaaggcaaaccttggagtatgtcatctgccactgaaaatgcatttaatgatgactcactctttcctcactatacaagtttgttcaacctacacctcttcagctacagactacctaccatccctgaaactctgttctgagagtaaagggattacaaaacctggctgaaaagacagattcaatggcatgttgaaaaacacagcagaaccagcacatcagactgtaaattgattgtcttgcacaggatgttagctgctcttcgaatgaggttcctgagtggcacctgagcctattgctggtggcatcctattctgcctgttctctctttcttcctccttccccattcctttcattctcttctcccttattcttcctctgcaattctttttttccacactaccgttggccggtccctagggatactgtttaatctggcccatggtacaagagattttagatcttcattgaagtcactagagatggcctgagtgagtcactttgaattcaatagacaaactgatggaaggctctgagaagacctcaacgatgcccaagaaatgtgttcttactgtagaaacttactattttgatcaaaaaagtcattttggtcaaaaaggggagttgggagattgcctttttgttttgaaattgatttggcttcaagggaagaagattgcctaaacaaaacctgctgatgaagtcacaaaatgactccacctctggaatgagctttattttcttataatttggcaagaaatttggctttcaattgggaatgcacgtcactctacccactcaagggcaagatgataaggttctatcagaccaagcgtctaaaggaacctgagactctaccaaggtcagaaatgctgcaattcaagccaaaagatctttcttgggcttccttgttttgacttgtaaccataaattagtcttgcctaaatgtctgatcacattataaaacagtaagtgaatctgtactgtacagcaccctctgaagcaacaggagctatagatgaaccttttaggggattctgtaatttttctgtccctttgatttccacaggactctaaattgccccctctgaggtcaaggaacacaagatggttttggaaatgctgaacccgatacattataacatcaccagcatcgtgcctgaagccatgcctgctgccaccatgccagtcctgctcctcactggcctttttctcttggtgtggaattatgagggcacatcctcaataccaggtaagtcagtcatttatttctgtatctaaggagattatttacttgggattttggtccatgatggtaaagaaaattttgcaaaaggacaaaaagcaaacctggaaagatctctgaagactatgtctgtgttagcaaatgaggacttgggagaaaattttcagaccaattatctgcacattttaaatgaaagcacttaaaaaatatcttagataaacccttccactctgtgctgtgctttcgtaaagtagacttggcacaagtaccctttaaaacaagctcaagatggggtggagtaaagtaaaattccagggttttctggttaacttttaaaaaatagattgcaattttgctctgaaggtgaaaatgtctctggaacatcttcttcactgcttttcttctccctttcactttgtttccgccatgccccctctttgtcttgtatttatcccttctctttattccactcatcattttctcttattcttgggaatgtggtgatagtggtccccatttttctcccactgtctggatcccattcgacccttatgggagcctggtagtgggagaaaaatggggaccactccagtgctcttggaacatcataccccgggagaatcttcaacaagatctgtggttcaatcaaaagcagagaataatataattattcagataatcccaatagaaaaccccacccttccacccttaaagccgcaatgatcagatatcagattaattcagaatgacttgaaatttcagactgcttctttaggtttcagtgaaaatgcttcattgcagacacatctgttcccaattccataagatatccaatgagactttaagagcatagttacacactggtaagtgtggtgggcctagtctcagtgggatcagaagtgggagcatggggctagcacaaaatgctctgtgtctggattctttttaacattccagataattgcctgtctctctgcctgattcagcctgatattttagattactttaatgcccagtttaaaggaacatttagttaattttgttctctgctccctgacagggtcaactctagagaagggaggctcagagctaagggacaactgtttcatggtctttaacttgaactctgttccccagtgtggcccttcctcactggatttctcctctcccaagggggcttctaggtcagggtcagtgaatggtcggggtggggtgagtaagtggtgggggtggagagcctttttttcctcttcttcccttcataggctcaggtgctaaattccaatttgtctgtgttagcagacaatcaggccaggagagtccagcattgcccacgcagcattgcccatccagtgagccacaggttctcaagcttttaagtctatgtaagaacacccagcaggtaggagcttgttaacatttctgttcctggaccctgctcctgactttttgactcagactcttcaggcctagaaacatgcatttttaaaaagtccccgcagatgcttatgttaatcagcactggtggaatttccttggacccttgaccaaggaggtcagcctgttaggacaagcctgagaaccagcagccctgaagctctggatcagtgggagagtaggcagcacctcactctgtccaccatttctgggccagggccatcatgctgatccactgacagtcagatcaagtagcacagtgattctcagcactgtctgaggtaggagctcagctagtttggggttgctatttttaaaaaaatctcccttcctgattttttatgagcagccaaggttgagagccacaaatatgagcctaactccttcatttgacagaaggggaaactgagacccagggagttgatctgccttgcccagacaaaacactatgacaagcatgagaagccatggagttcaaacttgtcgttttacaagtgaatggttaaagcccagtgaagggaaatggcttgtcatctccccagctggacagaaagtgggaatgtagggggaccaccaggaagtcctaaagcccaggttgatgatcattttgctagacaggtagtttctagtttcacactttccttttgaaaacagaaggtctagttagaatccactagtagcacagactgtgagatcctatggtttctggttgggggagggaagataagaaaattggccttgtttggggtggcttttgctgatcaatactcctgagctcctgccagctccctttaatcagtggctctctaggttcttggttttagaggtttaggggaagcacagagtcaggaaagctcaggaacagtgaaagctggagggacttataatgatttaaagcccttaagtgagttataatttacaaagcagtttcgtgcccattttctctggtgaggttggtgtgtttgtgtctgttttgtagttggcaaaactgagactcaaagagtcacacaactagtaatgatgaaactggggctcatatctaagcttcttctagccgtatttactgctaagtaaacaggctgccctgttttcctgcttaggggcaggaggatgtgtgaaaagattaaagagatgtggtttctgccccgaggggattatataaaagtagtaaagacagtcaaggaaacacacataggtggttgacttagtgccaggtaggggctatgaaagtcctgaggaaagggtcattctgcggagaagggggagtggccgggggaggggggcggggttggaagcttcagttctgaaaaattgctcccagaccactgatctgggtcaggactcacagtcacctggcactggctgctctcccttcccccaggacgtatagccatccccagctctaaacaagggtcctctccctccagatgccatgctctgcccggggtaccacatcccagagcagggaactaggggggagaaaagcatggcaactgacattcctctttttcttaagataatatttcacagaaaactggacagtgcggtgacaaatttgccatcacaatgcagcctgacaaagcggatgttacccttgttccagaagctcctcgtgtgcctttgtaatcactctctctctctcactccagagcaaaacactgtctttgattttgtgacagtcactcccttgctttttttttttatcattttaccacataatttcacatcccagagaatacaggttaattttgccttgttttaaaggttttagcagtcaattcatacattatgtattcttctatcttgcttcttttgctcaatagtatgtttctaagatccatccacatcgtggcatgcaggtgtagttcattttcattgccatagggtattgagttatataaatatctcatggtttaattgccagttccactgttgagggacacttgaggtgtctttagtttggggctattgtgaacagggctgttctgaatgtatatgtgcacacaggtttctctatggtgtacatctgtaaggcgtggaaagcaacagcttgttgattaggacagctggggagaggtcccagctgttggctccaaggaggctgtctctgtacaaaaatgcagcaaagtattcactgcttcttttagggtgtgaaagaggctcccaccatcattgcatgcctagataagcattcccaaatctgagaagcaacgatcagcttaatgtggctacaaccagaatatttccctaatattttgccaaagtttctaccttcctccagcattcttctctccagctggagggtgggtagaaggcctaagatatacacgtaaatgaaaaggtcacactgtgttaacattcttttatttagtaattatttttcacatactctcctctcttgcccctagactctgatggggaccattatacttataacatctccagtccctaattttagtgtctataccagtagtatctataccagtaattgtttgttggatgaattaagctgatatacaattgatcgctagggactcaaaactctggttctcttctggttagaacactcaggttcttaatctaagcacaaggttcaatctccctttttcagtagatatatctctcctgcgtcacagcttacatttgaatggcaggtcccaaatattaagatttttacatggcgggctgggtgtggtggcacaagcctgtaatcccagctactcgggaggctgaggcaaaagaatcgcttgaacccgggaggtggaggctgcagtgagccgagatcatgtccctgcactacagcctgggcaacagagcgagactctgtctcaaaaaaaaggatggcatttaaaacttcatcctttatattagatacacatgcctaattaatttttaaaatttattcaggaaacattcgttgagcatctacaatgtgccaagctataaatatccagtgagatattatattatgcatatattaattgattaaaagttaatatatctaatgacagtttaaggaaatacatattcaatcaaatctgctgtggaaatcttttaaagagcttaatgaaattattttaatacaaagtcagtcatctactgtataatgtagtgttactaaaataatcacaagattaataaccttagaccatattttggttctgtaggtattagcaaagatcttttatttaaagggaaaaaagagctgacagtcttgctcatattaactcagctattacaaagtaaaagactaaacactgtttgctgtgtttgggattaaacatccaattcagatgattcaagcaaaagcttacactatgtatattattacacaacttttgcccgtaaggtgagaatgctgtttcacgtagttaggcatgttttggcttcagaatgatttcactgacagaatggaattaaaggagaaagatttagaaaaactgctacttgtcaactcctgaaaacattctaaaactttttaatctaacgttttaccaacaccagtaaaatcaagctaccaaggttgttctctgatataagcagcaccaaattccccagttgttccctggacgcatgttctttacaattctgccatcctctgcataagcaagattgtaagcagccactactctcggctaaaaccagatcatgggactcaaactccaatctagaggttcaaagacccattgcctgactccccatctcttagctttattttgcctaatgagatttagcttaagagccttttcttaaacggagtcttttttgagggtaacaaaagaaatagatgttcttggattggacattctccttgtagatcttgtttctttcagttgaaagatttcctacaaaactacagaccagttttaacccacccattgtgtcaaccggggcactcaaaccaaaagtttccagaaaaaactaggcgccaaacagatctgccagattgtcactcatcagtgtttccatgtttgctaccaaatgcaccaattgacttgtattagaaactcactgataccagttaacctgggaagaaattagcacacacaccccagttcattcagactgaaatgattgagaccaaataaaactagtgtggtatggatactgaactcctttttactcatggagaagtgaagagcctcatgttaagcgtgaggcttttgttttgttttgttttgtttcaaatcactttattcgtgattcacagatatacatcacatgtaaagaacacttagctataaaagaacaaaaacaggagtaacacaaaacagttgcaatttttggtgtaactaagatgttgcttatgctctgacacctgtcctaggtcctggctactgcatgggaattggacccctcatctcccacggcagattcctgtggatggggatcggcagtgcctgcaactactacaaccgggtatatggagaattcatgcgagtctggatctctggagaggaaacactcattatcagcaagtgagtctgttcataatcgaagacatactttttaaatcgaggctggagttttttccacttaagacaactttattttgaatcttgatgtctttgtttctaacgctatatttttaccactgaaatgaagtgagcaatccccagaaatctaacattgcaaacagaataattgggttttgcttgaattgaagccagcagtacataaataactaactctggaaagttgggaaattatttacaatctctgtgagcagtgaatgtggaaacttagaagccagataatttgattttgacaaaacatactttagggagaggtgttatcttttctgctttcccaagttttttggtcttaaccacaaataaacattaaaaagaaccaagccaaacaaacaaagaaaaaacccacagaaaacaaaaataaaacccgagacatcactgcactatagtctgggtgacagagtaagaccctgtcttttaaaaaataaaacaaacctgaggcagaggtatctgattagcaatttgctaatttattctcctgccaagcaactgagcacctctaaaagagcagatggtaagccgaccttggctgaatccgattaaagtaaagaaaaaggaaaataaaagaacaagacagtagaaaaagaagtaattcacatgctgctttcccatttatgactttatgcgagtatcccggtggagtgatcttacataaatcaggaacaatattacccatttaaaaaaatagtgtcctccctctctgcattattatattttgtggataactagcagattgaattagctctatggttaactaaataggaattgactataaggaactagtttggtgaaatacttgttttcttgtttattgatcttagaaaatggagaatttcaaagatggcgtatttccctagactttcagccagctttagtagacttttagcaaagctatctgcaaacattgtctcattaacgcatgtttatattcgtaatccctgatagcgctttacccacaaactaaagctgaccagggtgttttaccaatttgttagaattattcattcagatacaaagactatagctcaaaagtaagtgaagcttttctaaactacataattttttcaggtcaagattacatacatcatctcataaaataccacggtatcctcaaagcccaaatatttgaagcagatattgaaagaagggagcaggggagaaattggtattattttaatacttctaaatatttcaaactatccaaaaagaatttttttgacctgggatttttgtttgtttgtttcattcagttttgtgttgtagcacttttaagagtagctgaggcagacctcacacaactaaacagaaatggcttcaggtggaaacatcatttcattgggttcattgtgaagtactctaatgcagtagttttcaaagtgtggtccttcaacaagcagcatcaacaagcctgggaacttgttagcaatgcacgttcttgggccccaccctgacctactaaatgagacagtctggggtaggacccgcgatccgtgttttaacaaagcctgcaggtgattctgctgcacacttgagtttgagaaccactgctctaagaactagatcataattacttttttattttaattctcctggtctattaggctctagtcagccaaatttaagtgactatgatacgttcttgatacgttctcattttaaaaatcagtacttgagtcacttttacaactggctatggtctcacaaatatcctggaagcactggtgtttgggtttgggggtagggacatttgccgctgctctttcatttccccgcacagccacctgcctttcagctctccccagcccagggtctgccttccccatcacctctttccctcagcagacaggtgaagtgacccccaggatatttatctagaaggatatctacctgctgcccaggatctagcacagtgccgtgcctctcaccctagctgtaccttagagtcacccagggagcttttcaaagccccactgcccaggccacacccccacttttagatcagaacctctgggggtaggactcaggcatcagtggtgtttaatactcccctgggagtttgagaacattccatctagagagagggtggaggaggaagctcatggggcaggagggcctctccccggggttacaggaagcagcgatgcaggactggttttgtcttatgctaaggtggtggaggtttaagactagaactggagtaaagaatgatagacttgagaaaggaccacagtaccaggacagaaatcattctgagatactagatatttcgatgctagattcttaaatctccagaaaaagtccgtgaatttccaaagacaattcctgaagtgcttgctcgttacagtgggggtggcatctgaccactccgctagtcttaattaggaaactgactccaacaaccccgaccgactcaggcgctggtgcacgctgagacgcagccacaacccacccacactaccatcagctctcccagttctttccttttcctgtcctctcaggcttttcacttgttggagtctttgtgttctctttaattgcctcagagcagttcaattttgttgttaaaggctgagctccccgcgggaataggacatgtttgtccccatctcctttccttgcctgctcttcaagtcccttccagcactccccgtacctcttgaaaagaccccattggacctcagaaagatttttatttttatttgaatagtttgccagattttttttttcttttgaaaagtttgaggtctgtagtcattacaactgtgtagaaattatggtccaacttttccaaccagcttcgtcccaaagtagtaggggctgcagaacttcaggggagaagtcaggcatgtgcgctgctgagatgccgcgtgtgccactgggggcgtggaggcacggtccatctggtgagctgtagatgatgtgtgcaccgttccccaggcagctacccaggcagctgtactctaaattaatgaaggtctgtaggtgctgcgtatgacactatatgtccattatatgtccctagattagtttttgtcatgaatacaaaaaaaatttatgtatcactcataaagggaaattagcaattagcatgctaatttgggttatatttgcatatctgttagcaattaacatactaattagggttatatttttacatctgtcttaataatgtgcaaatttacacatcatttacaggggcttccttcatttattctgtgaatatacatttactgagaatttattatatactaagcactgaatgattctaagttgtaatagtcattattggctcttcatccattaaatatttcttgaaaacttactatgtatagcagcaggtattgttctaaactctgggaatacagcagtggacaaaccagccaaaattcctttacctcatggagcaatatgtcgtcactaggtcaacaataaacaagtaaaatatatagtgtatcagtagagtgaccaattgtttcagtttgcctgggaccagggcctttcccaggatgtgggactttcagtgctgaaactggcatagtcccgggcaaaccaggatagttggtcacacttatcaggcagataggtgttacatagaaaaagaatagggaaggaggatgggggaggaccagttgtagagacgcaggtgtgattgtaaacaggtggttcaggcagccctcactgagaagacagcatttaaataaagacctaaaggaaatgagcaagtagcccatgcagagacctggcgggaaagcattctagacagaaggaacagcaagtgccaatattctaaggcaagaacctgagtggaagaatacaggagatgagagaagcaatagggtaccaaatcacgtcaggccttgcaggccattgtaacaattccggcttttaccccctgcaagaaaggaagccactgaagaatttgagagaggactgacacatatgactcatttatgtttcagcagaatcattctggctgctctgttgagaataggtgcaagaggacaagggatggggacagacagaccagttaggcaagaggtgatggtggctggtccaggtggtagcagtagagatgataagagatgagggaaaattctggacatattttgaaggcaaagccaacagacttgctgacagattggatgtagggtgtgagagaaaaaaaaagagtcaaagtgctgtccagttttgcattgaatggggacatcgtgtcctgagataggtggagcaagtttgggaaggggagagattagggttccattccagacatgttagatttgacatgcccagttgacatctgagtgggatgattgagtagagagaactgaaccttgagaccctctagtgtaaataggtcagaaactagcaacagagactgagaagagcagctagaccgagaagagaaaaccaggaaagtgtaatgtctgaaaaccaggtgaaaaatccatatcagggagtagaaaattgtgaaccatgtcaaataccactgatggggcaagggaatgcatggagatttcagtactgcatttagcaacagggaggtcacaggtgaccttgacaagagcagtttcaatggactagtgggggcaaaagtctgaccagagaagagaatcgggggagaagaatcagaggcagcaagtgtagacaagtcttccaaggagtttgccataaagaaggcaggaaatgggccagtagatgagtgagatgtgtgggcaaaggaattttgatttttaaaataggagaaattacagcatgtgagttgtagggggactggtcagttatggaggaaaatcaaatgattgttgatggaagagaaagagtgtgctaggtgagatgtgaagaggtccctggggacaagtggatgggttggccttgaatagggacatggaatttccatagtaataggagggaaggtggaatatatgggcacaggtccgggtcgttggggattgtggagattctcttgtagttgcttccactttcttgggaaaattggaaataaagtcttcagctggggctgagtagggagaatataatagtcatctagaagagtgagagagtgaatgggctggggacatgcagtagcattgccagcgacactaagggcccacttgaatttaaccgagacctgacagcaggcacgtgtgcgctaacgtacacacatgcgcacacatgtgtgcgcatgtgtggtttttctttttttcccagcccacttcaactgccaggtgcaagcacagaataagctaagagttggatttagctagagtgtggtcttatcagacaaccatgacaaagtaagaagagggtcaagggagttgaggattcagggaagggtattttaattttaatgattgacagtaattttttcccaactttctgttaagaaaattgtcaaatgagtaggaaaattgaaagagccgtccccctgccacacttttccccctgtgacattgacattttgaagagaccaggtcagctataacatatcccacattctgaatttctctcactgtttcatcagggtgtcatttactatattcatctattctctgtatttcttataaactgaaaattgggtctaaaggctcaattagattaaggttgcacatttttgcaataacacttcagtagtactaggaacttcatatcacatcacatcagaagatgagtaacaggttgtcccactagcactgatgttaaatttgatcactggttaggtggttacagtgagattcctctgttataaagattgtttatctcttgtagtcacctagaatttaagctgggtaagtgaggatattagagaagtgaaggacagtgaaaaggtgataggattgatggaacagatctacatgaggcaagtgtttttaaatgtttgttaccagccgggtgcagtggctcacacctgtaatgccagcactttgggaggtgaaagtgggtgtattacttgaagtcaagagtttgagaccagcctggccaacatggtgaaaccctgtctctactaaaaatgcacaaaaaattagccgggtgtggtggcgggtgcctgtaatcccagctactcagggggctgtggcacgagaattgcttgaacctgggaggtggagtttgcaattagctgagattgcgccactgcactccagcctgggcgatagagtgagactctgtctcaaaaaaaaaaaaaaaaaaagaaggcaccaattagtccattaattgcctcctcatcactgttgaatctgcccacaagtgtgtgaattgtttaatcccagaactcaggtggctttcttctcatcacctaagagcttactccctgactacttttcattttgaacagacaataggtttgccatctttggagatgtcttttatcttcaatcatgcttaatgagggataataaccctagtgatcagacacccaacgctgtgcactgtccctgctgaggctggggactcagctggactctcctcagtgctaagaaatcctcactctcccaaataatcagtataacacttgcctctggcagtattgcaggctggcccacaagccagagccaggcctgtcttgactgccaggaggagctctgggctggggtccttagttcatcactgaccttctcttcacttttctgatttactctggttagataaatccagcctacttttagtaagtgaccttgttttaaattgctcatctgtggccagtcacacatcccttgctttatcacatcggcctgattagctttgtccctaacaagcctgagctttggattcaaaatagctgagaagttggtgccccctaaaggacacaagaattttaaaggttggctctttattactaataactagcaaatatttcgttgggtttgttttatgtttggagtttcttactctctttttaaaactgattagcaagttcttaaatgaaatggacaggccaatatgattaatgcagtatgcaaaagccccagggtcagagcagaaaaatagtgtttgtcctttaagtgcttaaaatttttaaatattagtttgtgaataaagaatatataaattacttaatttctgctttaattatagaatgatggaggggaaggtaagtaaagctagagttttcaaatattttaattagtaagaatttcattccttcctatagcataatttttctatatatgacaaaatttgaaacgtcagacaaattccccagaatacaaatggaagcatctggatttttatttatttatttatttatttttgctagggagaggcaaacatgtccaaaacttaggattatttgatgaatattatctggaatcagatcaagagaatatttaatagtgtttttatttgaaaataggtggtttttcctgaaataaatattaataagttatttatacaataactctgcttttttttttttttttgagataggatcttgctctgtcacctaggttggagtgcaatggcttgatcatggctcactgcagcctcaacctccagggctcgagctatcctactgcctcagcccaccaagtagttgggactacaggcacacactaccacaccttatatattatatattattatacaataataatcctgttctaatttcttgacactaccattatttcaggggcttacttttaaagcttaaataggactatggaacacatcgcagatgtgagagctggattaatacttagcccacaacctaatacattgaaccagagcagcgcttttttggtctagagtcctctgggaatgtatttcaacaggcattaactgaacaacctcattaaggcaaaagtatccttttaggagccaagtgtcaactaggagatggaggagcaagtctctccaacctgagaaccaattgcagatattatagtaaccacttgcaatctttgagggttatttgttctgaaaacctccatagtgggagaatttgcagctgtgaaacaaaatttcaggagaccagaggagagggaggaccaaagttgcaattaatacatgaaattttgtataaatattaagttcaccaagaaagtaacaacaacatctaaaatcaagataataccaatgacatctaatgcatcttgaatttgcataattgagcatcatgcaaattgccctgtctcatgactcatcacatcctgtgtcgtgggagaactctgtgaccctggagactttgatgagtcatgatggaaggcagagccccaaaatagcttcctttactaccacagtgaactttgcatgccagtccagccaggcgctggccaagctcagggctagaagaagtgcccaaggagatatttttcaagccctgactgatactccactggagggggcaggcctgattagagactggagttgggtggtactaggcaaaactgctggttccaaaataggaaaacaagactttagtaattccacaaacttctgattctgtggctcactcttgtagtgggtggcactttgtggagtgaggctggatgatacctgggaggctggaggttcttctggctctggtggtatggagggttcagcttcttagcagccttgcagctctgactccagtagtgggtagtattttggtgaggttagagaagaaagagaagtaaggaatggtatatgggtgtgtgtgtgtgttttctatctttggtgatgttgaaacagggagtcagtaggtagaaatgattcaactggagaaggatgtcctcatgctaacagaagtgcttattcaacccgaatactagaaatcatgcacattgcatttggagcaacatgcatttgctaagagagctacctcctagtcaaaatgtaccaccaggagttctcctgacccttaaaaattgacaccaaagtttcctgtcttttcaggtcctcaagtatgttccacataatgaagcacaatcattacagctctcgattcggcagcaaacttgggctgcagtgcatcggtatgcatgagaaaggcatcatatttaacaacaatccagagctctggaaaacaactcgacccttctttatgaaaggtaagcaggtacttagttagctacaatcttttttgtctatgaatgtgccttttttgaaatcatatttttaaaatattttatttatttatttatttatttatttattgagacaggctctgactctatcacccaggcaggagtgaccttggctcacgaccttggctcactgtaacctccgcctcccaggctcaggcgattctcccacctcagcctcgcgagtagctgggactacagatgtgcaccaccatgcctggctaatttttgtattttttgtagcgatggggtttcgccatatttgagaccaggctgggctcaaactcacggagtcaaacgattgacctgcctcggcctcccaaagtgctgggattacaggcatgagctatcattcctagtctgaaatcatattttgaattctactgcaataaaggaggaagagctaacattcattatgcctttactctgttgtagccattgttctaaacacttgaatggcagccccatgtggtaaatgttgttatctcctacaattcacagaaaatgaggttaagtaacttgcccaaggtccaaacattagtaaatgatagcccggaatatagccctgaagcctatatttcttaatcaccacaaattcttttcttcttattgatgtgcaaagcaattttataggcaaaagaagagatgtagctatatatttagagtaatttcagttaagaatttagcatgtcacccatatgtttgatttaaacacggccaaacaatgtgtttgctgagtgcttgactgacagcccagatgatttagcaggaagcaatttgtgaatgaaattagataattttagaactgagagggaccatatctgtcatctagcctctgattttaacagttgaggaaataaagttccaacgaagttatgattttcacccaggcaaaatagggagtaatgaatgagctgagacccagttgcaagcttccttatccagtggttttcccccttaacctcatcatgctggaaatgaaactgttggggaatacacacgactaacccttgacattactatcaagcataaagaaagataatcataccctggaaaccttgtcagtggtggaatctggggctagatgattttaggtctggccctgtctattcacagccttccctccagcagcccgtgctgtgaacctaggtagccgccttccatgtgcctgctgagatggggggagctatgccagtacctctgcccactgggtgttgagcccagccttcagagctgccctccctcaccaggactcagcacaactcttgctgtagaccccagtgtatcactttcctattgctgctgtaacaaattgccacaaactaagtggcttaaaagaacacatttatctcacagttctgtaggtcagaagtctgacatggatctcaatgagctgaaaaccaaggcataggcaaggctatgtgcctttctgggggctctaggagagactctctttctttgtcttttccagctctagaggccagccacattccttggcttgtggccctttcttccaacttcaaagccatcaacagtgggttgagtcctttgcacattacatctctctgacccaccttctgtcatcccatctctctctggctttgacctcggcttggaaaggttctttgcttttttttttttttttttttttttttctgagacagagtcttgctctgtcacccaggctggagtgcagtggccccatcttggctcactgcaagctccacctcccaggttcacaccattctcctgtctcagcctcctgagtagctgggactacaggtgcccaccaccacgcccagctaattttttgtattttcagtagagacggggtttcaccgtgttagccaggatggtctcgatctcctgacctcatgatttgcccacctcagcctcccaaagtgctgggatcacagacgtcagcctataatctttgcctttaagaactcatgattaggtttggcccaccccatctcaaggtccttaaccttagtcatatctgctaagtcccccttttcatgtaaagtaacatgttagtaggttctggggattatgacccagacaaatttaggatgctattattctgcctatcactcatgttgggggagataaatctccttataccttataaaactatggaatgaattaatggaaaacgtataggacttagtattacaggttgtgggtttgcgtcccagcactgccacttgctacctatctgaccttaggcaagtcacttcgcctttctgagcttcagttcccctatccacaaaaggtgataaatgttatgaaacttgcactctagggctgttgtgaagaacaaatgaaataatgctataagatcccgtagaaatgtacatttgactttttcatttggctcaggtgtattaggaatatgtgaactagtatttagtagtagttaactttcacataccaatatcctctaccctgacatgcaagagctaattaaaagaatctctaagttcatccatttgtttaacaccccaccgttctcatctttgaactaggtaccaagatacaatgacaaacaagatgtggttcctgccctccaggaacttataatgggggagagaggtttgaattaggaaggggcagcccagcacatcaccaaatactaccctaggtgatggtaatgctggcggtgtgcccagagtgatgccaagtacagatgaacaggccatctaaagcacattgaggggcaggggagacttttcagaggaatggatgcttataatgagttttaaatgaaggtagaagctaattaagaaaacaaaagacaaatattctaggagtaaagaataggataaccaaaggcacagacaaatagatagacatgatgcatccagggccctgtcggtaagtccttgtgcctggtgcagatacattcagggacgtggccaaggggagggcagggccagatcaccaaagacctctcagttaaggcaaggaattgagcttatctcaaaaactatggagaatcactaaagattttaagcagaataacataaacatatttgtattttataaaaatccctctggtagcagagagaatgactaattggaaggaagcaggattgtgagcagtgagaacatttaggagctactgcagtgatgcaggaagggtggaggggaggctgtggtttcaagaaatgtcaaaagggtagaccctacagtagtagagcctatagtacttggaaattaagcaaaacatctttgtgatttttttttagacagccttctataggcaagatcagggtttctacaaaaagtgctacataactggacccaaattcataatctcaggaaatagggggataattgcttattggaaagttcactgtggtgtctgacatttctataatcaatgagggtcctaagcatttttcagtgaatctccttttggagttagactccctgttggttttcctgatatagtggaaagtttggcacaagttttagtatctaaatcagtaacattaatgaaagtattgacttactgggtgagtctgtagagaaatagttaagtgcaacttaggcaatgacccatcttgggaggtagggaagggtggtggcgaggggtgaagaaatagcatgtgtttcccaaaactgccgagaaatgtgtccatattgatggtatttgctgattgttgcccaattttcttttcactagatagagtcaatactttttagcatattttaaaaattaaatcatatctacatcataccactgcctataagccatgttattacatttttgcccataaatttggcatgtggcttcaagctctttaaacacagaggcaaatcatgcatcggcctgggagaaaaccacaagtgacattctaagccaacccttccacacaaagggttgagtcatttgtcctgcttgctgaagtggcagtcacccagagaacaacatcctggcctttcatatctgccaagtccttcctatggtcagaaagcctgctccttcctcaaccttccttccaagatgtatggaaatctcaaaagtctaggaccagtcctcaggcctcctttcttatttgcaaagtatacctttaggcatggggattccgcagcttaacccagtgtgtgtgtgtgtgtgtgtgtgtgtgtgtgtgtgtgtgtgtgagagagagagagagagagagagcaagagagagagagagaggatagtcttcttctggagttacgtctacaaagtttcccaatatttttcatctcatttcaaagactctgatgttaacagcaaacctgaataataaaagacttaaaaagagattactcctaaaagatgcttaaagaaacgtaacacaaagagagaaaggggcactttaagggttaaaccctcctgtgtaggccacctaccatcaggacccaccagccactgctcagatatgaacagggcaagagtaagatcaaagccagtttactctattttcattcattcattcattcattcattcctctattgaaaaaatatgtatgaaggcccccatggaccatcagcttgaagtgcaatgctaatgagtggctgtcactgtccttaaagagctctcagttcagtgagggaagactggtaagcaagcaaggaattgcttagctgtcatgccattggctgagtaaaataaacctggaagtagtttgaagagaaatcaaaattaagagaagggcactttgggggatttttacaactagccttttacacttaaacaggaagcaccttagatcaaataggatccaatttgaccagttttccaataatatcctgccacctgttgaaacgcaaaataaatatgaccctaggcaaatccaaatcatctttggagggaaatgtatgcaataaatatgaaaaaatcactgatttgtgatttatgaccacaagtactaaatgtttcatttgcaatctcataaatggctggctagagcatgaaaaaaagtttaatttttaatagtttgtttaaaataatatttgtccctatctccttccgttcattcattcttaaccataggatagtacatgcttatgtaaaattaggagaccacagaaaagcatacgaaaatattatgaaaacttccacccaattattaaattaaaaattgtggacaattaagctccaacataaaaagccaaaatggcatgattgtgtgtgtgccctggagttcgtgatggctgattctctgatgtgtactctgcagctctgtcaggccccggccttgttcgtatggtcacagtctgtgctgaatccctcaaaacacatctggacaggttggaggaggtgaccaatgaatcgggctatgtggacgtgttgacccttctgcgtcgtgtcatgctggacacctctaacacgctcttcttgaggatccctttggacggtactgaaattttcactctcacatcttgaccatctgtcctttactgaacaaggagctaggagggataacagaccaaaggaatcacatgccattttctacattgctcttgtttaaacatttctaagtactcctcgtttttttccctagtgtttctgctttgttcacttataaaatataaatttccataaagtaggggccagcatctactagccttttgtatctttcctcattactctaggaaatagaattctacccacagttgaaacttaacaaatgtgattagttcgtttggttattaacatatcctaccaccaatcaactttatatatttaaccatttccagttgttcttttgggcatgatatatacatacatatatacatacatacccacacatatatacacacactcctccctcaaagctactaaacatgaaaacattgtgcctatatgataaaaatgtcaatattgctggtgatactgatgctgatggaaatgacgatattagctgccattaacgtagtatctaatgtgtgccaaacaatattaaaaattgctgtatatacatgtttgccatttattatttataaccttaacaagatgtctcactcataagactactttccgcactatgatacagaaatgaatattaaaacatgtgcatgctcatgtcaaactcatagaacttgattttattttggcaggattaaaccaatttgcaacttgagtacaaatgccaatatttcagctagttcttgaaaagttgtgccattgtgcaaaagtcattgaattatttgataactttttaacctaatgaccaaacacctgacaggaatggaattcactggacttgtatctaattgttttacactgttttctatgggttacattttttattgccattgtgacctttatccacacactaacctggaaagtataggaataaaagaattggcattctttctgatacaccctttttgttttcttcttaaagtcatttatattatgtattactcttaaagaatgttttagtctccattttagtagtctgtgcataaggtagtaatacatgtacacaaagaaaaattcacaagcccattcaggtgtcttttagaacattatttaccactaaatatttatacagttgacataatgcttattatgcccttgaataatagaatttgttttgtttttacttcttatccataagcattggccttacattgcctcaagaggaacagaatttattattaaacaggattcttaaatccataactcatattgtgacttcatacattttgtaaccctagtagtgaatataccctaaaaacctataaatccccccaaatcactctactgatgaaaaaaaaaaaacatgtgcatgcaactctaccaccaccaaaaaacaaacattaatcatttgagtagtttggtggttaccagaggatgggaagggtagtggggagagaagagatgaagagaagttgattaatgggtacaaaaatacaggcagatagaagaaacaagacctagtgttcaaaaaatcagtgtagtgaagaaaataaataataatctatgtacaaccaagtagctagtagagaaaatttgaatgttctcagcataaagaaaagataaatgtttaaggtgatgaatatcctcattaccctgatttggttattacacattatacaaatttatcaaaatattacagttacccctaaatatgtatatccattatgtatcaatagaaaattaatcatttggattaattccattctactgttggcattaagtatgtacaactcaatgtgacttttcctgaattaacttacaccagtgttcattgattcatacattcattcatcaaacatttattgattgcttattttatgccaggcactgttctaggttctggggacataacagtaagcaagacagataaaattcttgccttcaaggggcttacattccagtgagtgatgtggacaggaaaagacatagatatctaataaaatattaggcaataataagtgccttgaaggcaaaatgaagcagggcaagaggacaggaagtgaaggagggcaacagtgtgtgtgggcacagatgtcatggagagggtggttagaaaaggcctctgcagagaagacatttgaccatagctcgaatttagtgaggccacaagccacaggcagatatgagggaagaacactccaggcggaggaacaatgcgtacttttaacacttgccccaaccagctgaactggaacacatgctacctggtatactacacttgggcacatagacaagctataagccctccctattgccgcatctcccctactccagctactccatacaagagctggagacacttcatctgatggccatttggatgggagcccacaatcacttgaagaagttttagtcacactttctcacctgatctcttttcaggcagggatgccactcccagggtgcctgttctacagacatcacttctaaagtgaaacaggcgtgtattttaaaagtctagatttccaggtccccctctagccttgcctcattaggaaggatcatataaaaggatttgtaaatctctccattcatttttggatgcagactatgatgctggcaaacctgtgcaacccacagagttacataatcccttttcacagggatccttgttaaactctcaatttgcctaagggacccagtgcaagaaaagagaaaaggacatggtcctgaggtcagacagaagcagctccagcctcagggcctgcctgtcagccacactggctgtatggttttgggcaagcttccgaatttctatgaattgcaatttcttccactgcaaaaggatgacaccacaacgcccatggcaagaatatgaagatgaaattaaaaatctctttcacaaagtgcctagcatggtgactggtatttagcagttggaaatatatgtctgttctctcttttgtatattatctggtataatttgaaaaaataagggtttatttcctctagtattcaatttaattaaagagcatttattaagagctgattgtatgtgaggcttaggacaaggcattaaagaacacaagatgaattctacactctggactgaatataaataactatgaaagctatgtgatgagtgttatgggggaaaaatgaataaagcaccatgagaacatgattagaagctattaagtgtataatccagataaactgtccacttcatggctctgcttacccagcaccaaatgaagttaaaatgtggttgttagccacctaacaggctctgctttttacactcccaggtaccagagtgaaggccataacagccataattactagttccatttgtacagagaaacaggagctagttgaaagctcagcccaaggagaatatgtgaaattctaggctgaaaacttgaaaacacaaacttgaaaactggcaactcactggttaagtaggccaatttggatggcaaggagaacaaatcagtgcttgatttgtctagtggtattcacgtggctaaaactcctactgaagatggaatcttgctgagcttagaacccccagactgttaggagaatctgcagggaatgttttctgctcagagcaaccttcttaggctcacattttgctcaactgctctttcttgtgtatgtgtgtttttttttcctacagaaagtgctatcgtggttaaaatccaaggttattttgatgcatggcaagctctcctcatcaaaccagacatcttctttaagatttcttggctatacaaaaagtatgagaagtctgtgtaagtaatacaactttggaagatttatgagtacaattggattggtttttttcccttgtgtctttgctgtttttcttggcctctcaggtaacttttctgctctctagagcccacaagggagctgttgattaagttgctgatgaaacactttttacagcaatttggctgcatttggccagaccagagagtaaatgaagcctttggctgggcagcttctcggcaagggggctgagtgtgtggtctgggagcttcagcttggtaactaggacactagtgtattttgagttgaagagaagggtcgactgatcctgtcattaatatctgtcaaaattatctttgcacaactaaaaaactggaactacagaatcaatttatagttgtgttgtttttgaatgaatttaacataattcaacttgtaagaactgacaatagtctcaatagaattttttcttaatgagtacaattaacttcaataaaatgtgtgtgggtttttgaaattatgtatcttgtgttttgggggtcctgaaattgtcattaaatgactttgttttggtcttagaatcatccagcagaaaactggacaaatgcccagtggcctacaggctaatcaatgggcttgtagagtacaggtagccagtcactaaacactgctacctctaaccaccagtggaaagcctgtggaatctagaaacaggaactcctgttttgtgtcctgtttctaatggccttgggaagttatttaaaataagatataacctatcttctagagtaggggcataggttaatgagatcatataagtaaggcaattagcatagagcatggcacatagagggtactaaatatgttagtttctccctttcctgtgttcatatcttcctcagatgttcctaaccatctcaagttctccatctctaaatgtccccaagcttgtctgaagacctgactttattctacctgtggattttgaaattcgataatattagtttctagagaagaagccgacttgatgttgttttgtttattctctcatggttgataagtactaggtgaatgttttagacacttggttctttatacatttcatttccaccagagcttattgtgacttgaaaactaatagataaaagattcatctcttccctgtgatcagagttgttggcagtagtggtggtctggagagttcattacatagttctcagtcattagtttagccttggtcttggccattggacccacagaaatttattgtatgagtctgtataacggattctcttaggtttctgcagttccctcaaggagctctctatgaatttagaggctggggcattccaacacctcccagaccatttggggctagtgcccagatgggaatgctatgagcattctcagcctactaggaagagggcaccacagcccagctgagtgaatatctgttctttgtatataagagatgcttagcaaacatttgatgaatgtgtggatcagtagggtatttaagtgtataggtgaacatgtcaattagaatttggaagatggatttattgtacatttaacgtaatacagaacattgttccctgagataagggaacaatacacttacaaagaacacatacacttaaggacagagataagaaaaattgaatttagattaaggtgactttatttttcatccagtctgatcccttcactttaaaaggatgtagggcccagagacttaaagtatcttacatagaaagagaacaacctgaactaggacctgaccccaccccgtccaagtgttctttcaaccacactgccaaaatgcctatacatatttatgcagctggtaattcattcaacacatattagtgtttacaatgtggcagaaactaacaaggcatgagaataaatatcaagaatgatacctagtcactggagtttactgtttagaacaggaatctcaaactcaactgtcttcaggactaggcaaataaaagcagactatgggggccaggtgcaatggctcatgcctgcaatcccagcactttgggaggccgaggtgggtggatcacctgaggtcaggagtttgagaccaacctgaccaacatggtgaaactctgtctttactaaaaatacaaaaaattagctgggcgtggtggcaggtgcctgtaatcccaactactcgggaggctgaggcaggagaatggcttgaacccaggaggcagaggctgcagtgggctgagatcatgccactgcactccagcctgggtgacagattgagactttgtctcagttaaaagaaaaaaagaaaaagcaggctatgggaatgtaagacaagggaatggaggttcctgtggcaaactgaagagcacctgacagcactcacaggtttttttgtttttgtttttttaatttaaacattgtgcctgccaaatcagaaattggaaaacattgttagatttagccttttgatatcaatttttaacccttaactagaagtcacaggcttgatttcgctaccagtatccagaaatcttagctaactctggcaccttaacatgaagtgtagggtctatgtaatttaagggtatttatgaagaaataaaatagtaattcacttactcataagcaccaatgttttcaattaaagcagatcattttacctaaatacatggcaaataaatctgtttcgctagatgtctaaactgagtaaaaatagacaatattttgactttttttccagcaaggatttgaaagatgccatagaagttctgatagcagaaaaaagacgcaggatttccacagaagagaaactggaagaatgtatggactttgccactgagttgattttagcagaggtactgacctgaactaactgtaattcccatgccacatatgttatgactgtgtagaggtgtgtaaagatccccttttgtaactgttgcatatttctgcttttaaatactttctctagcagttctgtaatcccaatccaaatagcccacacattagatatttcagtaaggcttttaagattggaacattctagtaagactgactgctaagattgtgactcttctgtgtaacagtataaaatatgaaaacaagttgggggaggccaaagacactacatatacatagacagtcggcctaatcgttcatctttcagctaaagattgtcatgtaaaatgtccacagtcaatcacagagacatgtggtttctatgatttcattttgttgaggttgttgatccttgagtgtcacctcccctcattttttgaaactttgattcacttttccaaatttttcccatcttccaattgttcagaaacgtggtgacctgacaagagagaatgtgaaccagtgcatattggaaatgctgatcgcagctcctgacaccatgtctgtctctttgttcttcatgctatttctcattgcaaagcaccctaatgttgaagaggcaataataaaggaaatccagactgttattggtaagaatttatcaaataaataatacatcttaaaaacaatttcttctgaatgtccatttcttatgtcctaagaatctgatatcaaacatgaaattttttataatttgctccaaacaataaagcaagacattctgtcacatttgattacaccagatagacggaaaagatagctctttctgtgttcttaatcataaaaatgatgcatgctcattgggaggaatttaaatcacagaatgatgtgtaaagcagtaagtgacatcccccaatcctttccgctctcctctccagcctcatctcccctctccagtggcaaccattgttaatagtttgctgtgtatttgctaaaatctttttctatttgcccacaaacacatatttatggttggatttgtccattttacaaaaacatgggatcatatacaatgttctgcctaccttgtcagttacaaaagacttttgtggactctcccagggaaattatcgtcccagggaagtgatagtctatcatttatagcactgtttctgggcttcaagcagccccttcacaaatgaacttccagtttgtggcagaaggaagaggagaggatgacagcaaagacagggtagtgatacatttccctctccactccaatccagtgatgctagccccttcctctcccctgccctctgcaggggagcttccaggtccacactcaggtcttctccaactctaccgcctcactactctgtctctgcttcaatttcatcctgctccactcttctacagaaacaaggccatctttgaaagaaatcaaacttgctttctgggagaaagcagaattcctcatttgacacttccttcacataagtaatcttttaggaacacatttcttacagatgtgaagagagatcacagaatgtggacttccctctcttgactttacacagaccctgcaaaacaagttatttggttgtagaagggcatcatctttttcaaaccattggagtgctccttgaaatagttaaacgtaagggaaaatttcatcgaagggttaaatatgggagagaagggatctgcagatgcctcacacaggtgggaagtttccaggcaaggtagatagcaaggatacagaataacatctggaatccaaattccagcatgttttcttgagtgcctcctagcaggttctcaggttctgtgccaggtgcagggctacagccttgaacaagccaacaccacccctgcactcacggggctcatggtctggtgggaaaaagaaaacaagctcaatacagtaaagagagaccgaaggagggcattcagagaaaccataagcctttaatacatattgaataccatttatttgagaggtgaaatgtacgtgtacatgttaatgttcccctgacacttcaaaaggcctctgcaaagatggaaaagcagcagagccatttgcaagcgtccatgctccctcctgtgtgccacacacagactcgctaactacttcctagtgagcacctttggtcaccttctccatcatcttcttttctacctcccaaccccagctatacaggccccattagacccttgagtgtgccaagggcagtatgtaagaggaagggccatgagaagactctgaccaaactagacctttcctcagtggcttcgttgtatatgagacagggctgcctcaggaccctgggctatttttcatcctgcaaaagtggcatctctgaagctttaccatgtctgggaataatctaagtctctttgaccagtgtcaggctaatctgagacagtgagggtgtccatctatccccagctcacccagggctgatctgaggcacctattttgtcgtggtggggagaacatccttgtcactctactgcaggtctttcttgatgagatgcagagggactatcagtgacatgtatgggcagatgactgcacaggtaaccagaagagaaaatttcattgaaatagatcaaatctgccatctcactttgactctgcagcagcctgtgcatcatctctgggatggttgtggtgccagtttgctcgtaagtgaagagaggaaatgaatgtcccctacaatttagagtagggaacaaaaactcaaagatttcagaaagcaggcacatgagatgaatgtttgaagcagattgggtgtggtctagatggaactgtatgatgtatgccccctctaaacaggtaattggccactcagcgtcagcccattattgctatgtgggaatgtaagttcagcatcaccaaattttctggacattcagacttttctataaactccaccagtttttaaggtaattggcttcatatctgaatttttataaaacactctgtggcccaagcataacatatttggccctggttgctggtgtgcattagaattagagccacaatttttttcaaccaagagcaaacggttctgtggaaaaaaatagaagctttaataccaatcacagatggaaactaacattaccttctttgttccttttatctgtttccacaggtgagagagacataaagattgatgatatacaaaaattaaaagtgatggaaaacttcatttatgagagcatgcggtaccagcctgtcgtggacttggtcatgcgcaaagccttagaagatgatgtaatcgatggctacccagtgaaaaaggggacaaacattatcctgaatattggaaggatgcacagactcgagtttttccccaaacccaatgaatttactcttgaaaattttgcaaagaatgtaagagcccttccttaaaactgagtgtgccactcttgaaaatgtcaactgttaaatcctctctggttctttgtgtttgcaccataaatacttcatttttcttactcattccctctgccacctcaccaggagcacacacgtcccctagcttggagcagggctcccgtattcatcctcaagccttcaaggatgttgggtctccagctctaagaagtatctacatggtggccacaaaataggtcaaaatgtgaaaaagctgggcccttcatttggctaaaatgaagtgatttttgtttaacccaaccaacctacttttccatttaaactttgtcatcatgtcatcacattcagctatagcaccatctgagcaaaggaaagtccactactgcttcagatgaaaatcaaatgagaccaaaagatttggtttttgcaaagtgcctttggctcatcaaatggccccatgagcagtaggtcccattctaaataggacttaataattagaagagagacagtttttctttttttataattgatgtgtactacagattccaccttcattatgtcaaattttaggcaatatgtttttcaatctgaattacgtacgcagttccctaagtgcccttttttcaatttgcatatggtgtagaaacatgatgctaaataattcagtactctaattcattttgtttctacacgggcaatccagataatgctatgtaaatcagtcaactgatcaacaaaaatttattgaacatctactatatgccaggcactaagtccaaatgtggacaagacagctgtggtcctcattaattttctgcataactacaaatagttagatgcttggcactgaataggccaggaatctacatccttgcttgcctttatctcttatatggtgtcacacaaaaataatctttgccttagtgacttataaaacaatagtaaatctgtggctattccacagagctacctgattatactaacacttgctgtaataagatttggtttgcattgctttaccccagcacatgaaaggcaaaactggggactctctgaggttgggtcagaacacagggggtgaatgaaataggacatagaaagggcttgagttccagttgttcatctgaggggatggagggcattgtagctgataaccccaaaacagtgttctgactgacccatgttttcagaatgaatcaaacagagactgagtgactctagcctttaatattctggctaactgtctgatcattttcataggttccttataggtactttcagccatttggctttgggccccgtggctgtgcaggaaagtacatcgccatggtgatgatgaaagccatcctcgttacacttctgagacgattccacgtgaagacattgcaaggacagtgtgttgagagcatacagaagatacacgacttgtccttgcacccagatgagactaaaaacatgctggaaatgatctttaccccaagaaactcagacaggtgtctggaacactagagaaggctggtcagtacccactctggagcatttctcatcagtagttcacatacaaatcatccatccttgccaatagtgtcatcctcacagtgaacactcagtggcccatggcattttataggcatacctcctatgggttgtcaccaagctaggtgctatttgtcatctgctcctgttcacaccagagaaccaggctacaagagaaaaagcagaggccaagagtttgagggagaaatagtcggtgaagaaaccgtatccataaagacccgattccaccaaatgtgctttgagaaggataggccttcattaacaaaatgtatgtctggttccccagtagagctctactgcctcaacccaaggggatttttatgtctggggcagaaacactcaagttgattagaaagaccaggccaatgtcagggtacctggggccaaacccacctgctagtgtgaattaaagtactttaattttgttttctgtggaggtggaaaagcaacattcatagtctttggagaaatgcttagaaattcagcatttgacccttgctgtgaattaagcccaattaattcctgtttgtctacatatgatctgtctgtggcaaaagtttaatcagaggaaattctttcccagtctgtcgatttatgcctcagccacttgcctgtgctacaattcattgtgttacctgtagattcaggtaatacaaactatatataatcatcaagtaatacaaactaatttagtaatagcctgggttaagtattattagggccctgtgtctgctgtagaaaaaaaaattcacatgatgcacttcaaattcaaataaaaatccttttggcatgttcccatttttgcttagctcaattagtgtggctaaccaagagataactgtaaatgtgacattgatttgctcttactacagcttcagtgattgggggaggaaaagtcccaacccaatgggctcaaacttctaaggggtactcctctcatccccttatccttctccctcgacattttctccctctttcttcccatgaccccaaagccaagggcaacagatcagtaaagaacgtggtcagagtagaacccctgaagtattttttaatcctacctcaaaatttaacagttacctgagagatttaacattatctagttcattgaatcattgtatgtggtcatggataaattgcacaccttggaattcgctttctaaaggaaatcaaatgaatggaggaactttccaaacaccactttacttgtgttatatagccaatataactatctctactgaatgtcattgaaaaactaaaaaattaaacttatttacaaataggtaaatatttgtcattgaatccattgccatcccatttgactgttcttttcatcctactgtctagtaataagctgagtataagatgacagtgtaatctccctgaaagcaggagctactttctttcttttgtaatctatttccatccccatttccctgtcctgtctccctgtattcactcccaagctcagttctgaatagacattcctgctcagagatactcccaactgatgcagaaaccaaataaagaggtaggtattccaagaattcaagaatggacattagtaaagaataaaacatttatttgagcttggaattatttggatcatctatatggcctaaaaatatatggactatgcctgtgtacctgaatacgtatgtagtcaggtcaagacaatcatccaaataacttagacccctaaaagcaaggccaggatttgcaatttaatgtgtcccaattaattcacttgaaaattagtaacactctgtttacgttgcctctggctggagctgcatggtggaagaagcccaactttggatccatgtacttcacccatccaatactcttgggacatttatgtgtattttatctgtatatatgaagccaatgtctatgtctacacagtcaaagtgaaatgcatgtttgatatagctgtacatagatatctattttgcaggtacaaaaatatcctgggggaaaactgggagtggaagggtggggggtgggagtgagggacatgggggagggacaggaagaggagaagtgttggtttgaacgatccaagcaaactctcccagaatcaaattacctgggtagttgttcaacttttcactctgcttagcctgtatagacaaaccccatatatttgtagaggcttggccttggaattctggaataccattggcttttcagtaggctgatgaacacattttgaaaattctattatcttcagaattttgccccattgttaagtgcttaaccgtcactcttgaatgtgcaatgtgctgtggattccattttcatcagttctgaaagaactgcaatgtgtaaattatcagtgaaatgcatgcatataagggctctatcattatcaaattgtaaggacaattgtacccttctatatctttgggcatgctagacacccccatgccttcattgagatcccattttccccctctcaagtggaaaataatcacatccagcaagctctctcattattgagaaataccatttggaaattgccactttttattcctaagcagcacctttcactgttcatgatgctaatgttccacaaaagcatgtgccattggcccactgaaggatagagggacccttttcaatctatatcagctgggctctgggactgaatctctcacctattcttgcagaaagacatactaattaaaccttgtcaaagta

SEQ ID NO: 371 - DNA, 26848 bp, Homo sapiens
  source 1..26848: mol_type = genomic DNA; note = NC_000019.10:c52139938-52113091 ZNF616 [organism=Homo sapiens] [GeneID=90317] [chromosome=19]
actcccggaagcagattgcgccagggaaaggccttatcgctgtgtgtgtgtttcagtctacgtggattaaacattacttcgctccgtctgcctggattaaacgtgcactttgcagtcctcacttctccgtaccagtgatctggggatcgctacggaccttaaaatacccatagccccttcgcccctgcaacaggcacttctccccacgtaagtccgagaattgcttccctgtcggtttaaaatctctctcaggctgttccttgccccctgcctttctgccatgtagataaccatgtcgataaccccattcaggtcgtgttcctgcttaaaactctcattgacccctgcttcggccccgggcgaagtcaagtcctccctcgcgaggtggattcccaccagtcgagacccccgagcttcgcccttgtcgacgcctggaggggagcgcccgctgcccagctcctgaaggagccgcttcttctcccaggtcctgggattctgcagaccctccctgtcctgagacaccgtcccccgcgccacctagtgtcctccgcgcgccacctagtgtcctcctcacgccgggtccttcccctccccaggctgccccttcacagccactgcttttcctgactccgcgttgcaggaggtcacccgagtctgtcttgtgacacccactgtcgttccttcccaaatttttactccactggaaaatgtgctcttccgggaggtgggcatcgtattcctcccctttcctcctgaatgtgtgggtgagagggatcaggagaggaaaagagggggagcgacgggacagaaagaaaaactggggagaaaagaatgagtacacggcaaaatggatgataatttaggtactggcaaagagagcaagagtgcaagaggacgcatggagaaagtagcacggggagaaaagcacataaagaaattagggaaaagggagagcttcagggagctgaagggcagcaaaatagagaggggcggcaaaggaggaggcactgcagtcagacgcggggggcggaaaaggtaagagtcggagccgcggctgacagagccacgtggtgctgggactgaaggagaggggagtgggtaacaaaggagagtagagggagaaccacagcaaggaggaagcctaggaagttgggggtgctagagagtgggaacaaaggagatgtaacagggaaaagggaatttaacagggaagagggattttaacagggagagcagacagggagctcagatgggggaaaagaggcaggaatacgtggcggctggggacaatgggaaagtttggggagaaagagcaacaagaggtgaaataaatttcgaagcattgggcagaatagacataaaagagggaataaagaaaggggagaaaaacagcaaagggaaaaaagacgtgcagaatgagagcgggaaacacatagtagtgaagagagtgggcgaggaccccacccagatgagctgtgagttgattggatatggatggtggttttaatgtattgatttgtgactttatactctaatttaaaatttgtttctttaaattgtactcatgaggatgaaaattaccactcttttctacaaggcttgtgcattttgtatttgtttatatcaaaagatatttggaatccctatttagccacagggcagtgacttgattcagtcattttgtaactcttctttccagggagggagtagaggatggaggaggagagaaataggcaagaaatgactgactgtcactacaagatgtatctttggttttttgtttgttttttctctttttgagacagggtctctgtcgcccaggctggagtgcggtaaaattatatcggctcactgcagcctctcagctgcactccatcctcctcagcccctgaaggtgctgggattacatgtgtgaaccacctctacaggcctacaatgtatgtctttgaaggagagttgagagtgttggttttttgttttgttaatggatttacttttttccttgtagttgctttacagttaattcattgttattttggaagcttgatttaaattttagtttattcagtttcttctataattactaacttctgaaataagatttgatgtcatcctgtaatcagctgatgtcattaatttctcaatattgcctttttttaacttttaccccataatttattagatttttcaaaaactttccaaactgttaaagcgtccagtgcggtaaactcaccacgaagtacattagattcctcagaacttcttcattttataactgagaatttgtaccctttgaccaacatttctccactttccccacccagcatcctgtggtaacaactgttccgccttattactatgaattggacttttttagattctacttgtgagaacatacagtagttgtctttgtgtgtcagtcttatatcgcccagcataatgtcctccagattcatccatgttgttggaaatagcaggattttatttatttttatttttattttttatttttgagacagagtctcgctcgctctgtcgcccaggctagagtgcagtggtgtgatctcggctcactgcaagctccgcctcccgggttcacaccattctcctgcctcagcctcttgagtagctgggactataggcacccgccaccacgcccggctaattttttgtattttttttttagtacagacggggtttcactgtgttagccaggatggtctcaatctcctgacctcatgatccacccgcctcggcctcccaaagtgctgggattacaggcgtgagccactgtgcccggcaggattttcttttttatggttgaataatattccattatataaatatacacacacacactctgtatatatatatatatatatatacacatacataaatatatatacacacacattttctttacatattcattcctggatgggcactttggttgtttctatatcttggccgttgtgaataatactgcagtgatcatgagggggcagaagttcctaagttttttgttttttgtttttttaagtagagacatggtcccgctgttttgtccaagctggtctctaactcctggtctcaagcgatcttcccatctcagcttctcagagtgctgggattataggcatgaactaccacacctggcctagatgtctcttaaacatactgattggattgcctttggatttatacccagaaatgagattgctggattgcattgttgttctattttgaatattttgaagaacatccatagtgtttttcataatggctgtactgatgtgcactcccagcagcagtgtacaagggctcatttttctccatatcattgctaacacctctcttgcctatttgataatagccttcctaagaggtatgaggtgacagcttatggtggttttgatttgtatatccctgatgattagcgatcttgagtaccttttcatatacctgttggtcatttgtatgtttttttttgagacagagtctcactcttgttgcccaggctggagtgcaatggcgtgatctcagctcactgcgacctcatcctccgaagcacctgagattacaggcacctgccactatgcctggctaatttttgtattttagtagagacgggggtttcaccatgttggtcaggctggtcttgaactcctgaccacaggtgatctgcccgcctcggcttcccaaagtgctaggattacaagcgtgagccaccgtgcctggcatttgtatgtcttatttgcaaaatgttcaggtcctttgccccctgtcccccccccgctttttttttttttgagacaaagtcttactctgctgcctagactggagtgcaggggcgccatctcggctcactacaacatctgcctcctgggttctagcgagtctcatgcctcagcctcacaagtagctgagattacaggcatgtcccaccatgcccagctaattttttgtgtttttagtagagatggggtttcactgtgttggccaggctgatcttgaactcctggcctcaagagatctgcctgcctcggcctctcaacatgctaggattacaggcatgagccactgtgcccggcccaacatcaaagaactttaaaaggcattcccttcctgacttaaggaacaacttctcattgtccaggccttcttgttgtacagccaacaaaatactgcaaatctccaaaatattcttcaggatgtttattgaggaaaattttattgaaaggagccacacaatccaaagctgtattgttcaagggtcagctgaattgaggagcaagtcctaagctgagcccacggggagagtgggcagctggagtggtggtgcattggtcctgagggcatggaacccagagctgcagcacagcaggcactctccatagtgacttctgtggggtccatcactttgggggctacatttgttattttggagtattttgggcggcaagttaagatggttatagatgcattttggactatctaaatgtcaatatggagagtttccttggaagatgttgggtctcactggggtatgtgcatcattggagacatctgttttagtagatggtggtgccagtgttcaagggtggggtcattatgaatggaatcgagtgtcttgggtcattgagtcctcaggtatctttgtgtgtattaggtcagcaggagtttatgagttgttggggcatgtgggatttcgtagcacgatatggggagcactatggagtatctgggaagggtgtggaccccaaggaagtttgtaaacctgtctcagtttaggaggggaacgttagggcctcaaactctagtgacaaaaggctttcgttagggagggttttctgtggtgggtctatggcaggatggtggcttagggaagatttttcaaagaatcagagaatatgatatcacaacgacctgcagcacaaagatttcaactgggactgtcctcggaagatacagctgttactttctcgctgccaggacagtggtgattactttccccccacctctgtctgctgcaacaatcacagggagctacgaggcaaaatgctttaaactcagtgtggaacagggatattttctccaggcaagagggtccactaggtgctggggaggcagtttggggagaggatgggtaatgctctttggagaatgacaggcctagtaattgcagggtgtaaaggaaaaaacaaattttttcctttctactctcacacttaacacagaactcttctgtggccagtgttggggagttttctcctacacactaaaaaattctccagcagacaacagctagattgccttagaattcaatttaattctggcactgtctacctggagttagagtcatctcccacaggttgcccacaggtaaagggctcagtctcacaagacctccccggctcacttcagctaccatttcgaaagtagtaggttgtcacctatacttctgacctactgactccaaattggcattcctactaccccagccaaaggtttgattaatttgctaggatggctcaccgaacttagagaaacacatttaccagtttcttattgttgaaggacaaaatcacaacaaattcgatccttttgtagttaataaatgtgatgattgggttttcacactcatgtgagatgtgcttccctcaaaccttgttacgatgtcgtgataaggagggaaattattacaaattcattttttaactcctgttcttgttttcttttttggaattttcttttttcctaaacgtgacttatttcaagggtcagtttgctaatgtggcgtttagcatgagagacttcattctggcttggtctggtagtgcgggaggctcgtacaaaacaacggcctttccataaaaatgaacaaaataatgcgcttggccaggacatgggtggagctggaggcgattatccttggcaaactaacacagggacagaaaaccaaatactgcgtattctcactcataagtgggaggtaaatgatgagaaaacatggatacgtagagggcaacaacacacactggggcctacctcagggtggagggtgggaggagggagaggatcaggaaaaataactaatagacattaggcttaatacccgggtgatggggccagacgtggtggctcacacctgtaatcctagcactttgagaggccgaggcgggcggatcacctgaggtctggagttcgcaaccagcctgaccaatacagtgaaaccccggctcttctaaaaatacaaaatgagccaggtgtggtggcacatgcctgtagtcccagcaggaggctgaggcaggagaattgcttgaacccgggaggcggaggttgcagtgagccgagatcgtgccattgcactccagcctaggcgacagagcgagactctgtctcacacacacacacaaaaacccaggtgatgaaataatgtatacaacaaacccccatgacccgtttacctgtgaaccaggctgcacctcctgcacgtgtacccctgaacttaaaatataagttaaaaagagaaaaaaaattggcctattataaagtgtaacaactgcaacgtctatttttacctctagggaattattttaaacattgtttactgatggtggtattgcccattaaatgcatgcacacacacagaccctaaagcttatcgtttccttccactctgccctaattgaaacaaaacatactactaactacatttctgcccgtatgagtacccctcttctgtgctgaaatcttatttatactctccgtcttcacttcttgcctcccattccctcttgaatgcatccagtcaaacttgcatatccaccattccactgataactttatttttcagagtcaccagtgacctccccatttctaaatccaatgtatttcttttcctgctttagtctttcttttcctgtcaggagctttctgtttaattttcttgtcacctccctgaccattttcctctgctgctgtgtccggacttcgaatgtttctcaatgtgggaaagactcatggcttagtccttgaacctcttcttatctctgtccacacctactgtctttcctcatcatctcatctcatggctttaaaccccactgtattagtccattctggaattgctacaacaaaattccagagaccgagtaatttataaagaaaacaggtttaattggctcacagttctgcaggctgcacaggaagcatggcaacatctgcttctggggagcctgtaggaagattccaaacatggtagcaggcgaagtaggaacaggcgtctcacgtggcgggagcaggagcaagagagagtgaggggggaggcgctacacacttctaaacaaccagatgtcgtgagaactcactgtgataaagaacagcaccaaggggtggtgcgaaaccattcatcacaaatccacccccatgatccatccacctcccaccaggccccaccagtaacggtggggattacaattcagtgtgagatttgggccagggacacagagctgatccatatcacccacctactcacctacacgtctccatgtcccctgcaggcctgtcccctgaactctagaattctgtgtcctgttgtctcctctgttgtctgttcagccgtctaagagacgtctccacctttatgtgtctaaagtgacttcctaaactccctaagtacattcccctgcgctcctgcacatctcagatgacggtggccctatacttcctggctctagctttacatgtcaggatatatttgaaatagagaagatatgacattatatagaagggttttaattcaaatgataaagaaaagttacatttacctaaaatggtagggaaatgcatagtttctaaaagtgctgtgagctgtgggagaaaaatgtttgaagacctcgtccctacctgatctgctgcctcgggacctctctgacctcatttcctacctgtgtcctcctcactccctctgctccagccacacaggcctctttcctattcctggagccgagggtgtctacctgggctgtccctgtgcctagaactctctggcccctcagttgcaggtaatctggcaagatttcccccatcccgagctgcaaaggtgccctctcccaccagcatcacatgagacttcccactcatttaaacaaaacttactactatgttgtttttacattttgaggatctggggaaaatggcaacccaaagaaaagtaactttgaaacaaccaacatgcttttagtttcctgattttgctccattcagcccctttcagcttatgaagccaacctcctccccttagctcacagaacactcctttcattttaagaatgaggtgttgtctgattctaggattgcaaataaaagccaataaaggcaggtccatattttctgctctgtgtgtttctttctggccctttgccttccactttctacagactggtgacagcaaggccccaaggggaggtcagagctgggagactggggctgtggtagtcttgccccctttgagactactcaaccctcgcttcacactagagtgccaaggcatttgtaacacatggttcattcccccttatagagattctccttccagtagttagggtggggcccagcctccgtaatgttttaggtacccaagttgattttttttttttttttttttttttttggtgacagagtctctgtcgcccaggctggagtgcagtggcttgatcttggctcactgcaacctccgcctcccaggttcaagtgattctcctgcctcagcctcccaagtaactgggatttaaggggtgtgccaccatgcctggctaatttttgtgtttttggtagagagggtgtttcaccatgttggccaggctggtctcgaattcctgacctcaggtatccacccgcctcgacctcccaaagtgctgggattacaggcatgagccaccgctcccagccccaagttgattctcatttgtatccagcattgagcttccagcctctgtgtcccccatttccgagggcagagctcagcctgtgacccacagaggtgacggggggctgtgcgctgcatggggtttgatcagggataggtccgtgccctgaatgggagctcagtccagcctagctacacactgctgcagcctgtgtgtgggcttctcccagaggggagctaatgctgaagaaaacggtgaaagattcacttggtctttgtgtaggaatttattattcttgcatcccccctggtgcagtgggctgtctctccacaggctgagttcttccctgtgtgcatggttgtgacacagaaaggaatgtgttgtttccaagcattaaacaacagattttttaactttcaggtttgatgtgtgaataattacattgactgagaaagaaacccagaagaggaagaagaggaaggaaaaggagtcagtgatggctactcaggtagagtgatactttactcaagtgaagtgatattcttggtgggtcattctgtctccttcctttgtgaagtacagggcgtcggagttgcaaatcttctctgagtctgaagtgtccttcctgacacatttgctcatgctcatccatgcttttcctcagttcctctcatcttatttagattccatctcaccatgatccagtgacatgaacttgggaagaggctgcactgggcatggtcctgggaagggctcacacccagacatggatggagatggggtgagggtcccgtggtatcagagctgttgggcagcagggattgtttaggggccacatctggatgcactgtcagctttctgtagaccaggaatagagaagctgcatgtggaagtcacatattaatgtgcataaatacctagtaaattatcgaaaggggccaggcgccgtgtctcatgcctgtaatctcagcactttaggaggctgaggtgggcggatcacttgagctcaggagtttgagccaacatggtgaaacctcgtctttactgaaaatacaaaaattagccagtcatggtggcaggggcctgtaatcccagctactcaggaggctgaggcgggagaatagcttgaacccggaggtggaggttgcagtgagccaagatggtgccactgcaccccagcctgggtgacagagcaagacttcatcctcaaaaaaaaaaaaaatatggaaaaggaggcgtgtaaggggagatctttctgcctgattttatactacatttgaagctgtatgaatgagtcactatttctaactgccttaatgacagggaattgaatggaaaactagatacagacattagagcgtgttttattccatcattgatttaaaaatatgaaatcaacctgaatgtcagattctagccatggtcagaatatccatctcacagagactgcggtgttcctgcggggactcttaccagcagttgttttaagttttaaggttataattttgctcagatgtaagagctgaacatttgttatcagagaagatggagccaaattctctcactgcaccaattattattaaatattatatttattttaaacatcacatgatgtatatatttgtttttttggtaaaatttcaagcagagatgcagtttaggcattaagaagttaatacaacacgaggatgataggaaataattttgttttgttttttgctttttgttttgtacggagtctcgctcttgtcacccaggccggactacaatggcgtgatctcgactcactgcaacctctgtctcccgggttcaaccgattttctcttgcctcagcctcccaatagctgggattacaggcgtgcaccaccacgcctggctcatttttgtatttttagtggagatggtggggggtttcatcatgttggccaggctggtctcgaactcctgatctcagatgatccgcctgcctcagcctcccaaagtgctgggattacagtgtgaaccaccacacccagcctgtaaataatgttttattatatatgaaattcatgctaaatgagattttagctgttctggccaaaacagagggaaaaaaaaaaaaagtaactgtgagatgatgggtgtgttaatttgttaaactctaatgacttttttttttactatccataccataataccatgttgtataccttaaatatacacaatgtaatttatcagcaaacaaaaatgggcatcaaggaaacattttagcttttttttttttttttgagacggagtttcgtcttgttgcccaggctggagtgcaatggcgcaatcttggctcactgcagcctccgcctcccaggttcaagcgattcttctgcctaagcctcttgagtagctgggaccacaggcatgcaccaccgtgcctggctaattttgtatttttagtagagacagagtttctctatgttggtcaggctggtctcaaacttccggcctcaggtgatccacccgctttggcctcccaaaatgctgggattacaggcatgagccaccgtgcccagctttagttttacacagaaagaaatttataacctaagaaaaggacatcaaggcatatatattttaaaaatttaactacagaatatgaaatggctcctagaatgcagtaaaggaaaactgagcaaagaatgaaaattattttggtttgatttccacaaaataatgaaacctcctcacagtccaaggaattggaaaatggaaatacgaagggttttcattttccccatagcctcaaaatgtaaacagaacatagtagtaagttttttttttttttttttattgggtgggaaatccacccaatatgtgtcgttggtgtatgaggacaccattgcaccttagggtagtgggaaatcttgccagatccaggaaaataggaaatgcaccatcctaaagaggcaatcactctttcagttacccaacctggaggaacccgggtttcttttccctgtcactttctccatcatccctcatgtttccgtggggagctacagttgtaagttctgtggcaagagtcagtgagaggtgtcaagatgcatttacgtgtcattatgagattttagaaaacaattcttcagtacatgttctgttgtgaaatttcattgtgccagtttttcaaagatacatctttttttgttaataagcagtaatagcttgttttgcatcctctttggaacaatctctaaatgaagacatatggatcttttataatttttcaccatggctgccacaatgctctcttcaccacaggtgtttgagggttccttcaggttggacagtttaaagagtggttgcttctgttaggacgctataccacaaaagcaaaaataaataactgatctttctttggaaggcctggctcgctgtgtgattataaaatactgtgtttttttaagatctaatattttgttgcttacattttatttgcttgaatctttaatttgaatttttctgtatatcttgttgtagattatatttgattataaagttttagattataaataacataataggttcacaagtagattggcaaacccctccattttctttccaaaattattatggttctccttttacacaacacagccacatattatttaaattccacatattggccgggtgtggtggctcacacctgtaatccaggcactttgggaggccaaggtgggtggatcacctgaggtcaggagttcaagaccagcctggccaacatggtgaaaccctgtctctactgaaaatacaaatattagccggacatgatggtgcacgtctttaatcttagctacctgggaggccgaggcaggagaatcccttgaacttgggaggtggaggttgcagtgagctgagatcgtgccactgcactcctgcctgggtgacagtgagactctgtcttctaaaaaaaaaaaaaattcccacatattttgtttgtgttttcatggctctgaattttttcagttgcaggcctttatgtcaccatgtcttccaaaaagaatcgagtttgtcagtctttgataatatctttattatgtctttcattaaagcttgtttgcttatgtaaagttcagtaatgttagatatattcacattatttgttggactcccagaatgcatatgttcttggtgcttgatggtttttcatgggcccattagactctcttcattttctttattttatttaattatttattatttattttttgagatggagtctcgctctgtcgcccaggctggagtgcagtggcatgatctcgactcactgcaacctctgcctcctgggttcgggcaattgtcctgcctcagtctccctgagtagctgggactacaggcacgtgccaccacacctggctaatttttgtatttttagtagagacggggtttcaccgtgttggccaggctggtcttaaactcctgacctcaggtgatctgcctaccttcgcattttctttatttttggagacagagtcacactctattgccgaggctggagtgcaggggtgggatctcagctcactgcaacctctgcctcctgttcaagcaattctcatgcctcagcctcagattacaggcatgtgccaccatgcctggctaatttttgtatttttagtagagatggggtttcataatgttggccaggctggtctcgaattcctgctctgaagtgatcttcctgcctggcgttctgaaagtcctgggattacagttgtgagcaatcatgcccggcccacatttctttttaattcttcaaagccaagatgtaaattgccatttctttcatgtaggtttgtacagattcagttggtttctttttgtagaccgtatttccctgtttctttgtatgttttattgtcttcttttgtgacttcagcatttgaaaaaatcagctgcctgcccagatttggtggctgctttgttcagggaggacattccaatcaactaccctagattctggagacttcccatgctttttctctgggcctttgcttgtcatctccctattgaagaggtttgctgctttctactcagaagctcccctattttctgtactattgtggatagactctggtactgcagatatctgtggtactagatcttcaccctcatgtctttctgtgttattgcagacaccggtttacgtcagttatctttttgctcagtggcccctaacctttcatcctgttcctttcagtgctaccacaggaggtcaccactaaggcaattctcagcctagccatggaggcagggacaccttagagagtgcttattagggcaaggtcaaggggagccctggaagcaggaccacgcctgagaccccagaactgtagagtcaccagtatgtgatcccagctcgggaaaccacagcctgtgagaagttccatgtgggtgatcccaacaaaactaatggggcagggatccccaggacactggggacctaactcctactccaggatgtctagaaggtgggacatagagtcaaagaagattattgtcaagccttaagatttaatatgtgtgccctatttgagtttcagacttaacatgggagtggctacctcttctttcctgtttctgcattttggagttgaaatatttagcctgtgtctacgccaccgttggatgttggaagcacttaagtcgtttgatttcacacgttcacagctggagagcagtttgcctcaggatgaaacacatttttgagtctcacccatatctgatttagattatagttagatgcagctgtagactatagacttttgaattggtagtagaaaaagttaagactttggggggccattgggatggaatgcattttatatgtgaggagtacatgaattttggtggggcaagatggaatgctgtggtctgagtgtttttctctcctccacaattcatttgaaacttaatctccaatgcccaatctccaagtattatgaggtttgggttttagtaggtgattggatcctgaggggtctgcccttatcaatgggatatggtgttctggtcagtgagatatcaaaacgcttatcctacggagttcactgctttttggcccttctgttccttctgccacgtggggacacagcattcctcccctccagaaaatgcaacaagacaccatcttggaagcagggatcatccctcagcagacatcagtccttctggcaccttgatcttggatttcccagcctgcagaattatgagaaatatatttttattgttcataaattacccagtctgtcttatttggttatagcagcacagacagactaggatattctgtaaccataatgtaactgtttgattgttttgattcaactctaattctcagacatctgggttcagatgcttgctctgccattttcaggttgttgacctaggcaagtttgttagcgtgtctgtgacacagtaacatggaacaagtctctctctcataggctatcatgttgttatttgaattagaacatgtaaagcatttggaataatgcccagcacgtggggagtgttccaaaacttcagtcattgctgttgctctggtcatcacagtttttagtttctgacctttaaagccgctgtagacattgtcatctctgaaaacaccactcatatactagctcacctagacacagttgatgtatggagcataatatctaacactttttaagggataaccatgtgtttttcttatttgtgtatttcttgtattgtccacaaaaatagaactatacactgatgtagagaatataatagtctcctattgtattttataacaaactaaaattagggaccaataactttctcacagatgccatatagatatgtcaaaacacacacttcaaagtgatgtgatagttctctcctcattttgtgtaaacagaagagctctcatattgcttctttttgaaatgtgtttttcatttcaggggcatttgacattcaaggatgtagccatagaattctctcaggaggagtggaaatgcctggagcctgtgcagaaagctttgtacaaggatgtgatgttggagaactataggaacctggtcttcctaggtgagtataatttccttctagaagttcagattcgcccttgtgcatttttgtatttcctctgttgtctttcttgggaacccctccgttatttgagactgaagccttattggttcaaaaataaaaagcttcacaatgctgcatctggcctttcactgtcacctttgtatatatattctgctgccttctttgtacatcagtggtggttccagagctgaagttcgcagagaactttatggcagagttaaaatatccaattccctgttttctgtccatgtgcttttttgtttgtttaaaacaggttcttgctctgttgcccaggctggagtgcagtggtgtgatcacagctcactgcaatctctgtctcctgggctcaagcaatcctccaccctcagcctcccaagtagctggaattatgcgtgcgtgccaccatgcccgtgtagagacagggttttactatgtcactcaggctgctcttgaactcatgggctcaaggaattctctggtcttggcaccccagagtgctgatattataggcttgagccagtacgcttggcctatccctgaccctgtgatccacccgcctcagcctcccaaagtgctgggattacaggtgtgagccaccacgcccggccaaagcttatattttttaagtccacataatttgttttaagtgaccgctactttaatctggtgcattttcatgtattgtaaatgaactttgtttttatttatttaataatcagttccatatttttgaggatactcagttttctttgttttatgtttctttttgaggtagtgttgtattggggaatgtatatcattttatatattttacaagatttctttctttagtacagatggtatagctcaggagcagtttctctaaaacttacacaaactcaatagtgttgtaataagacagtttcagttatttcttttactcccatttctcctgacttaattcctactattaaatttgttaatgagaccgggcacggtggctcacgcctataatcccagcactttgggaggccgaggcgggtggatcacgaggtcaggagatcgagaccatcctggctaacacggtgaaaacccgtctctactaaaaatacaaaaaattagcagggtgtggcggtgggcgcctgtagtcccagctactcaggaggcagaggcaggagaatggcatgaacccgggaggcggagcttgcagtgagcagagattgcgccactgcactccagcctggtgacagagcgagactccatctcaaaaaaaaaaaaaaaattgttaatggaattgattacagttcttctcattggaaattttttaataccttgaatatatttttttaatatagttactatcttcattgtagaaataccatgaaagagattggtcatactttgtttttgtttgtttgttttgttctgttttttgagacggattttcattcttgttgcccaggctggagaataatggcgcgatctcacctcactgcaacctccgtctcccaggttcaagcgattctcctgcctcagcctcctgagtagctgggattacaggcatgtgccaccacacctggctaattttgtatttttagtagagatggggtttctccatattggtcaggctgatcttgaactcccgacctcaggtgatctgccagtctcggcctcccaaagtgctgggattacagacgtgagccactgcgcccggcctggtcatacttgttatatcagacacattgcttttctgtagtaagtttcagtttcctaaatataacttgctggattttctttaaatcacacttttttttttttttggaacaagtgctatattataataattattctcctgtctgctttcaagtccatcatgttatactgaattattattttcaaatcttactttattatacatgtagcccatttcttgcacttcaaggacttctcaactgatgtttataaaacctatatattttttcccgtcatgcttagggaatgaggaataaattttttttaaaaaattatattttatccagaagtgtttttcctaagttttcttctaggatttttgtagcctgaggtcttacatttaagtctatatccatcttgaattaatttttgtatatgatgagagataggggtccagtttcattcttctatatatggctagccagtttttccagcaccctttattgaatagaatgtcttatctcaattgtttttgttgactttgtcaaagatcagttggttgtaggtatgtggctgtgtttctgggtttcctattccattccattggagatctgtggctgtatttctgggttccctattctgttctattggagatcttctattttaacagaagcatttatatctaacagttttctatcttagcactgttttctgtgcatacataagttttggcatgttctattttcattttcctttgttttgagatattttatcatttcccttgagatttccaatttgacatattggctgtttaggaatatgttgtttccacatattttttgatattctaattttttttctgctgttgatctctagttttattttattatgaagggataagttacactttatgatttcagtctttaaaatgtgttaaacgaggtcaggagtttgagaccagcctggccaacatggcgaaaccgcgtcgctactaaaaatacaaaaattagctgggcgtggtggcgtgcgcctgtagtcccagctactcgggaggctgagtcaggagaatcgcttgaacctgggaggcggaggttgcagtgaaccaagatcacgccactgccttccagcttgggtaacagagcgagactcagcctcaacaaaaaagaagtgttaaaaagttttacttttaaatatttcttttgaagaatgttctgtgtgaagttctgaaaaaattctttcgtgctgtttttgggagatgcgttgtgcatatgtaggttaggtccaatttaacgtatagtttaggttgcctatttacttactttttttctgtctgtcctatttataaaagtggtccgttgaagtcttttattattactgtggaacttttctccctttagttatgtttctcttgcttcatatattaaggatctctaatattaggtgcatatataactataattggtatatcttctagtgaattaaccctttaattattagataatgctcttctttgtctcttgtaccagttttgacataaagtctgttttgactgataccagtttagccacctccgatgtctttctattaccatttataagggatatcttttttcaccctttcaattcagcctgcgtgtgtccttcaaataaaaatgaatcttttgtggatagtatgtagttggagcctgtttttaaaattcattcagccagtctctatcttctgattgtggagtttaagccacttacacttaatgtaattactgatagagaaggactcactcttgctgttttgctgaatgtttcctatatctcttagatttttttgttcttcatatccgttactgcctttgtgtttatttagttgattcttttgtcttgacatacttttatttccattgtgtgtgtcttctatacattctttgtggttaccattgcaattacagaaaacactttagatttataacatcctgttttaaactggtaacagtttgacttcagtcacatagaaaaatgactcctttacaggtctgctcccatgttatgtttttgatatcccagattacttccatatatactgtgtctccatgaacgtgtatttaaaccttgacaacaatttcctgctttcttagttttttcagattaatatttgcccattttgccagcgtgtcttcttctgcatcccaagtctccttaacattgttgtactatcaataaggttttatgttgtctttttgtgtgtgtacaaaataaattcatccatctcctcttcatggctgttatcaaattttttcttcaggattatattgtaggaacattttttcgcatatctcttgatatgtagggttgttgagcatatgcctggaaatataactcatgggacattcaatttgataaaattcatagcatatattataaagacataagtctgctttcttcccatatcctcacactgcctcctttttaactgttttcccttgtcctgtgcccatagtataattcacgtatttaaatattggccagtataatgctacttctaaattagtttctttttttgtccaaagtcaggattttaactgttcctggtgaaattatatacctacagctctgcaagcacaaaccctgctgccccatgcacattactccttgccctttcctcttgccttttctcttccctggcctttcctaaaatagtactttgttccagacggaatacctggctacttactagcatataagttttacactcccattattgcataactccttcatctcccacactactctcactctgtaagggatgaccgtactcattcacttgatcacttcctttttttcttttttctttttttttttcatatggagtcttgctttgtcgctcaggctggagtgcagtggtgtgatctcggctcactgtaacctccacctcccgggttcaagcaattccctgcctcagcctcccacgtagctgggattacagacacctgcccccacacccagctaatttttgtatttttagtagaggtggggtttcatcatcttggccgggctggtcttgaactcctgaccttgtgatccacctgccttggcctgatcactttctgagaacactgtctaaatcattatgtgcagggaatgatgactcagatactgttattcatggggatggctgaataatgcttttggcaacacagcatggctcttgaagtatttctttatacactcttagtatttggggtgacctgttacctgcagtacctgcttgggcagtttttgaaaaaaacataatgtttgatcctgcaaacgtaggtgcatatcttactttctttgtaaattggatgtagatacatgaatcccgtgggcatactaactgcttgtgtgttaaatagtggtaatttacctcaagactttttaaacaagttagtgctgttagctagtctagaatattgttttttagtaaagactcacagatttctttgttaaataaagcatatcaacattgttttatgtttataatgagatagcatattggctttaccctagtcagcatggctacctatagtagatattgtagattgggtggttgaaacaacagaaattcccttttcacagatctgggtggtgagaagtctaacatgtcagaaccagccattttggttcttggcatggcatgggccctttttccggtttaccatggctttctctttctgtgtcctgacatggcagaggaccgaattgcctcccaaagaccacacctccaaatactatcacattgaggattgggtcctcaacataggaattttggcagacattaagtctttatatcaaagcagccttcattgtatctgtaagttttcattttgtagtttcttccaaacagtgtttgttgtcttttatcttagttcatatgcttttcaagtagaaatctcttgatgatatatattttgtggccagttaactaggtaattagaggcaatgaataggaccaggtgtggtgactcatgcctgtatataatcccggcactttgggaggctgcagcaggcaggttgcttgacctcaggagttcgagatcagcctgagcaacataggaaaactctgtctctaccaaaactacaaaaaaattaggtgggcgtggtggtgaacatctttggtctcagccatttgagaggctgaggtgggaggatcgcttgagtcttaggagtggaggttgcagtgaggcaagattatgccactttactccagcctaggtgacagagtgagactctgtctcaagaaaaaatgacaatagatagggagttgctctattgattgttacataggtgtaggcatgaaatcatagtcagtatttttccttccccactttttattctgtattatgttgtgtatttacctttctcccatccaagtagtaaccagatctgacactgtttagcttctgagatcagctgtgttccaggtggtatggccatagacatatttatctttcttttatctttaaaagtcagtgatctcaacatattttctagttatcatatgctgtctctagaatatatgttcttgcttattataaagggagatttgtttagaattccatactataaatttgtgtatttgcatatgatgcaaacttgtatatgcaatatacaaatttatagtatggaattctaagtatattgtatattgtattttacttacctgctggttttatcatgggttaatagagtgttttatttattaatttatatgatgattattaattagtttatcttgtgaatatttaccattacactatatcttgctgtggtttggcatttgtttgtacacagtaaatatgaagtaaatatatataacttttattctcttatgagagagccacattttctgccaatcggttcgtaatttggtgtcattggttgcaaaatacttgttttagtgccaatatatgtttgcacaacataagtcttttggtcataggatgtttgaaactaggctttcctaaacttaatttgaattacatgtagtcaccctttctttactatagacttctattcattttgtatttctaaaaataaaagatcatggtggagaactctcacacctgtctagtataaagattatgtttagtgtaggtatgtttccaatataaaatgtttgtttatcaatagtagtagtttaaaaaaaaactcatgttcattatattttgcaggtatctctcctaaatgtgtgatcaaggaattaccaccaacagagaacagtaatacaggagaaaggttccaaacagtggcactggaaagacatcaaagctatgatattgaaaatttatacttcagggaaatacagaaacatctacatgaccttgaatttcaatggaaagatggtgaaacaaatgataaagaagtgccagtgccccatgaaaacaatcttactggtaaaagagatcaacatagtcaaggggatgtagaaaacaatcatattgaaaaccagcttacatcaaactttgagtcacgtctggctgaactgcagaaagttcaaactgaagggagactttatgaatgtaatgaaacggagaagacaggtaataatggttgtttagtttctccacacattagggaaaaaacgtatgtatgtaatgaatgtggcaaagcctttaaagcgtcttccagccttattaatcatcagaggatacatactacagagaaaccttacaaatgcaatgagtgtggcaaagcctttcatcgggcctcactactaactgtacacaaggtagtccatacaagagggaaatcatatcaatgtgatgtatgtggcaagatcttcagaaaaaattcatattttgtaagacaccaaaggagtcacactggacagaaaccctacatatgtaatgaatgtggcaagtcctttagtaaaagttcccaccttgcagttcatcagagaattcataccggtgaaaaaccttacaaatgtaatctgtgtgggaaatcctttagtcagcgtgtccatcttagacttcatcagacagttcatactggagagagacccttcaaatgtaatgagtgtggcaaaacctttaaacggagctcaaacctcactgtacatcaggtaatccatgcaggaaagaaaccatataaatgtgatgtatgtggcaaggcattcagacatagatcaaatcttgtatgtcaccggagaatccacagtggagagaaacaatacaaatgcaatgaatgtggcaaggtcttcagtaaacgttcaagtcttgcagtgcatcgacgaattcacactgtagagaaaccttgcaaatgcaatgaatgtggcaaggtcttcagtaaacgttcaagtcttgcagtgcatcagagaattcatactggacagaaaacttacaaatgcaataaatgtggcaaggtgtacagtaagcattcacatcttgcagtgcattggagaattcataccggcgagaaagcttataaatgcaatgaatgtggcaaagttttcagcatacattcacgacttgcagctcatcagagaattcatactggagagaaaccttacaaatgcaatgaatgtggcaaggtcttcagtcaacattcacgtcttgcagtgcatcggagaattcatactggagagaaaccttacaaatgcaaagaatgtggcaaggtcttcagtgaccgttcagcttttgcaaggcatcggagaattcatactggagagaagccttacaaatgcaaagaatgtggcaaggtcttcagtcaatgttcacgtcttacagtgcatcggagaattcatagtggagagaaaccttacaaatgcaatgaatgcggcaaggtctacagtcagtattcacatcttgtagggcatcgaagagttcatactggagagaaaccatacaaatgtcatgaatgtggcaaagcctttaatcagggctccacactcaatagacatcagagaattcataccggagagaaaccttacaaatgcaatcagtgtgggaattcctttagtcagcgtgtccatcttagacttcatcagactgttcatactggagacagaccttacaaatgtaatgagtgtggcaaaacctttaaacggagctcaaacctcactgcacatcagataattcatgcaggaaagaaaccatataaatgtgatgaatgtggcaaggtattcaggcatagttcacatcttgtaagtcaccagagaatccacactggagagaaaagatacaaatgtattgaatgtggcaaagcctttgggcggttgttttccctcagcaaacaccaaagaattcattctggcaaaaaaccttataaatgtaatgagtgtgggaaatcttttatttgtcgctcaggcctcactaaacatcgaataagacatactggagagagccttacaactaaactcaatgtgacaaggccttagacgttgtcctagtttctggaatcaccgaataattcctacttactgatataccttgtatatttaccccttctcttgaaatccctgtggaattgtaatctccagtattggaggtggggcccattgggaggtgattgaatcatggaagtggatttctcaaactgagaaagatgtagcgtcatccccttggtgctgtcctggcaatagtgacttctcttgaggtctggctgtttagaagtgcatagcacttccctgtcgcttgccctcattctcaccatgtgaaataccgacacccgctttgccttccaccatgattttaaccttcctgaggcttccctagagggtgatcagatgccagcaccatgttttcatttaagccttcagaaatatgagccaattaaactcttttctttatacattagccagcctcaggtttttttttgtagcaatgcagttatgacctaatacatttacacatgcagtaaatatacctaagttttaagctagtattcactactcactaggtgtaagaatttgtatatatattccaggatgtatacatcctggagaaaaatcacagaagtgtaatacgtgtggcaagaattctactcaaaagccagaacttgtaaatctaggtaattaaaagggcatagatgtatgaaatgaaatgagggtggcaaaacctttactagagttcaatcactacttgtcataagagagtttatactgaaaggaaatcatataaatgtatgtgtcagaggctttccccaggcattggaactcactaggcatcagaatatacatctttgagaggaaccacagaaatgtaatgtgcatgctaaggtttttacccgaacatcaaaatggaaagagtattcatactagagacaaccttccaaataaatggttttaaaaaatgaaatgttcaaagacctggaatcaacccaaatgcttatcagtgatagactgaataaagaaaatgtggtacatatacaccatgggatactatgcagccatagaaaggaatgagatcatgtccattgcagcgatgtggatggagctggaagccattatcctcaggaaactaacacaggaacagaaaatcaaacagcacatgttctcacttaaaagtggaagctgaacaatgagaacacatatacccagggaggggagcaacacacactggggcctgctgatgggggtgggaagggcagggaagtggagcatcaggacaaatagctaatgcatttttgccttaataccaggtgatgggttggtagatgcagcaaaccaccatggcacacattttcctatgtaacaaatttgcaaattgtgcacatgtacccagaacttaaagtgagacaaaaccaatgtccacgcctttgcagtttgattgaacgtataaaggagaaaaatcctgtaagtatgctgaacatgaaaggacctggaagcagtagtgtgtcttcagcctttaccaaattatccctacttgagagaaaacttggaaatgtaatcaatgtggcacaaatttcaaccagttttttaaacagactacacatctttgaaatcatactagggataaccaaatctgcttctccaagattggcctggaatattattacagaataactaccagacaacatttgttaaaactcaggacagtatgtattttaaaggagcaagtgcatgtgtgaaaatggctcattcagtttataaaatattacattaaa

SEQ ID NO: 372 - DNA, 26440 bp, Homo sapiens
  source 1..26440: mol_type = genomic DNA; note = NC_000010.11:119651380-119677819 BAG3 [organism=Homo sapiens] [GeneID=9531] [chromosome=10]
gcatccaaccccgggccgcggccaacttctctggactggaccagaagtttctagccggccagttgctacctccctttatctcctccttcccctctggcagcgaggaggctatttccagacacttccacccctctctggccacgtcacccccgcctttaattcataaaggtgcccggcgccggcttcccggacacgtcggcggcggagaggggcccacggcggcggcccggccagagactcggcgcccggagccagcgccccgcacccgcgccccagcgggcagaccccaacccagcatgagcgccgccacccactcgcccatgatgcaggtggcgtccggcaacggtgaccgcgaccctttgccccccggatgggagatcaagatcgacccgcagaccggctggcccttcttcgtggaccacaacagccgcaccactacgtggaacgacccgcgcgtgccctctgagggccccaaggtgagccgggcccgcggcccgccctggtcggtggcgccacctcgacggcaggcggcggggagtgggctgggccggggggacgcgaggcggcggggcccgggggtcggcgaaggcccctcgcgggcggacaccggctccgcgccccgccacacactcccgctgcgcccggacgagtccccgctccggacccgcccttgacaggcgtcggggcgaaaggaggccccgggattcggtggcccgggaagcgaccccgcagtggctccggtgccgtccacggctcgactccagggcggaaggccgggtgtccagcgctggcctcgcgctctagggctgggagaggggcggccggcctggtcagctccggaggccccggcccaccgtggcccctgctgcccgctcggcctccgggcccgggacccgcggcgcaccctgctgaccgcggactcgagggggacactcgcaagcttggatggtggttttggggggaattttaccgctcaagttctccaacttggttgaggggtatcttggctactgtcccatgttaggcacccaatgactctggaggctggtgtcaaaacattcatatatatatgtgtgtgtgtgtattttaaattaaaattgtattattgtttgaaagtgctttcaatatgaacgtatcctagtatgatttgtaaaataaaaaacagggtgtgcttctccccagcagtttctagagatctagactagagatctgagactgtcttacagttggccattgccttaccacattgcctcacactggagagaaagagaatgatacgtgtatatttataatggcattcgcttcctgccttgttatggtattaaaatacttaggatttgttaccagtacacaaataactgactaatgatactcttgtgaatacagcagaagtatgtctcatttacatacatgcaaggatatatacttcttaatccccaagagcatgaaatttgaaaatgtaaatttggaatgagtgtgttaattttcaaaaatcagagttagttatactattctttcaattttttataaatttgagctttcaggataaaaagtttttaaaataaatatgttatacttaaagctgaattgttaacgccgtctgggcaagataaaagcagcaaagagctggtaaattattttgaagatttaaaaactcaccaaattaaaactgctgtgtaacccattgttttagaagaaagacctgtattatttcccttcatctttatgcactttttgttttaacaatattgataaaactccggtgcccagcagtgagaccgtgtacaggcagcagtttacatttacgagagattagttgtatatttattcttgaaaattagtacaagaggctgtaattagctgggatgggcacagttacatatacctttttgtgtgtctgttccacccatttttgggtgaaactgacactcatttcaaaccacctttcttaggagtctgcgtggatgtacatgatctttagtgtggtttacaactattattttgaagccttcttcctgtagacatagggatagtggtatctgttggcagcctttgttgtgagtgaagatcaagtttgaacataaacattcccagcactttgttctcagcatgaaacttacccagcaagttgagatcttcctgtacccacctggtgcatgggttaggctgtgatttcataaaccttattaaaagaaaaaaagcaggtttagttaccattattcttgtcagcaaatacaaagaactactaaatcagaagtctgatgctgggaagatttatttgaaaatttcacggtcaaaattttaaagttgaaatgtccttgaagatctcttatgttaggcttctttattttctgaaacccagagagttcaggtgtgactttgaaggtcatccagctagtaccaacaacagggagagaactagtgtcaggaaagtcctaataagaggcagtgtgtctcttcagaagttggaagtgagtgttttgggaaactgaggcatgcaggctagaatacttgattatttttgtgccctcctggccaccaagttattgggtcactgacctctgtgctgaggttgcttggattttgatgatgggactgatgaactcaagaaaagagttccctttaccaagtgaatgacttgagacttgtcagcatggcaccaaaacttaaggagaaaactaacattcagcccatgagctgtttgtgcttcattgctttcaatcctgtgctttgacacacacaatatcaggttgcacttgtgtgagttacaccttactggagactaaatgtagtggaaaatccttgaatatcattttgtatttgaaattggcttctcaatgcataatgagaaaaaggcccttgcagaaaacaaagggcgattttggaggagctgagctgaggcccgtctgagcatcatcatcttcaagaggaaatgctgtcaatcagtaaaaagctgttcattgagcatgaggagctcaagagacgacctctcttttgggggaggactcagcttcaggatgtttaaaatttaatcacgttagtaagaaaatggaaagaaaagactagacctttgtattttatttcgtcttctactgccgtcttgcagttgatcttccgccttctcctgaagtagttaggacaactccctgttttcacagaggggcagagcgaaagcaagtatcttctgtcattgctgaagcaggacggctcccggcaaagatgctgggcttcatccagccccattctaagcagctgggcctccccacctgcagtcttcctggattttgattttctgcacacttgggcttcccactaatttggcaagttcataccagtccaggccctttcctggcagaggatggcattcagtgctggtgcagccactcctccaggctcctccctgaataaacagaggccggatgttctggagtgctgttcccgccaggcctccttgggatgagagggagaccttcctccctcatggagcagggccgctctagctccatggatcttgggggttaccagtctggcactctccagggagtcctgttaagaacacagattgtggctgtgtctcatcgcctccctgccccaaccccatgttcaaatctgaattgctcagtgtagggcccagaaaactattaagtccagaaagcttttttggtggttctgattctgctgcactggcagtgggagccacggatggccagtgatcccattttggggaggaggagctgcggcttagtgcctcctgaacatctatcctgcagagcattttcccaagcctccattttccttcttggggaaactccccaggtacgcgggcttctggaggtgtgaatatggggatgacatgggaagcgagccgagacagcaccttgcaaagtctggcagggtggctggcagtgcgagagtggggaggtggtccagagatcttcctggaccccaggaagaagcaagccagagccttttctttttgtcttgcccatctggcagaatctcaccataatcatttaacagattatactcaggcactgtgacagggagatagaaacatcctttcagataacactggaaatgtttcgagttatgattgaagtagagagacccatttattttgcttaaggttcagcagagcctcctgaattttcttaaagatgagatcgttttgctctttccagatctattgcaagctgttatgcctcttagcagaggcggagcacaatcaggaaatgagtggccgttctctccttcgtatttccagcaagttgcagttgtggctgagcaagttcctgtgcgactgcatgaaagtgatttgttggggggcagatgaacagcatggccagatgccttggagcccagctcatccaggactttcattttcccctctgaagaacagcctgtgttgttcacatgagaaccgactgcacctccgagaacatcatttgtcccgttttgtagggtagatttgccctttatgagggtggagcctgtacacaggacctgcggcagcgtttgacgttggccagggctgggaaggcttaactgttggatgctatcagggctgcttgtgagtcagaaagcttcataccacccatgaggcttgcttagtgctgtcctcgtttctggaatgacacacagtcaccttatataaaccactctacatgtttattactttctattgacatttaaaaatgatgttctgatgtttatcatccaaagtagaaaaccattcatcatccagacctactctttctcctttaagttttgctgttttaatattgctcttaaatgtttaagagagcttacagaagaaactgaagacaaaggccttgcttattaggatctttgagaccctctggcactggcgaacacgagtgaaccctgtgtcacacttgaccgtgttattctccagcccctcctgggttcccttttgttgtgagtcaagtagacacctctgatctgcttctgcctcagagcatagactcagctggccttcttttttttttttttttttttgagacggagtcgcactttgtctcccaggctggggtgccgtagtgcgatcttggctcactgcaacctccgtctcctgggttcaagcgattctcctgcctcagcctcccaagtagctaggattataggtgagcgccaccatgcccatcagccggccgtctgaggcaggctccagagccccttgttttgcaggtgcaggattcatctgtatgcatcatgtggcacatgtgataccatgtgaggtatctggtgttactaagtcgtcacgtatttcgatgaaggtatctttgggaccttggcagccttttaggaagccaggcagcttgcaaaagcttaggaagaatttggggggagaggaatgaatgtagtatttttctgtctgtcaacacacacacatatatatatatatgtgccagatatgagtgggtgcttttggtaaccttatctctaaatcctcaccagctctttgaactagaaactatgaagtgtcttacacatgggacagcagatttggagaggcagtgtgcctggcctgtgataaacagaaagacttctgtggctttacccccatctgagttcctgaaggggtgacagacagacttgcctttagcgggcctggctgctttatactccccaggcacggctgctttatactccccaggcacagcttgaggtgataaacagccctgagtccatctttgtatagttaatcagaaatgttggcctgtttcttgaacctgggtctggatttaggagatgggcccgactctttactcactcctttaccccatctgaaattcactgagtgcccacagtgtgcgagtcacagtgttaaatgccatatagaggacaagtctgcccactttgagactgttctccacaaagcatgtcctgcctctccctggtccgaagcaggctgtctctcttctggaacccatattattttaatttgaatctttttgcttaagctctgcacttttctgctttgtcttggggtcacacccctgttaggagttctggggcagagtctgtgtgcttcatcgctgcctcttgatgcctggcagggtccacaggctcagaaaagatggaacgagtgactgtggagaagggtagaacatgggcctgcccagagcgcgaaggcagatacagaagagctgcccgtgaaggatgcaggtgtgtcccgggaagccttccattggttcctaagaactgcagagttgtcctgggctcctaaaggtccccagaggcctgctcctttttgtcactttgtgaatggccttctctgcacaaaggacttcagtattgattccctaagttcatccttacaggtctggagaagctcttttttgtttctcccaatgacacagcatcttacagcagggctggagaggctgggagctggcagcagccagaccctacttccatagctgtgcagagagcagcccctggcactgtgaaaagagtctcttaaaaattttttttcgtgtggctggcagcaagatcagacaccgtatacgtgaaggttcttattcactgtcaattcagaaaagcctagaatcgcagagtgccagctctgtgcgtcaggagcctgtaaacagctcagctgtccaagagctcccagcacagagctgtgccccagtgaactggggagactttttacggaaaattccttagcattcaattggagaacaaacgtttgctgttttaaagtatcttcctcagtgtttattaaagtagaattatatatttttttcagttatttaaaaaattcttccttgacattgaatgaatgaataaatgaatggatggtttaaaaattcatacagtgggaggatgggaaggccccttcatgtgcagaagaaaagccagccccttcgctggcccaccctttcagggtcagttcagacccccagcatcccagcggggttagcactccttcctgggttggacggtgtcttccccggttctgacagcgctccatgccgggcgtccctgcagtcttggggctgtggtgactcagaattaagctgagtgctctcactctcgtgtaccctgcctggctggcctgatgactcagcatggagcgctggctccctgacccagagcacacttgaactgaatgttccaggtctgagcctcagccgagcgtggctgggcgaaatggaagcctttctctcctgctgcctctcctgctgcattttaccccgggagatgaaggttttggagacgttagtgacacatggatgttatcacagtgtacagctgtgacaggagtagcagaaaggttagcatctacctggccttaccatcagacaaacctgggttctagagatcttaggcaaagcacttacccttcttgagcctcagtctcccgttgtgtgaagtgggcatagcaacacttctgttagcagggttgggagaatcaaggaagatggtgtgtgggaggcgaacgtcccaaagcctgaactgatgcatgcgtggaactcccggaaacatatgcagcctgctctgtggagtagaagtgtgtttgtggataggtgtgtggcctctccacacagcagactgtcctggctgtccgtgggcctttcagctctcagagaggcctggggtcttgtttcttagaagcaaggcctcctcttatcccccttgtatggagtgtagctgactcccccgaccagtgtccaggtggcccttggagccctccctggggcttcccgtgccccttgtgagtggaggatgtaaaggaacagtaacagatgaagctgcggggccttcgggagccttgacccagctgccagaccctgcgccatgcgtccatagatgcatctccccatcctctgcccaagataggctgggtccttgtgtcctccactgtgctgtgtagagcgctggctttactcagcctcagctcctcaaggggagggtctccctcagctgtgtctgtgcagccgcaaagtaccaggcaggagctaggagcgctgcctgtgaggggggacatcagcccaccttactgaggggccgattacctgcacagctcttctggacccagctctcaggggtgtaaatgtcaccgcagatggaaggaaggaggggttttccaagtgccaccaccctcttctggggggtgtggctgctgtggaccgaatgcttgagaagccactgcaggtgggagcagagcccccccgggactcaggggtctcaccgtccatcagagagggtccccttgcctgcatggcagctgatgaactgaggatgtttttcttttggaaattgtattttgtacagaatacacgtccgctgatgtcctgtacactgagacctaacaggcacttgtagggtcgtgtctggaggatggacttgccaggtggctgaccattccatttagcatggaaatgtagcagttgagagaggtccttttccttgactctgtctaaattcagagtttgcttcctgggatggaaatttcagatagtttccatctgtgatttgtgactttggcttgattaaagcaggtggctccgctcttttttttttcccctgaagaagaggtaggtaggttctaacatgccctgaagctaacttcatgtgaccttgggccacattccagttcctacctctgccacatggaacccgtgaggcaggctgcagggctggggctgcagggaggctggatgctgactcaggtgcccccagcaggggaaataccagcagctgcggatggtgcctggcctggagacggctgacgtgtgccctggtgaggggccatcgaggatgttgaggagacgccagcagatgttctgctcccaggcggacccttctgtgccccagcctggcctggcttttctctctaggcctcagggagatgtgtcaaggaaccacagtcagtgcggctgggcgccctgctcagccaggagtttgtctgcagagcaggcctcttccccagagcagcggcccagcctgttggagaggtgggtcgtttagggctcaggtccctagagttgtctttggctctttgcttccaggctgtgaaactttagataaagtcttaagcagagaaagtgacatccttgctaattagtcctcttaagactctcagataaaggggcttctaattctaactgtcttactaccaacttggtgagacagactaaagaattaggctttgttgaacagggcgcggtggctcacacctgtaatcccagcactttgggaggccgaggcagatggatcacttgagcccgggagttcgagagcagcctgggccccatagtgagaccttgtctctaaaataaataaataaataaatatttttttaaaaaaagaattaggctttgtaaacggtaagcccaaccagctagtgctggagaaaagctgagtccatcaataactatttgtggaataaagaaatgcaattgtggctgggcgtggtggctcacggctgtcatcccagcactttgggaggctgaggcaggaagatcacttgagatcagaagttcgagaccatcctggccaacatggtgaaaccccatctttactaaaaatacaaaattagctgggtgtggtggcacatgcctgtaatcccagctactcaggaggctgaggcaggagaatcgcttgaacccgggaggcagaggttgtggtgagccgagatcatgcctttggactccagtctgggcaataagagtgaatcttcgtctcaaaaacaaaaacaaaaattagctgggcgtggtggcaggtgcctgtaatcccagctactcgggaggctgaggcatgagaattgcttgaactcgggaggcggaggttgcagtgagctgagattgtgccattgcactctagcctgggcaacagagcgagactcagtctccaaaaaaaagaaagaaagaaagaaaaagaaacccaattgtttagggcacagagcagctcagagtttacaaagacttgtaccttatttcgtaccttatttcacttaactcttgcaaaaacccctgggaaatatggggatctttacagctgcggaaacagtagcaaggagtcctgtccatggtcacacagctggtgagcatcaaggagggactggaacccagggtggcaccttgaagacccgggctcatgctggttcattcctgtttatttggacacagctgcaaagagaagcaatgttggtttcatcttctaaaaaaattttttttcccattgaaaacacatagggacagtcatctgtttattccaggataaaatgtatatatattttagtaacaggcatattagataaagcctccagtagcctgtgacttatgatagtttatagagtatgtggttggcacacacctcttgtcttaccaggagtctttggacaaagcctaactcctcaggtgtcctgtaagtggaatgtggacttagtttattattcagaattttccccaactctattatgtgcccaaaatagtgctgggggagtgggagagaccctgtattacaatccagtggggactgaagggattttgactttggctgtagggatgttaatggctgtttattgtgtatttcagtatcaaatgggcagtaatacttaattcattcatgcaccccatcatagcaagcagagagcttcggtagggtgctgaagctcgactccagttgcactttgttttttgttttggttgttgttttaattcagagcctcactctcttgcccaggctggagtgcaatggcatgatctcagctcactgcaacctctgcctcctgggttcaagcgattctcctgcctcagcctcctgagtacctgggattgcaggcccccgccaccatgcctggctatgttttttttttgttttttttttttttgtatttttagtagagacagggtttcaccatgttggccaagctggtcttgaactcctgacctcaagtgatccgcccgcctcggcctcccaaagtcttgggattacaggtgtaagccaccacgcccagttccagttgcactttggaagaaagtgtgttttgtttgtttcctgcctgatggaggcgagccaggccacttaattttgatccaggccttagccatatggggagttccaggatttctgtgttcttgcatcttttttctttgttttagaagttttgaagtgttcacttgacccatgtgaaggctcttctggcctaaaaacccagttaatacagtctgtgtcctacttaataccccaggcctgccaagtcggaagtgctacgagacagccctaagagttgcctttgttactgtttctcctagttcagaccagagtgatggaagctgtggtttgtagatgtggagcccactttttaaagagcactgtacctggccaggcgtggtggctcacgcctgtaatctcagcactttgggaggccgagatgggcagatcacgaggtcaggagatcgagaccatcctggccaatatagtgaaaccccgtctctactaaaaacacacacaaattagctgggcatggtggcgggcacctgtagtcccagctactcaggaggctaaggcaggagagtggcgtgaacgcgggaggcggaggttgcaatgagccgagatcgcgccactgcactccagcctaggcgacagagcgagactctgtctcaaaaataaaaataaaataaagagcactgtaccatggagccaagattggggctcacagaaggtgcccattttcgggtttcagtgaccactcagtgtgcagggagtcagttgtgggtgggtcaaggtagattcttctccacggctctttcatgaacatgtgcctggcgtacgcctctctaggcagacaccttgcaggtgcccaagggttgtggttcccaccctgcttttagggcacagggttgggggttagaggcttccttctcttcatttgtttttggttttgtttttttgttgttgtttttttaagacagagtctcactctgtcgcccaggctggagtgcagtgctgcaatcttggctcactgcaacctctcacccctgggttcaagcgattctcgtgcatcatcaacttcctaagcagctgggattatgatgcccaccgccacggccagctaatttttgtatttttagaagagacagggttttgtcattttggacaggctggtctcaaactcctgggaatggatctgacctcagatgatccacccgcctcggcctcccaaagtgctgggattacagacatgaaccaccggacccgggccctcctcttcatctgggacatgaaactttggggtgctctgagttctggcagttctgatatgatttgagtgtagttaggagtagtcgtttttagatttctgtgacattaacttttccttgtttgggggcttgtatagctgttgagagcttgaagggactttggaaatcaggccacgcagagtgtcagagctgaaaggaactttccatcatcgtttttctcactgcggacctttaggcttcctcacacacctacggaatcagacctacttgggttgggcttaagagtctgcaatgtttgcatttcctgggtgcttcgataccccaagtgctggagaaccactgctttctagaacatttttgggcctccccttcattttgcagctgagaaaacgaaagttcacagagggcatgtgagccacttccgtaacacatgtatttaggggcagagccagcgttaggaccaagtgcagcctcttccgagctctcctgctgttccctcagcgcccatgttgctgctaaaaaccactagtgcagtttagacctgctcttaagcaaacgagcccaacagctcaccaaagctcagaacctgacctcaggctttctctaatcataatatcttgtacataatagggcaaattttgactcatctggggtcatttttttcctgctttctatcttggccatctcatggagttgtttggtgccctgagacatgcctcagatttttcagatttttaatgcaatgcacaaacaagggggcagaattagccaattcattttataaattaatatagtgagataagcagtgagagtcaggactgagcccctgggctcttctttcctaattggattttgtataatatgtgttcctgatgtctttagccgagataaggataatgagctctgagctgcaggcgggccctgatgaggtggccatgaggatcagcagtcatctgcttggtcaccgtggttgcatcccagtccctgtcccatgatcacacagagctgtccccccaactttgaggaggcagattccgagctcccgcttgaatcaggaaggggcacatagtaagccttatctgagagatgctggtgtaaccaagaggcattatctggatgtgcttgaacttgaaaacacttagtagactgaagagacatgttttagtcagattctagaattataaatattacacattttttcttttgattcttttatttacaaaatatctctctttgctagattgtgttgaaaacaccatagaagagagaaagggcaatttaactcttccaggtggtgttttttgtgtgtgtgtgagagtttttttggcagagtttcactcttgtagcccaggctagagtgcaatggtgtgatcttagctcactgcaacctccgcctccagcttcaagcgattctcctgcctcagcctcccgagtagctgggattacaggcacccgccaccacacacagctaatttttgtttgtgtgtgtgtgtgtgtgtgtgtgtgtgtgtgtgtatatatatatatatatatttttttttttagttggagtcttgctctgtcgcccaggctggagtgcagtggtgcgatctcggctcactgcaagctccacctcccgggttcacgccattctcctgcctcagcctcccgagtagctgggactacaggtgcctgccaccatgcccagctaattttttttttgtatttttagtagagatggggtttcaccgtgttagccaggatggtctccatctcctgacctcgtgatccacccacctcagcctgccaaagtgctgggattacaggcgtgagccaccgcgcccagcctaatttttgtattttttttagtgaagatggggtttcatcacgttggccaggctggtcttgaactcctgacctcaggtgatccacccgcctcggcctcccaaagtgctgagatgacaggtgtgagccaccacgcctggcccaggtggtgttttttacttagtaaaagcggaagcatttgctgttgtgaccctaatgatagtggatgggaacattagaatgtggcatcagcattcctggcatagacctcattacgggtgggagtttcatttttcattggaattattcattcatgtagaagtgtttaattgcctattttgtgaaattcatgttttttttatttaaagcaattttttgttgttgttgtttttttttaaacaaaaccccaccagagtagaaggggagcctggaacgtcttttagatgcagtgctcacaaggagacacttggttttttattaaatggcaaaaatgggtcattaattcacccaagcccaggaatacagacctcgggactgttggagaagcagccaggccgcccttgcctgtcctgaccgtctctgctttccagctgtgccggcaggcttggcctgttcagtggacctcacgcacggtggagacctttccccttccccccacatgcctctcatttttctgggtgccctttaccctccaggccctctgccctgctttgtgctcatctcctcctccctgacgtccttcttcacttcccagcatgtcctggcttctcctttccagtccctctgtcttgctgaggcatctcctgtgatggttggaacactcagaagggtggacctcagcccccacttccagcctggcccctggtctctagcctcatctccctcagctcagcactgacccccaagcctgccccttgccactgcttcccaccactcttctgacaccactgcccctgcctgcagtgaccacattccttccccgtggaccaagccatgtctctggaaaggttgaatattggctccagcaagcagtctctgctgtcacagtcttgtgtgcagacagagttgtttttccttcctccctctctctcctgtcttattccccttctctttttcaatggaggcacaaaatgtgctcagcgagatgcacgaggtgctcagcgagatgcacgaggtgctcagcgagatgcatgaggtgctcagctcgtggctggctcaagggctttctggatccaggggcttcccccaggaggagctgcatctcctcaaggcctgtctgaggactccaagccctggaagggtctggctataaggggttgggatcagcagctctcccagttaaaaccagagagtgtgggtgggatgtggcagagtgggcagtgtgggggtttgatggagttttacacagccatacacccatttaccactgcccagaaaaagagaatattcccatcacctcagaaagctctttcgagacccttcccagccactaccatctcctccagaagtgaccaccattctggtttctagcaccatcgattcactttgtacttcactttttcttttttttcttctttttgagacaaagtcttgctctattgcccaggctggagtacagtggcatgatctcagctcactgccacctctgcctccggggttcaggtgattctcctgcctcagcctcctgaatagcagggactacaggtgccccccaccatgcccagctaatctttgtatttttagtagagatggggtttcaccatgttggttaggctggtcttgaactcctgacctcaggtgatctgcccgccttagcctcccaaagtgctggtattacaggcttgagccaccgtgcctggccctatccttcacttttgattcctttgacactttggagtctgaaaagcataattttgtgcgtatttagggagaaactcacatttattgccagtcttccgggcatccctcttgatatgcccttataaaacctcacaacatttctccagggcaggtgttggctagctccgttttctagaaaaggaagcgaaggcttacagaggtaagagaattacccaagctcacagaactgttagaaatagaggtacgaatcacacttagaccctacctagggcagcgtctaccctggaagagcctgtgcctttccccatccctcagggcctccgtgctttccaagtaattctgcttcttgtttgtttcctgcccccttagcccatcttctaagcccctgttggcagggagtgccccttgctggtttggtaaccccataggactcctcagcgggtggcaggatgttcccccaggtggtggatgagggtttgctcactgctggtccctgctgtgtggagtgtgcagatggttgaggcttttgtgcgtggctgggaagaaacaatgagcccctgggcagccagcaaaaatgacactgcaggactaatgcaggctccgatttcggctggaaggaggaggacctcagtgagtggacagaatgcccacaggcacgttatgactcaacactgagtagcagagggtttcttcagcgcctcttgctggctccctgtcagggccatctcacggcaggaattcagctctgaatgtgaggcctggacctgctcctgctcttgggtgacctgagagttaagcaggctaatgtaatgccgccgccctgagcacgtggctgttctaatctgagaatgcctgtctgcccatgtccccaaggacacagtgacacccatgcctttcctgtgtgctggaggccctccaagggcagggtctcagcaggagggaggcagttgatgggcctgaaagggctaaaccagggtcagccacctggtgcccacgcctgcacacaaatagaaacatcacagaattaatggtctgttctctcaaagtgcagagcagccctcagtatctgtccttacttttgattgattccgcagcagtagagattgtcccctgcaagctcatagattgttagcctttggcgtttgttcgccgtgcagacagctgccttcgtcaggaaagatcactccccttcttaagagttgccttacacagatatatgcaaatgacacttatcagtagctcccctcctgggaaaggaccctcggtgctcggggactgttaggacttctgttgcgcagcccagcttgctgagagatggcattgcccagtgagtgactggccagccttgttgtctgaaataagatctttcctgtggtacatctggaacttggccttctcaagggtcccaaaatagccaggccactgaagggagaacttcaagagaggacataagagaaggaccccaactgctccttgcccaagcaggctctgttgcgttgaagaaaaagttcttcagtgatacttgttaaagcacagtcaggaagatttattcggggccatcaagataggcacagggaccacggcagtggggtcgtgcagtcatgggtagagactgggcacaacttcaaatacaacacgggcgattgggaatttatagtcaaggagcagtgtggatggaaaattagaagaggaaacatcagggctaagggtgtttctggctatgctgaccaaacaggattcttgccgaagacaggccagggtgattagacagcacctggaggctgtggaagctgatcagatagtgaggctggggagggggtttctggctaaactgacttagcagtgtcttttgctaaaacttgactttacaaggaagtgcacagatgggcctaggagatgcttcggaagcctaagatttggtcaagcagagaatctttgtcagttggcatcgttaggcgacacagttaaccctgggtgcccctctctccctatgctgcctctgcatccctgtccttccccttcctgcaaattgttctaacaatactcctgaggaggcagccctcgctccccagcccacttctctgtaaagattcccaaactgtgtcctgtgtttgggcccagtacaagctctatattgctgggaaatgtgagggcctttttggaaacagagacgcttgctgtaatgtagaggttggagctgacccctgctcctggagctcatcttctgatccgggtctctgaaaatgcgggcatgggcagctctcctacactcaccgcttccctcagtcacccagaaaagaaacctgtcttaccagtttggagaattgggacctttcctttgcttaacagatacttttggctttctcctgatgcccctaattcctaaactgttggccaaatagcaacctctatggggtggggggtttggagggtacaggggctgggagctggctgacgctttgaggcccaagtcactcgggaagatcacaatgccaagcgccacagtgtttcctctgccaggagggttcacttcccagtttctaaccagcctgtgtttctccactttttatttcaggagactccatcctctgccaatggcccttcccgggagggctctaggctgccgcctgctagggaaggccaccctgtgtacccccagctccgaccaggctacattcccattcctgtgctccatgaaggcgctgagaaccggcaggtgcaccctttccatgtctatccccagcctgggatgcagcgattccgaactgaggcggcagcagcggctcctcagaggtcccagtcacctctgcggggcatgccagaaaccactcagccagataaacagtgtggacaggtggcagcggcggcggcagcccagcccccagcctcccacggacctgaggtaaggagaggccaggctcaccagcctgctggggagcaagccgctgtgcttcccaggccgggcccatcccctcaggacagtgccctgggccaggcacctgttcacatgcagggcatctgggtctagcctgcagcatcagaggtcacccagcaaagacagggtgatggccccacatcatcccccagcatctcatagggctgttcttcagtggggcagggcaggaatcatgtggcttctttttgtagctaaggaacggctcggaagggcacactgcagcctgcctgctccagatgcacacaggtggagggagcagagctgggaccggaagcctggcctgccttctggcgcctaatttccatgctccttattcacactgggctttctattcagaagcacagagatagctgtgcattattttgttcagttcaatgcttatggataaatcttaaccgcttgtggagctatgttgacaggaaaatgagaccccatgcctgccctcaccgtgcaccacagtttcaaaagaaataaggagtcaggaaggcagctgctttaagacagcattttaatcctgaagccaaacatctcagggatatgtcaatggattctgtgcattaatagctaaaaaatagttcttaatctggttcttagctgagatttgaggcattcctagtaggattcctaagcagtaagtcctctcattttcctgtctgcacatcatcctgtggtgtgtgccagcgttgttcctgggcacaaactcccgtgtcctatctgcaccctgagtcatgcttgcctctcagctccgtctgaatctgttcagcttcacacctgcttgagagtgaaagttacagttaatgtgggataccttttttcttttcttagagaggtagtacctggctgaggcaggtggatcacttgaggccaggaattcaagaccagcctggctaacacggtgaaaccccgtctctacaaaaaatacaaaaattagccgggcatggtggcacattcctgtaatcccagctactcaggaggctgaggcaggagaattgcttaaacccaggaggcagaggttgcagtgagccgagatcgcaccactgcactccagcctaggtgatagagcgagactgtctcaaaaataaaaaaataagtaatgcctatatttataatggttttgctgcaagaaatcaaagtgacacataaatgcgagacatcttcacaaatttaggctaacaaagcacttagaagaggaaatgctctcaatttcgaggtgaatagaaggtggcccagcagggaaaggtgcttgacctgccttgggccacacgggatgctggcagctcccagttgctcagccgagttctctgtagattggcagagaaagggtagtggggacaacacatcccttgtatgagcgcttcctgtgtgctggcctggggctgaggcacatgcccaggtgactgacctcatcttcagagcagcccagtgagggaggggcactcttcctatatttcaaatgaagcttagaaaatgattgaattactaggaatttgaacataggccccttgattccaaagccttcagtctttgttgtgtgtgtgtgtgttttgttttgttttgttttgttttgctttgtttgaggtggagtctctctctgttgcccagactggagtgcagtggtgtgatctcaaatcactgcaacctctgcctcctaggttcaagcaattcccctgcctcagcctcctgagtagctggcactacaggcatgcgccgccacacccagctaatttttgtatttttggtagagatggggtttcaccatgttggccaggctgctcttgaactcctgacctcaggtggtccactcacctaggcctcccaaagtgctgggattacaggtgtgagccaccgcgcccagccccagagctctcagtcttaaccgcacattttgaaaattgaaaattacagataggaggtcttacaatatggattgccctgaggaggtgcacagcagaaggcgtggtcaggatgccaagccaggggagtcatttgtggggtcatgccctctaccctgtgtctcttgcagcggtcccagtctccagctgcctctgactgctcatcctcatcctcctcggccagcctgccttcctccggcaggagcagcctgggcagtcaccagctcccgcgggggtacatctccattccggtgatacacgagcagaacgttacccggccagcagcccagccctccttccaccaagcccagaagacgcactacccagcgcagcagggggagtaccagacccaccagcctgtgtaccacaagatccagggggatgactgggagccccggcccctgcgggcggcatccccgttcaggtcatctgtccagggtgcatcgagccgggagggctcaccagccaggagcagcacgccactccactccccctcgcccatccgtgtgcacaccgtggtcgacaggcctcaggtacgggaagttagtcgtcagcagactggttatggtggtatgtctccaggggtgcaggagctctgtgggtgccctgggttcccccttcatccctgcctatttaacatgcgtgtacctacaggcaagtgagattcgagaaattgctaggtattaacagaaatgcaggacagttgctcaggctgtgaaccctccgcactctgcagcttttgctgggctgatcattgtgcattgcggctgacttagagcagacgaaacagcttggcagaacttacatacctgggaccagcttccttagtgtccaccacaccctttcagggctcttcacacccccatccacaccgcagccacagcctcaccttgggtgtaggcagtgtgtcaccttccactcagttacccactccactctgcaggcccattctgctcattcccacccctgtgcctttgcccatgctgaacccgctccctgaaatgcccgcacagtataggttctccctgtcctctgagggacgagccagtcttgtctcctccatgaagcctactcatccttctcatctcatgatgcctcatatgagtcccttaatgagaactcccaacttgtatgagttcaacatgtcattattcggggcatttcagaagtgttcattttatctcttcagcttagggctgagcctgaccacagggcccatgtcttaacccccctcctccctttgtaatcaggtaccatgtggtctggctgaggcatcagccagctatggcggattggaagccgtgctggcctggggaaggttgtaggcaggggtctggttatcttccagtggagacacaaggtgcaggttcctggaagaggatgtcatttagtttaagcagctcacagcttagcagcaggacagtcagcagccctgggccccctgtggctgcaacttgagcagctgaatgctacagtttttaaaaaggaaagccccccgtgaacaaatgtgggatattctttcattacaaatggtcacactggccagggccctggaatagagcaccctcatcttaaaatgttgttttatttggaaataatttcaatctcatagaagagttgtgtgaatcatacagagccccacatatacttcatccagttcactgtttgtcaatatgtctgcattcgccttgtcatttcttctctcgtatattattgatgtgttttaactgtttgaaaattaattgcagacatcatgtcccttttcccctgaatagcaaatattttcctaagaggaagacattctcgttcataaccatggtagacttaccagattcaggaaatttcacattcttacaacattattatccagtacatttttgaatcttttttatagcagtttgcccccacttccaggatgtcttccaggactgaaacaaggatcatgagcaccgcatttagatgcaacttctcttcagtcttccctcagcctttctttgctttcacggccttgacggttttgaagaacacaggctgtggaacaccctctctaaagtgtttctaaagtcacttcttacacagccattgctgttagaacctaggaggggtgcgtggttgggttgtgagtggtaagggccaaagttgcgaatgtctgcattggcgaaagagatttgatggaaaaggaggttgctggagtgtagacagctacatcgatccatacttgggttcagcaatcctaggagggtcccatttgtagagagagggatattttctccacatcattcccatgtgtttctcatcatcagtgaaatgatatttcatcctgttcttaccattaaccgtgtttgtggtgacctcccttttagagctgattcaaagttcccttttgggaggctttccaggatttcaccaaactgaacgttatagtggaattgagtgttttaagctgggaatagtttagaaataatatagtccagttatttcccagttgatgaaattagggtgagattttaaaagaagtgttagatattcacttacatgaataagagccaagataaggccaagcgcagtggctcacgcctgtaatcctgtaatcctagcactttgggaggccgaggcgggggtatcacttaaggtcaggagttcaagactagcctggccaacatggtgaaaccccatctctactaaaaatacaaaaaaaaaagttaaccaggcatgttggtgggcgcctgtaatcccagctactcgggaggctggggtgggaggattgcttgaacttgggaggcagaggttgcagtgaactgagatcacaccactgcacactccagcctgggtgacagagcgaggctccgtctcaaaaacaaaaacaaaaacaaaaagcgtcaagatatttttgctttgagcatagctcattaaaaaatatatggcttactaggcgtggtggctcacacctataatcctagcactttgggaggccgaggtgggcagattgcttgagcttagaaattcaagaccagcctgggcagcatggtgaaaccctgtctctacaaaaaaatagaaaaattagccaggcatgatggtatgtgcctgtagttgcaactaatcatgaagctaaggtgagaggatcacttgaggccagaaggttgaggctgcattgagctgtgatagccccgctgcactccagcctgggcaacagagtgagaccctgtcccccacaaaaatctatatatctatatggctgtagtttatagtcacaggaaaacctgtgcagccagaggttagcacagaggcgctgtgtcattgctgaatgttaggctacagcacagctatcctgaagcaaaattgttctggagttaaccatttagagcatcttggctaatcctaaaaaaatacattggtctgggcagaaactactaggctgtcacggttttaaaaaaagaagatcgtatcttttctaaaacaggagacaagaagatcacaccgtgagcagactgtctgcacagtgtaaggaagaaggaccagaggcagcgactccaaggctgcaacacctgagagctggagtcactcaggactctgctctgagtcagcctagttcagcagtcagcatgagtttttgctatttttttccttctttccttccttccttccctccttccctccccctcccttccccccttccccttccccccttccctgcttccttcccccttcccccttccctccttccttcctgcccccttcccccttgcccccttctccccttccttccttccttccttccccccttccttccttccttcctccctccctcccttccttctttgagacaggatctcgctctgtcactcaggctggagtgcaatgacataatcgtggctcactacagccttgaattcctgggctcaagcgattcttccgcctcagccttctgagtagctgggactacgagtgcaagctcccacacctggctaatttttaaagattttttgtagggttggggtcttactatattgcccaggttagctattttcatttttgaaaattttattgggtttcttttcattgccattaagaataccatctacagagaaattcagtgagaggtaatagacaaatagcctggggtgatcaatggaagcctgactaatgattgggttacatacatgattaataccatgtttttattttgtaacagccattgattgactttgaaaatcttttatactattaaactttttttaaaaagccatttctcagttttctttctaatctgtactagctacaaacaatttctgtgactttcagtcagttattaaaaatatatttttgtgtccttttttcagcagcccatgacccatcgagaaactgcacctgtttcccagcctgaaaacaaaccagaaagtaagccaggcccagttggaccagaactccctcctggacacatcccaattcaagtgatccgcaaagaggtggattctaaacctgtttcccagaagcccccacctccctctgagaaggtagaggtgaaagttccccctgctccagttccttgtcctcctcccagccctggcccttctgctgtcccctcttcccccaagagtgtggctacagaagagagggcagcccccagcactgcccctgcagaagctacacctccaaaaccaggagaagccgaggctcccccaaaacatccaggagtgctgaaagtggaagccatcctggagaaggtacaggggctggagcaggctgtagacaactttgaaggcaagaagactgacaaaaagtacctgatgatcgaagagtatttgaccaaagagctgctggccctggattcagtggaccccgagggacgagccgatgtgcgtcaggccaggagagacggtgtcaggaaggttcagaccatcttggaaaaacttgaacagaaagccattgatgtcccaggtcaagtccaggtctatgaactccagcccagcaaccttgaagcagatcagccactgcaggcaatcatggagatgggtgccgtggcagcagacaagggcaagaaaaatgctggaaatgcagaagatccccacacagaaacccagcagccagaagccacagcagcagcgacttcaaaccccagcagcatgacagacacccctggtaacccagcagcaccgtagcctctgccctgtaaaaatcagactcggaaccgatgtgtgctttagggaattttaagttgcatgcatttcagagactttaagtcagttggtttttattagctgcttggtatgcagtaacttgggtggaggcaaaacactaataaaagggctaaaaaggaaaatgatgcttttcttctatattcttactctgtacaaataaagaagttgcttgttgtttgagaagtttaaccccgttgcttgttgttctgcagccctgtctacttgggcacccccaccacctgttagctgtggttgtgcactgtcttttgtagctctggactggaggggtagatggggagtcaattacccatcacataaatatgaaacatttatcagaaatgttgccattttaatgagatgattttcttcatctcataattaaaatacctgactttagagagagtaaaatgtgccaggagccataggaatatctgtatgttggatgactttaatgctacattttaaaaaaagaaaataaagtaataatataactcaaaa

SEQ ID NO: 373 - DNA, 179012 bp, Homo sapiens
  source 1..179012: mol_type = genomic DNA; note = NC_000014.9:c93115925-92936914 ITPK1 [organism=Homo sapiens] [GeneID=3705] [chromosome=14]
gcttcctcgccgccgcgggctcaagcggggcggccgggccagcgcggggcggcggcgggcaggggcggcgagtgcgcgggcgctcgccgccgcccttctcggcgggcagcgcgcgaggaccaggccgaggaggaagtggcggcggcggcggcgggtgaggatctctggccgggccgagtggccgcgtgcgccccgccggggtccaagcgcgcccaggggttacggcccggctgggaacatcagagggcgaggacccgggcgggaggaggagggaggaagggctcggaggccgcgcttctgccgccgcctgagggcgtgtggctcgggcccgcgcggcgggagggcgggcagggcgggggcggtgtctgcggaggcccggcttcccctcctgcgggccctggccccagctccgactcagactcaggctcagccgtgccccagcctcagccggcaggccgggcggcgcggcgctcgcgagccggtgggcgggcgggcgagcccgcaggcggcgggggcgtgggcggtggcagcttggcccagccagtggccttccgcgctgagcgccgctccctcctcccggccgcccgccgcgccccgccccgctccgctccgcgcggcaggactgcgcgccccagctccgatccccgttccgcgtccccgccgccgggaggaggtgcccactcgctcgcggcgcgcgccggccgccagactcggcctgtgggcgatttcctccggacccaggctccccgcccgaggaggaagatgcagacctttctgaaagggaagagagttggctactggctgagcgagaagaaaatcaagaagctgaatttccaggccttcgccgagctgtgcaggtaaggagggacgcggcgccggcgcccggggacccccggcccgagcccggtgacccccggcccgagcccggtgcagcctcattagttgttttgggagatcggagccaaacgggaagaagcggcgcgcggggagactgagtccgagcagccaggtggcggtggcggccgccggccgcgttccagggaagcggtggccggtgcgggcgaggtggcacggaccggggcgttcaggtgcactgtgacccggctggggaggcccccagcagcccagggcgcggtgggagttctactgagggttgcggagggacctgggaaatcggggcatccacgctgtggggtaagggcttgagggtacttttggaccggagtgtttttcttccttcgtccccttccctttcatgaagaaagggcacccacgtttgtggaccacctactatgtgccccgcgtgtgctcggctcttgaggctgtcattgcatatcatgaggttaagcccagttgaagcgagtagcaattcttggcatgtatgtggtgatttgctgtctcattagagcctcgcagcagccctgcaaattggccagggtggtgattctgggccacctgtctgagaacggggaccgatcggcagaggagcggggtacctagcttggggtcccgcagctagggagtggctggtgcgtagaaagtgctgggtaaatgcccgtggtgtggagtggccttctgccatctgggctgtgtgcccctgctcccaccatgctggtgctccttggcggagtctccggtgtttaacagatcacgttcttaataaattacagaactactgagtcttgggtcaggtaggccttcccttgctccacaactgtagctttgcctctgagaagcagttaagcccttttctcaatgcaagcctaagagaatctagctctgaaagccttttgcaaactccaggtggaaaccttttgtgatgcagcttgttagactgatttttgaaaatgggctctacttgcatttttgtccctgtgggggccccacacatcttggagaattgaacagttgggtttccgtaacccctggtgctcctgggggcccgtggctggtctgagctggcatgcgcaggtgagcctggcagcacctctgtgtgcctcatgcctttcccaagggcctgctgctcctttgccccgtgcaagccccgcaggcgctcttcctgcagccagaggggcacagcttgtacaggatagtgcctggttctttatcccttggtctggggatggggttggctgccttctcccaggccggtttccctagaagacaggctcttcatgatcaatagggcatgcagagtggccccagcaattcatgaagaaatcaggaggagctcgaagccagagctttgaaaatgagtcttaggacccttggaacattacaaaagggtacttgaacgttgtaccgcggatacactcacttgtgggaagggcattctaagacactaaagaaatttggagcagctgctttggcatgttctcgaagtccagttctgatgtgaggcaccggagctccccctgcagtcatgtaagacttgggaaatcccagcgaatacctcgcaccctttgtactgctgtctgtatttatgtcatcttgtgtctgcaactcaagcttgaggcttgtcattgggttggcttgttttgcttggtaattaggaggctctcgcaaaatattcttcgccgagactcacaactaggtcctcgtgctggacctgcagattggcttgaccttgtagacattcttcctttaaaggggtgggaggttcagagcaagctatgctatcaacgttctggggagtagagcattactttctctgaaagagttgttgtcttcaaagtctagttgccttcctttggccaaaatattggcttcaaagaaggcagaagtcatcagggccattctagaacccgaggaagcccactttgtgttttcactagggaagctttagatattttatcacttaagcctaagaaggaaaagaaaacaccaaagagtttttccgtttcttatttattactttcagggcagtgccccctggtggccacatttctatactggctgcaaaatgctgcaactgttgagccagtgaccagggagccccgtgaggttgttttgtttggtgtgagggccaatgagactttagtggctgagagacagtgcaaaggacattatcatgttttccacattcagaatctgggggcgcagggcttctgtactgacgacgggtgatgaattgtctatgaattccctaatgaaaaagtctaaaggtatttgaaaatggccctgctttgggccgggtgccgtgtcttctgtctgtaatcccagcactttgggagtccaaggtgggtgggtcacgaggtcaggagatcgagaccatcctggctaacatggtgaaaccccatctctactaaaaatacaaaaattagccgggcatgatggcaggcgcctgtagtcccagctactcaggaggctgaggcaggagaatcacttgaacccgggaggcagaggttgcagtaagtcgagatggtgccactgcactctagcttgggtgacagagcgagactccatctcaaaaaaaaaaaaaaaaaaaatggccctgctcttaatgtttgggcaaagaatgacccgaatggtccggcccggggtgggttgtttagctgaatgtccggccttgtaaaaatctgatctcagagcaggaagagatgttggccatcatctcatctagcccctttgtcttacagatggggaaacccatcaagagagggggcaggttccggactcttggtcttttcctttaacttctagaatgggtccaacctggctaccttgagattgcctttctgattgggcatctccgacaataaggcagtctccctcattatctttccaggggtctggtggctgctatttagcccccaggacacattccttgcaaagctgagcccctctgcaagtgtaatccttgtcttggggggagggtttggggggtagtgcacgttgatggcaacagtgggtggttagagccacttcatgggccatgaagtgccccacctgccgtaggtagggacaggcgccagccttttcagatgtgcactctgataggatggggctctgctagccagcagatgggcctttgaatccacttgtttgtcagtggtactgtttgttcctgttgccatcctgtttcttcccctttctctggggacacggctctggttgtgttctcttgtacccctcccacctgccttccctagcctgggagcaaccttgtaggtctcccacaccaccccctctttgtggctttttttttttttttttgaggtggagtctcgctttgtcgcccagcctggagtgcagtggcgcaatctcggctcactgcaacctccgcctcccaggttcaagctattctcctgcctcagcctcctgagtagctgggattacaggtgcgcaccaccacgcctggctaatttttgtatttttagtggagatggagttttaccatgttgtccaggctggtctcgaactcctgacctcaggtgatccgcctgccttgccctcccagagtgctgggattacaggcattcctggcctttgtggctttttctagatgctcagaaggggcttcagagggggagtgaagaaattaaagctgttagttggaaatactgggtgatattaatttaattttaaattttgtagttctgtacagtgcctcactggggaatactggctggccccagtttcctcagctcatgttttctgtgcctcctcctctcctcctctctgtcccattctttctgtggctgaacctacgttgcaggaggtgggggcggaagaggcacatgacttggtgaagctttccatataaaatttgggtgaaccttatctgtctttactgtaataattgctgatttttaatgaagtgcttccagggacctcatctcatttaatccttccagcagcccagggatggagggatgagggatggagggatgagggatggagggatgagggatgagggatgaggacatccctcgttgggatggagggatgaggaaacagaggctccgggagtctataggacctgcacagccagctagagggctttcttgagtccactcctgaggcctttgcgctgagaatgtggcttcccttgtttatttgcccaggttaggctggggcttccaggaggctacagaagcacaagaatgtctgtgagtttctcatcctccagagacttggaggccagctgggctgacttggcttgcaagaaacgtgtttctggagcagtctcagaccttggtatcccaccagggacccttttgtcccaataccttagaagggactgaggagttcattaatgttcacgtttatgaccacccttggtaggtagcccaggcctgcatctgctctcatgggtctgggagtttggtgtcaacagtaaactggcttgggaggcgtgccagtgagagtgtagcatgccaccgggcctgtcccttccccttgggccctacatttgttcctttaaaatagggccatctccaaggtccttttctacagggatggcttagcattctggtctggaattctttcgggagattctctgcagggaggaaggaggatcttttccaggattaagtgatgctggtctgtgggtgggtatttttttatttgttttaatgtctggatttgccaccatttcgggggtgcagaggtgggaagaggtgctgacttaggttttctttgcagcagtgcacagggagtattcataacccagccttgcaaatgaacactttctaccagcctcctggggagcaaacagaacttcacataggaggaagcgtccgtgtgcacatggatctattgaagggactgcctcagtttcaggcctgactccacgactgactgcctatgtgccccatgaccctcgacacattccctacccctctgtgcctcactttcctcatctgtgagggtaataatttagcttagggttgcgagcatcaaatgagggaatttgctaaagggtccaggatagtgcctggaattctgtcagtggcggcggccgctgctgtcgtcgtccctgtggagtgagtgagtgggtctctgcccatggatgcctctctattcagggacctttggcctttgtagatttagtgttcttggttttggcagtttgcaagtcaccctgaaggccacgatggctgaactgatcatcttgcagggatgtgggtttgaggatttgaaactgttcagtgggcatagctaaggagggggcccaggcttgcctggtggcctttcagcatcacagcggggttctgttctccttcagcacatggcccatctgaatattacagccccccaggaggtggaggtgctgtccccacctactttatggatggggaagctgagaaatttatgttaagatgctacttgtatttttttaagtttggagattgagaagagtttgttctggatttcctgaaaatgccaagtctccactggtaatcttgttactattactagctaacatttattgttttctgtatctttttgaatatttaagacatgcacatattaaaaaaaattcagaggactcaaagtatacaatgaaacgtcagccctgttcgcttctcattgctgagttccagttccctggggcagtctgtctctataggtgtttatgcacactcaggggcgcgtgcacgtgtaggtctctccatatgtattactgttgtgctcttgcacattgcatgggactgtgtgtcttggagaaactccacatcgctgcttcatttggagaaagttttgtatcattacctctttttttttaaacagctgtgtggtccagttcttaaaaggatggaacatgtttcttccgctggtgttggtttctgctggtatgggcagcatgacaataccccgtccccttgcctgggtgtacattgctagatgaggagggctgggtcagagggcacaggcattttactttttcatactttttgtgtgtatgtgtgagacagagtctccctctgtcgcctagactggagtgcagtggcacgatcttggctcaccgcaacctccgcctcctgggttcaagtgattctcctgtcttagcctcccgagtagctggaactacagtcatgcaccaccacacctggctaatttttctatttttagtagagactgggtttcgccatcttggccaggttggtttcgaactcctggcctcaattgatctgcccacctcggcctcccaaagtgctgggattacaggtgtgagccactacgcccagctttttcatacatgttctgaaactgctcacaaagaaatttcaatatgtcagtcccaatgacagtgaatgggagagcctgtgctgcgcaccctcctgcgctcagggccgggacaaatctgtgggtgagatggtcctctggattcatatttcacctagtgagatagtgagattgaggagtttaggttgctgggggctgactgcaggcacctggaagagctgggtgcacctgcatggcaggatgggcatcaatgtttctaaccactgggccatcctgcctttaccggttatttctcccacatggtttagcaggtttgggacattcagtaaatacttaaagtcaagtgccccatgagcacagttcctgaacagctggatgtaaatagggtttcagttcccactcattttgaattcagctggaaagctacatttgagagaatactatggcacttcccttttaaaaagtagcattcattttaggaagcaaagcattcaagagctgtgcacctccttctttccctcgcaaagtcactgtcttaaacaccttccccatcctgcatgaattgggcccagcccagcctctcccactctggtggcccttggggagccggcccgggtgtgtgtggccttgctctggagagggtgtgggactcccgagaactggcccatggtcacacagtggaaatgtgggaggggaacttgcctcgctccaagccgagtgctccccactcaccactggccaaagcctccttgtgaacaggcctttcctcccggctgcggcccacggtgtgtattagagtggccaggccatacctgtggggccctttgagtctttctggggcttcgtcttgctgctctgagcctgctcagaaagcagctgcccttgtggcctgcatctccccagcagagcctcatgggctggtttctgtaggcccatcctctggatggcccctgggagtgctcccacagccatttttagggttcggtggggtggatctgagattcgtgtcagagatcccgtggagccgtggagcgtcaagaatcactctcacaagggagctccagactccagaccccgctccgcatccccccacccctccaggcccttgagtgctgggtgccccaccctgttaattgctcatgatgttccagggcacacctgtggcagaggccacctgcagactcagctgccccagagggtgaatcgggacccacaggccaaaggccctcccagacagcttcagggagatgtcttcgttccaaacctctctcgccgtcagaatcttcactgatacttaggcccccaccactgggcctgttcttcctctctgacttgctcattgtcctgcttattttaagtctgtcttgtttttaagtagttggttctatgaaggtagagattttggcagctttatttactgctgaaaccccagtgcctataccagtgcacataggagctcaaaaaagaatctgttagtggctgggtgtgatggcttacacctgtaatcccagcactttgggaggctgaggcgggcagattgcttgaggtcaggagttcaagaccagcctgggcaacatggtgaatacctatctctactaaaaatacaaaaattagcagggcatggtggcaggtgcttgttatcccagctacttgggacgctgaggcaggagaattgcttgagctcgggaggtggagattgcagtgagccaagattgcaccattgcactccagcctgggtgacagagctggactctgtctcaaaaaaaaaaagtatgttagtggatcaataactgcctggtggtttttggaagcctttttcatgtccctatggctcagccaaagccacttgtgactctggaatgctctgggccaggaaggaaaccccaggggtgggggagatggggagagagttaggtggtaagtcccaggttccggaggggcttgtgggcaagtcctgagcatctgccctggccaggcctgtgctgggtgctggtccttgccggcatgtacacctgcaggaggtgaaggcaaaccagctctcagatgcactggaaatgctgcaaggtgtgactagagccaggaaacctgcaaacaggagagaactatggcgcagtggctgcagccactttagcactctgtggtcagagaaggcctctctaaggaggcgacattcagcaagaggggcctagagctctctccaggagctaaaggacccacagggtggacggtgtccactttgtagaggccacacaccctggcctctaccataagccttataagcctctgccataagccctgggttccatgtggattggagggcaggcagctctgggcagaactgaggccggtttccaccttagacagggtggttcaaggaggtgtcggggtgtccttctagagccttgtttcctgacagtgtgaccttcctcccatccgagggaggctgcagttatgccctcggggccagggataggaagacaaaatgctccccgtgggtctggttcagtccagcctttgtgttctggaaatgagccgctctgggctgtggggtggtggggtggatggggtggtagtgggtgggtcagctgacctttctcaagaatcaggttaggtctcaggtgcccaagggagccgagggaagccgcgcctgacctgtgtgctctttggcagtcatcgatcttcctccaagttacttgtttgccaaacttgcccaacaaaagagacaccaggggatgggcgtggtggctcacgcctataatcccagcactttgggaggctgaggcgggcggatcacctgaggtcaggagttcaagaccagcttggccaacatggtgaaacccagtctctactaaaaatacaaaaaatcagctgggtgtggtgactggcacctgtaatcccagctgctcgggaggctgaggcaggagaaacgcttgaacccgggaggtggatgttgcagtgagccgagatcgcgccactgtactccagcctgggtgacatgagtgaaactctgtctcaaaaaaaaaaaaaaaaaaccccacaaaaattagccaggcgtggtggtgggtgcctgtaatcccagctactactcggcaggctgaggtgggagaatcgcttgaactcaggaggcggaggttgtggtgagccgagattgcgtcactgcagtccagcctggtgacagagcaagactccgtctccaaaaaaaaaaaaaaaaagctccaggggcactggggagaagggagaagtacacatcctgaagtctcccttccctgtgagatgaagattctcctgggaagggggctggggagctccttgtgaagtaccctgatgatttttatgggaaactactcactgtcatttcatgaagtgcctcagaagaccttaccccaaaactgtcaggcgtggggaagcaccgagttagccaaggctgaagcagtgtgtttcagacttctcaggggcaggtcccctccaggaggtttgctggagccagaggttcccaggctggctcctgggtctctgtaccctgagctcactgtgggaatctccagtctggcaccgttcacctgaggcctcactggagccccctcatgcaggagggagacatggcaggggcaccaggtcgtcagcccagcccagttctacctgctgttgctaccttttgccaaattccttctcaaaagaagccttttcagatttcttgcctctggctgctggtttgcccggagtgtatagaaaggagctagttttgcacaagagacattcctgggaccgatctggccagatagacacttgtggcgttttcctcagcagtttacgctgcaaacccatggactcctcagcaaccattcttattagcctggggtcactctgggcgctcttggagcccaagccagaaactgggactctgggtttgttcaggcggcctgctgtgctttggcagggctgtgttgcttcctctctgcccccttgtacattcatggctcatgccagatctcagaggatcctgagaacctaccatgggggtcaggcactattgcagatgggataactaccctccaggatggctgaggggtctccatttgctagatgagggccctgagactcagggagaggccaggtgctgtgagcagcacagcttggattcaccctcagggatgggtgactcctgaaaccatgctgtttccactccgccaggttgcctttgtcttcaacacagcatccagctgccgtcgatcgatgtcaggaaaatcaaggagttctgttctttttttttttgagatggagtttcgctattgtcacccaggccggagtgcaaggtgtgatctttgttcactgcaacctccacctcagcctccccagtagctgggattacaggcacccgccatcacacccagcaaatttttgtatttttagtggagaagatggggtttcaccatgttggccaggctagtctcaaactcctgacctcaggtgatctgctcaacttggcctcacaaaatgctgggattacaagtgtgagcgaccgcgccctgcctcaaggggttcttttctgagcatcctttgtgtgcagttgttgggcccaggaggatagtgcatggtggagatggcagtgaagttggagcatgagacttgtcctgagcctctgccctcccaactgtaaggtgggtgcagtgcacccgccctagggccaaatgataggattccccctccacccaagaggccacctcacctgccctcctacccgcccaaggcagggcctggggcctctgacacatctctgctgggagctgccacccatctttttctgggggatcctccagtggtcagcttgctgcttcctgggcagggcggggcatggtagatgggtgcagagagaaccctcctgtggcagtttcactttcatttctgcctcacaccctgtttccatccaacagtcaagggctgggctgcggaggtgaggaaacatccggtctccaccctggggtacttgtcctagtgcaggttcccaggcctccccctcccctggaatgaatctggggtgggccgtggcatcttctttttaaaaaacaccccattcattcctttatgcacttacatgccacatacttactgagtgcctgctgtatgctgggcactcctgggttctggggattgatacagcagtgagcaccacagtctcctggagccccagggtcagtcttagggagagcttcagggcagttgtctcaccactgggagctcttgcccacagtgtgctgggtcacgtacctctcagggtcctgggctcgtgagtttcttcttcttcttattttttttttgagatggagacggagtcttgctctattgcccaggctggagtgcagtggtgcaatctcactgcaacctctgcctcccgggttcaagcgattctcctgcctcagcctcctgagtagctgggattacaagcacgcgccaccacgcccggctaatttttgtatttttagtagagatggggtttcactgtgttggtcaggctggtcttgaactcgtgatctgcccgtctcagcctcccaaagtgctgggattacaggcgtaagccaccatgcccggccctatttttctttttttctttctttctttcttttttttttttttttttgagatggagtcttgctttgtcgcccaggctggagtgcagtggcgcgatcttggctcactgcaagctccgcctcccaggttcatgccattcttctgcctcagcctcccgagtagctgggactacaggcgcctgccaccatgcccggctaattttttgtatttttagtagagacagggtttcaccgtgttagccaggatggtctcgatctcctgacctcgtgatccgcccacctcggcctcccaaagtgctgggatgacaggcatgagccaccactcccagacttgtttctgtcttttttgccgttgttgtagagacagggtttcactgtgttggccaggtttggctgtaactcctgagcttgatcgatcgcccgtctcagcctcccgaagtgttgggattataggcttgagccactgtgcctagccagcctattttctttttcttttttgttagtcttgctctgtcatccaggttggagtgcagtggtgtgatcttggctcactgcaacctccacctcccaggtttaagtgattctcggacctcaggtgatccttccacctcagcctcccaaagagttgggattacaggtgtgagccaccacgcccagcccagcctattttctttaagattttaaagtcctaacattcgtcatgggatccttgaaaagaaaaggaattatggccttgccactagaggcctttgccgcctccctgcaggaaggtgtgtcccgcggcattgggatcgtgttggagaaaggttttgcttcctgcacagtcagctcccaagcaccctttttatcaccttgacctgggcgcagccaagccgtggcctgtgcttgcggagatttgggtgccccatcctctcgctgctctggggaagcctgtagctgtggagaggccagtccaggccccagcttctgacctttgtctacatatcaggaggagccctcctggtgaggaatgtgcctcgttcttttgggggagctgacgaggtgcctgtagtgtggagggttaggggcaggggagtccctccagaaatgcacttaagcttgcagagtcaccctgccctgcattgttaagtggtataaggacagttagctccagaaacagcagtggctcctgtctctggagctctagcttcatgcctgacatggtgctgagcgctaacatgtggctctttgaagctgtcagtccgtatgtggagactgaggctcagagagggtaagtgactttcccggggtttcatagccgatcaccctgggggtggggttcaaacatcagtttgcacagtgccgcgatctcaggtcactgcaacctccacctcctggattcaagcgattctcctgcctcagccttccgagtagctggagtcacaagcgcacgcctccacgcccagctaattttttgtatttttagtagagatggggttttgccacattggccaggctggtctcgaactcctgacctcaaatgatccacttggcttggcttcccaaagtgctggcattacaggcgtgaaccaccgtgcccggcctcggcttcttactaggtggatgactgtgggtgtgtttcagctcctctctgggccttaatttccttgtcagtaagaggtgaccttgtgctcatgcataggagggggtcagcacatgcaaacttcccttctgtgcagggcagaggccatctctggaaggaagaagggggaaagtggccccttactcacctgtgtcaggtggtatcagagtaaacctccacagagtccagaggtacagagattcacgatcttagaggagtaacttttgaaaacctttgagccagaagaggcctttgcgtgtaagggtttgcagctcagagtggctggccttgcagggtcacacatgtagagctttgggctgacagcttcgcagcccagaagtacacctgtggcctccagggaacctctaggagtgtgaagaggcgagggtgtgttctgttctgggccatgattggtggaccccatcccggccaggatgagttatttttgttgatgggccctgtggtctctcctaaccttgctgggaatgtgacaggaaccaattctttggatttgggatgctctcctgggaaggatgggggagtgagtgggtgccccttccctgacgcagccatctgggacgtgggcagttctgtgagtgcttctgcatgtgcttcaggctgggaccccctggacagtgagacctatggagtgggccacatggctgcaaatctgtttccattgctgtgtgctccagtcctctcactctcaattaaccaacagatgtgatgagtcattggggtctcgtcagctaatgatctgagcagtaagtcgattgtatggctgattcctagagccacaggggtggatgggttctgacaggagcctcagtgctgagcgggttcggtaataaaggggatgtattggttcctgagtcagatccttggggcattctggcttcaggtgtaggtagactcaggcgacagtccaatagggcctggtctgtctgtctgtctgtctctctctctctctgtctctctctctctctctctccctcctctctccccccggccccctccctgcttccctggtctcttttacattggcttcattctcaggcccatgtggtgcaaggtgagtcctcaccctcaatccttattctcagccaggcactgtggcgttccttaggtgtgtgatctcatttgatccgcattaacagccctgggagggtggtggttttagcattcctgtttctcatagaagggctaagtaacttgcctggggtcacacagctggtaggggcagagctgggattcagagctggttgggttggctccagggtcccccatccctcatgctccaggtccacagggacagggattccttctgttggcctctgatttgtcatcctgggccacatacctgtctctgaaccagtctctggggctggggaatgcagcgcctcattcccttctacatggcctgagtgtgggcagggtggatccccaaaaggatgctgcaggggcactgtttcccagaggcaggggagggatgtttggcagctgaggtgggagtggacgtgctccctgtttctgggcttcagtggctggccagagtgaggctgggggctgctctccctcagcttccagctctggacccagcttgcaaagacttggacgggggcctgagggttcgcacacagagtccagggctaggacgttgttcccaagaagggagtggagagtacctacccccacaagtctgagccccaggctggcctaccctgtgctgggcacctctgcttggggttccagaattctcggaggcagctgggtgggagtgctggtgggaagctccggaagggaggctgctcggggcctccctgtggctgtggctgcatgggcagccccgaagcggcttcctggaccccaccttgtgcctcagttaaacctgaatctggcttattcccacggccagcccgacacaggcagattctgagagtcctggctgcgcccagcagccagctgggtgggtggacatactggagggctgatgtcctatttgtgggctggggtttttccgggccttgggaaatgctgcctgagttcctggagaaggatgacatctttcctgccccactgtcgctgtcgctgtgcagaaccttggtgttttgacactgatgtgttctggagctaaacaatctcgtgttatgtaaacacaattagcctgttgctgtttgaccctgtcctgcttggggagggttgagaaggtgtctttttgctggatcctgggaattctgagagcctggagcagctgtgaactagtggctgggggttgtcggagctggaggggagtgttggtctggggagggccactcctgtccaggacactccgctccgatatactaagccagaccctggccccccacagctgagcaggcctggtggaactgcggggaggacatgctggactatttccacccggaaggggagaggaaatgaacggtgagtggctggtggccacaaacccaggatgttccatatatcagggccccagttccgagggccccgggcaaaggggctgggctggaggttgggagaagtgcagggtgacaggccctggttagagtatgggtcccttatggttcctttctgaaacgagtggggcaggtgagggcaaggcctgctcagagccccttgccccgggcctgcttaactgctgtgggtgcctctgcttggtgttccagaattttcagaggcggctgcatgggagtgctggagggaagctcgggaagggaagccgttctgccctgccttggttgcggccgtgtggacagccctgaagtagcttcatgggcctttcggtgctgcacaaggtggcagaagctgggaccagcgctcagacccctgctttgccgctgagctgtgcggccctgcaccatggtctctatttgagggccctcagctcaaaggctctgggaaatgagtttgggacccattgcttctggtttagctggtggggctggtggacctgtcaggttggacaagcaattcttgtgccttagcctcccaagtagctggggttacaggcgcccaccaccacgcccggctaatttttgtgtgttttttttttttgagacggaatctcgctctgtcgcccaggttggagtgcggcagcgtgatctcggctcactacaagctccgcctcccgggttcacgccattctcctgcctcaaccttccgagtagctgggactacaggtgcccgccaccatgcccggctactttttttgtagttttagtagagacggggtttcactgtgttagccaggatggtctcgatctcctgacctcgtgatctgcctgtcttggcctcccaaagtgctgggattacaggcatgaaccaccgcacccggccattaatttttgcatttttagtagagacagggtttcaccatgttggtcaggctggtctcaaactcctgacctcaagtgatctgcctgccttggcctcccaaagtggtgggattatatgcatgagccacctggcccagcccacacttggctaattttcttttttttgagatggagttttgctcttgtcgcccaggctggagtgcattggcggcaatcttggctcactgcaacctctgcctcccaggttcaagtgattctcctgcctcagcctcctgagtagttgggattacaggcacctgccaccatgcctggctaatttttgtacttgtagtagagacagggtttcaccatgttggccaggctgttctctaacctctgacccaaagtgatccgcccaccttggccttccaaaatgctgggattacaggcatgaatcactgtgcctggccgatttttcccattttcttgctgttgtaggtacagctgcattgggcatctttgtgaatataaatgtcttccttccctttctgattccgttacgtgtaggtaaaagtttttatcagttattgatgcataacaacccatcctaaaaactactggctttaagcaataagcattttttcatcccacagttctgtgggctttgctgcgtagctctggtcttgctaggaatcccttgcgtgtgtgtggtcagcttgcagtctggtaaggggtctctgccctggggcttgacctttggctaaccgaaggcgctgggcatgacctggcctccttcttggctttcctcaggctgctgggcttgttcctgacactaacagtggatgtttccaaggcctctggaggcccgtttgtgtctctacagtttgttggccaaaacaagacccaaggccagctaacattcaaggggtaagaaaataaactttaccccttggcggaggtgtcaaagtcattgcaaagggcctggatacagggagggtcaagccctgggaacatgtctgcacacagagtgtgtgatccgggtctgcgcgttggccggcagcccatagacctttcccaaattagtacctggcaggtgcccagctggtgctgggctgggtatggggaggggcggagaagtcgggttcataaggaacaactgtcatcattcagaaagcttttcgaagtgtccgctgtgtgcccagctctaccgacccaggtattgtcagtcctggttcttcaggaacttggcttttgcttacagagggaaggctctgtgggtgactgaccaagggactcggtgacgtcagtgtcctgtgtggtggtgggaagttttgttcctggattggggcctggtgttatctttgtggcaatcccccacctccatgatgaagttcatttttctcagctggaagaggaggttagaacattggagcccctacattctagaacattcgagcccctacattcttgaacattccaactgggagagcccttgggattttcagtggggaaaccagcggtgaatctgcagccaggactagctcctgcgctctctccttctccttgtgctgctgggtgcctgtgttgtttccagattgcatccagacccaggatttcctgttgttgttcttcgtgtgtgtttcttcattagaacaactcctgcatcctctgcagagctgtttacaggcatctattggcctccctccgtgccaggcctcgtggtgcatgtggccaagtgatggccaagatggacaaggtcttgtcatttggagctttagtctgtgagggctatagggagggtacagacatgtcaaccagtgagttacagggatgattttatctgggatcggaaaatgaagtgatgacagtgatatgaaggggtctggggactgtcctcacatagtcagagaagacctttcccaaggagagagctgtggctgctgctgacaggtcagaaaggagtcagtcgcagaaagctggggctgcggcatctcaggcaggggaagcgggtttagcaagtgcagaggccccaggggcacaggagggagccggagcttggtgtgttggtgagctgtggttggaggacgtggccggggcaaggcctgggaggacagggccgtgaggaagcaggcagggccaggtttctcagcgctttccaggccccagcatgcagtttgagattattttacaggaggtagaaggcaaaggctctcatcaaattaccccacaacatagtccgtgaaatactactcagccatgaaaaagaacacaaccccatcctttgcagcaacatggatgcagctggaggccattatcctaagcaaattaacgcaggaacagaaaaccaaatgtttcatgttcttacttatagatgggaactaaaccttgggtatatatggacacaaagatgggaagagtcaacactggggactactagagggggaaatgggagaggggggcaagggctgaaaaactacccattgggtactatgctcagtacctgggtgatgagatcattcatactccaaacctcagtgtcacacattatacttgtaacaaacctgcacatgtacccctgaatctaagataaaagttgaatttattaaaaaaaaaaaaaaaaaacctagtccgtgactctaggtgacccttttaaaagctttgggtggtgctgataagtgtgactgtgtcctggagcggcttcattacttcccatccctccagctgcctgccacagggcccagaagctggctttggaattggagggactgggtcaaacttgcttctgctcctgtctagcaagttagcgagcttctctgagcctgtttctttgtctgtaggataaaaaaagcacttcttaacttctgtggttggtgtgtcagttgaaataattattaatggtataaagttccatagttcactgcctgctagatttatttacaattactacaaataactcatcgtaggccccaatcagcggtagatggtattactgtggtggtggtggtggtatgtaggtggtgctgtggtctgggtttcagacaccatgcggggtgctggagcaccgagttcctcctgcaccccgggagcccagttggtgcggagacagagacaggaggtgaagtgttagatgaactctgctcgaggaacagagcaagtttctctatctgggaagatggaagaaagctttccacaggtggtgacccttgagaggtatgtttgagggcgcagggagctcgctcacggacaggtatggatggaaggtagtggagaaagcgggcaagcctgtgccaaggcgtgacgctgtggagccaggagtccttcaacacggactctgggcatgtagggccggtgcagatgggtggctgtggggagcccctggaagcctgggctgagagcctctaggaagcagtgggctggctgtgggaggaacacccctgcctctccctgtgcctgcagtgggtcccgtccccacgctgtgactgccaggtgtggacacatgctcgtcaagtggtgaagaacgtggagccggtgggctcaccggcttggggcctggctgcctcactgggaagcttggtggccctgggaggtcattgagtgtccctaagcttccgccagggagatgatcgtagggctggtgtgaggggagatgaggagtctgtgtctagcacccagcacagggcatgcactgataaaatgatggcttcacccggctcccaggggccacgtccagctgacagctccttggtgacttagctgtatgggtggtgtgcagctggcactgcttgctggtctgggggagacatcctaggctggcctgtggaggacgttccctctcagcctcctctgagccatgggcataggtgagttttcagaaaagcccataccgacggtgattcagctctgcttcttgcttccttctgtcttattcttaagtcacccacagggcagccacctgccagtgtctgtcctccaatcccctgctccaaggaactgctctaggcagggaagagagaggaggaggaggccccgcatatcctcgggtagaacggaggaggaaactgaggctcctcacagaggttaactaacctctgctagaccacccaggtgtaagagctgggatgcccccagaccctcccttctcccgggagcggtggagccgaggcggtgggggcctggctggagcgccccaggagctgagagaagtttagtccacctggagcttggcaatcggggtgaggatccctttgaggccgggttgcacaggatcctataagccatcattgtacacgcttgggctttgccctgaaggctgggggagccatagcagttgtgtgaggttggctgctgggtggaagccaggggcttgtgggattggagggggaggctgctgcgattgtccaggcagtggtggtctagatcgtgcagtggtggtggatatcaactcttcagagtccatccaggtctgaggactcattagcaacctcggctattcctcgactactcaggatgttgtctgtatggggccggtggcctcagcactcctggttcctcagcatcgccacgccctctgtatccacggactcagaatctgtgttttaacaagacccccaagaggtgccagtacacacggcacattcatgtttgcaaacactggtttagggaacctgttgacctcagcgcagggctgaggggggaagaaaggactgaggtcaaggcctgacttcatgaggaaggggaggttggggagcgggggaagaggagatgatgtcggagcactcagacttctgactgggaggagggctacatcaccccacgccaggggcggcttgaggactagtgcagttataacacaaagggccgaaacggcctggccgctggggcagggcagagagctgggctccacagggcagcctgcacaccccatctctgcccttggaggccctagaaccctgtggaccctgtcctttgtcctttctgccgtgtccatgtaggtgtgggtcgtgtctgccccacaggttgggtatttgccgttgtgctgtcagcagatgggtgttgagcccatgcaggcctggacttggtcacagaacggcatcctgcttgttgagtagccatcctggtcatgaggggtcatgtggtaatgagtgtatggagagctgggggcgtcattgtgaagaccaagtgaagcagcagtcggatctgggacagaggttcctctagggaaagactattatggtctggggcaccctggaggcacgcgccgtggctggagggtgggtgagtctgtggctggtgggttcggctgaggcaggggagtgcgctcttcagcccagccccctggcctgggccctgccgtgctggagtctcctggtgcctggaggctgagtcgaatgcagtggggctgggcagagggtgccctggctgtcgtggggtggaagcttggctgacccagtggacatcagccaggaccacattaggcccagctttggctgggttccccacagctgtgcccaacggcatccctggcctccacctactggatgccagtactactctcgtcttccaagaatgtctgcaggtacttccagatgtcctctgggtggggggtaaaattgctccgttgagggccagtgctggctgagggttcttcatcattcccttctggtcccagcctggctgcactgccacctggcgagctctgtttccaggcagtgggtcaggcctgctttgggggctggcatgctgtcctccctcacccatgtcaaggcccgtgtagccatgtgctgacatgtgcttgatgtgacctgggagtcagagcgcctggcttcctgctccaggcttccgtggtgccgtaaggacctcaggtctgggggtcaggaggcctggatggaaaatcctggcactctggtccttgtaggggaccctgagcctcgattttgcatctttggcgtggggctgtggtagcctttccatgggtgctggtggaggctgcgaatgccagtgtgcccaccctccccatgctgggcttagcgtgggtgcctggtgacagtgtgttaatctccccttgacttctctgtgacctcagataagtccctctcagttctgggccttgcttataaaagggttcttgggctctcttctgtgtaaaaagtggggaatgaggtggagagcctgggggacaggggagtcatggggttggacaccgtgccagagcctgtggtgctttaaaatcaaggctcaaacccagggtcctgaagagggccgagcagcagctgaggtccgagtgcacccggcctgccagtgctgcccaggagtggcgcctcccgtcatccctcacgcccagcaaggacccagtgtgacaagagcatggagtctggacctggcagagctaggtttgcctccttgctcttctatgactagctgcatggctcctggagcctgtctgagcttcaggtgccacacctgaagactgaggttaaatgggaggcggggaggagctggtgacactgactggatgccactatgtgccagcctcattcattccaccctctggcagtgtcctgagttacatgcccagccaccgtgctattttccaggccggaaaaccgaggtgtagagcccagcactcggcgtaggaggcacacagcaagtgaagccatccttgttgacatgagctggttgctcttggcatttgagtctgaatatcaaaggccctgaagattaaaaagagagaatgaagaatgatgtgcctggtgccttcttgggaagagcccgaggccagctgtggaggggagcaagactggttctgggctgggcttcctggcctggtgctttcctgggcagctggaagtgcttctgtgggagctgtctggccctggcgccgttgttggcttcattattttttgcctgcaggggcctgagtattctgtactgacgggaaaacatttgttgggctgacgctgtaatcacaccacaagggacacttgaaattatatctgtatttgggaagctaattttaaagaactttttctcttcataattatatgcaatcagccagctagtgttattggggattctctttttccctcttcagctgagaggccatctgccttcctcttcctgcctttccttccagcacacggtgagccatctccctgggagagggaccactggcccttggctgcctgcaagccccagggaaacctttccatggtgattgcggaggaagggatgaggaggaagagcaggggaggatgatgggggcctctggcttggctacaggatgagtccgttttcaagactggaggcgcaggttggtgatggaaatgatggagtgtagcgtttcgatttggacattgaagcagccagggctcttgtgaatgcaagtggcagaaaatccaattcagatgagtttaagcaaaaagaaaaaaaaaatacatttcttggcccaggtaaccaaactggcacaggaatagtcttatccctcaggtccccagacattcctcctgtccctggagttttattcctcatcaggaggaatttagttccagaaaacgctggccaaaaaaagaaaagaaaagcccccgttgcccaccccctgcaaatggggctcattcctctctatcttgagctctgatcctgacaagtagggtttctccaggatggtggctagcacaccagtcagggatacgggctggacatttagggttggcacgaagtggactctgtggattgtccttcacacgggaggcattcaggtcaggagaatataccatgtgctggcccttcaggtctcgatctgaccaccctttccaacaccctgggttcctctgtgtccttcctcttggaccgccctctgagaggatggtgcgaggaagaggcttccgtgttgtgcatggtaggcagggatgggggcgttccaggggcggacagcatgggcaggtggtcagaagtgtgaaagaaccgacctgtggggcacggcaggaagcccggtgtgctaggaacagatggggcgagacttgctgggtgaggaggtgtgcacctgctgcagaggcccaagtggtgggggtgagggaagcccagggggtgagtctgggcaggggctggggggtgatgagccatgtttcagatgcagaaggtgcagagtgtgtgtgcagggacagcagggagaccgcctggtggcctgcaccgcagagctgtgtgtctcagggagtgggaagccctgcctgtgctggcctcagttcttccgctcttctggaattctgcatccttcttttgacatttctctctaatgcccagggtcctggctcttggctttggcttggtggcagctgtgaccccctgcatggggctctgagggattattccagctgtttggggactgtagccatggctcccagctgcagagcctgacaggcctggaggccggcaggaagaagatgggggctgtgcccgcctgccgagagctggctctgagactgactcttggcactggggtcctctgaggccccaggctcattctcacctcctccagagacccagctgacataccattctcatgagctgcagtcctgtgacccagctgatttctgtctcattggtggaaccctttagaggtggggtagggctcctaaaacattagccctactgccttccccacagattggcctctcttccctgcctgtgggcatctggcatctgcttgaatccttcttgtcacggggtgctcatcacctcttgactgccttcctatggaagccagcaacctcttcctatggttgagctgaaatctacttcataggaagggttccttctgcctggaaggtttgatattggacaggactgtcaaccgtgtggagaggggaggaacagggtgctggctcccccggcttctgggctggattgacccagggcgtgtctaccccacagcatcctgacatgccagaggctggaccttaggaagtgccttccgggcccttcactgcaggcctgctcaggggctgctcctcaggtcttggggcccctggggcaatggcatccatccttttggcctcctggggtcaaggttctgagggaggattagggcagcaggtggttgggtggagaggcagctctgtccagaacaaccctgttccagaaatcccagagcctcatccccaacagacccggtgggccccccaccatcacacaggtcccctttctccccaggaagtcacacagtgctgtgggatgaggagggtttcctgacagatttggggagagcgggcctgggtggggagtaagggagcctgggaattactggtatttggatgggtttagattgtggttctgcttcttacctgctgtgagtctttggtcaggatactgaactgctctgaatttccccacttgaaaagaggtgacaggccaggcgcggtggctcacatctgtaatcccagcactctgggaggccaaggcgggaggattgcttgagcctgggagtttgagaccagcaacctactgggcaacatagtgagaccctgtctctacaaaaaataaaaaaagaggcctggtgcagaggctcatgcctgtaatcctagcactttggggggccaaggcaggcagatcacttgatgttgggagttcgagaccagcctggtcaccatggcaaaaccccgtctctcctaaaaacacaaaaattaacagagtatggtggcgcacgactgtagtcccagctacttgggtggccaagtagctcctgcttgaacgcgggagaattgcttgaacccaggaggtcaaggctgcaatgagccgaaatcgtgtcactgcactctagcctgggtgacagagggagaccctgtctcaaaaaaaaaaaaaaaacaaaacaaaaccaaaaaagaaaagatgcaaccattgtacccacccagtggttgctgagatccagtgtgagggggacgaagtgcctggcactcacaaatcctgccccgccactgcctcgtctgtccctgtttctgcctgggacagggagagcaggcctgggtggggaacgagagagctcggggattactggtgttagcctctcatttatttgggtcgtgctcaggcccctggaatcctctctgaaactggagagtctctcgggtagccgatgaagcgctgcctgttttagggtcaggtgcctgggcacctctgatggacctcaggatgagcccaagtgtcagtaattatcacccagctccccggtttgcagccaaggcttccaggcctggagcctttggtctccagcacccagttcccccacatcccttccctgggcttctttcccgccattcccatcagggacccctgcggccatgctgggctgtacccagtgccccttgggaatctgcgggtaccgtgcaaagctgtgctgtgctcctccccatcaactcctcattgactgttgaaggcccctacaaactcctgacaggtcctcattcattcctgcctgacacatgaatgcttccaggcgatgtctgagaatcctgggatggcagagctgtgggagccttggggttgtggtgggcaaagtaaggcccctgccactccccaccaaagacagcaggttctaatcctcagagcctgtgagtgtgctgccttacatggtaaaagggtatgacatgactacagatgggatttttaaatttttatttttcagagatgggggtctcactgtgtcacccaggctggagtgcagtggctattcacaggtctgatcataacgcactgcagcatcaaactcacggcctcaagtgatcctctcgccttagcctcccaagtagctgggattataggcatgtgccactgctcttggcttacagatgtgaaggagtgaggcatcttgaaatagaaaatgttcctgcattacctgggtgggcctggtgtaattacaaggaggcaggagggccagaggagatgtgacagtggaagcagaggttggggtgttgtggccacaagccaaggaatgtggacagcctttagaactagagaaagcggaggaatcgatttctccctggagcctccaaaaggaagcctgcctctgacctcagaaccctaagagaataatacatttgtgttgtttttagccactactgttgtgatttgttacagcagcaatgggaagtgaatacagttttctcctaccctgctcttcttagggcttgtgggtgaatctgtgactgagaagggagggactgggtcagggtcaaggtcaaggccagagcccatgtgacccgacaccttgggactttcctttgacctgccatcccgaaaatatctgaggggccagggagatactccagtaaggtgccttgtggtttaagttttctgagatggggtcagggctgactcatgcctgtggctggggggccccaggaaaccccagtgcccatgacctggtctttgcctttgcttctcctggtgcttagcaggccttctctagcgtgccctggcagcctccctctccctcccctccagggcctggctcacacagcagctctactgaaacttccctgtgcctcctgctgtcccccaggtgtttgtgctatttaagggcctgtggcacacccgccagagggcatggcatgtagcccactggtctgccctgtggcagctagcatctcggggcagggtttgcggtctggggtccccctctggtcccaggccagcccagtgcgtgacagagaagcccagcaaatgtttgaccaaaatcagaccaggaaactctcgctgcctgtggttggaggtgcagcagcagggcaaagacaactaaactttaagggcttgggatccagggaccaggagctgcccccagccctcaggccaggtaaggagtgttggcagcagaatttgggtgaagtctttcggtctcctctggaacacagcctttcaaagagtgtcagcatccaggacacaggctggggacacacacacttatgctgctattttaggagtgtggggtaccttgaggataggtgctagaacaattcaggctttcctgagcaggcttctccctcccccagtgagtccaagggagggaaatgtcacgggaatttctgcctcccttcctgcagtagcctaccttgctcattaggctgatactaaatgactttgcattcttgggattaagaagctgctgtgaagagaaccaactgaatcattagccctgaggctggctggctgacggaggagggggagtgggggtagcggggaggggaggaggtgctagaaccaagcctgccagcaccccccactacctccctctcccagcagccaactcccctgcttcccacaatttaggtcccatccctaattaggggaaagaaaaattaccgcacctgcaaggggatagtaaaagactcaaaaacaatttcaagtcgagaatttccacactaaaaagcggggatgtcgagagccattaagggaatagatttaacgtttgtgatcagcaagaagtcaggatgattcctgatctgaagtggtggccccttggatgtggcagaacactgccttgcgtgatctcctgccctcgcctcacttcctccttcctgaaaattgaactgaggaggggagtctcaaaggcacctcagttcctgtgctgctttcagcccctgcagctctgatgacctctccgggaggtgccaaaggtgggtcacccactctgtctctctcttgtgcctgttcactgggaaaagctgcttccaggcacccctggaagctgttctgggtctgagggagtgtactgactcaggctgctgtgcctgcactgaggggcgcccggactttggggccggcctgcctcccctgggtggggcacccggtcggggggagggtcttcaggtaaggtggttggtgactccccagtcaaaggaaagatgcccccactcaataaaaaagacacatggcagcttccagtttatctggttcttccctagagctgtccagacaattcaaatgtttgtactggctttaaaattctgttcgtatgttgtctttatatcgggccatttcagtttctggcactgttaataggaggaaaatccaaattaccaaacaatcagcaagtaaaccaagatgccgcagggcaggcgggcaggggtgacacggggctggagcctggcccaggaacccggcagcactcggggagtgtttgcagagagcctgccaggcccagggtctgcagggggcacagggatgctgaaataaagagccatctttggcctcgaggggctcatggtctgatgctgagcatggagcaggcttcagtggaagccattattcctgcctcttgatgaggaaggcacttgagctgctcttggtgggtgggcaggagtttgccagctgaggaagggtgcctggcagggggatcagtttgtgcaaaggcagacttaggtcaagccttggcatttggagattggggtccctcctgggagggtttgagaggctgctgctgcctccccctcgtgtcttctgagctgcacctccaaatgcccatgtggcaggtgttttgctaagaatttggggctgtggacacagggcacaagctgtgtccctgaaagagtgcttgttagtcaggataggccaggttaggctgcagtgacaagtagtgtcgaaaggctggcggaaataggtttactcacaactcattcagcatgcactctggatccagagactctcgggggctgtggtctgccctgcagtggctcagtgtgtatcccacttcttaagttcagcactgtggaccttttgtgctggataattctttgttttagggggctgtcctctgcattacaggggccctttcctcactggattctagtagcactttcctcggtgtgacaatcaaaaagctcttcaggtgttgctaaatctccttgtgggggacacacagttgcccatagttgggaaccagcgctagctggaggtcctcttcatcagttgtttctttctggttcccagcctggcttcgtcgccactcagcccgcgttgtttccaggtggcgggtctggctggctctgctggtgggtggcagcctcatgtgcttccttgtttctgaggtcagggaggcctcggtgctggcagtggaatgctttttccaggaggggacatggtcacctctgttcacatctcattgcccaaggcaagtcctgtggccatgcctgactgggggcagggacaacacagtggcactgagtgtccaggagggaaattgccggctttgatggccaccattgatgttcaccaccgagcattagcctggtggggtcagtgcaatggagtccagcagcctttctctctgcccagtgctgggtgtgggcagcttggggcagtggggcctgaggagggtgggagccaaggcaggtttctccagaggagctgacctggggggtcaggtggtgatgtggggatggcatttgaggaagggaacagtgtggccatcaacacacatgggtgacggggcttagtcatctgtttaggagccccaagtcctggggagacatcctgggcttctgtggggtacggtgtgggccctgccctctgcaggcagggaaaggggaccataacttggggctttttccccagtgcctggtacctggaggtgccaaagggtcttgttatttggggtgcctgaaatcagtagttactgaactgtgccacacgttgcttggatgaggatgtgcctggcttcccacttccccgagttgttctccgtagaaccttcctcccttgcttcttcaccatttcatgtacttcacttgctgcagcgctcaggtccccaccctgccctggggagggcctcttgggtgggaaaggtcatatccttttaacggatatgaaagctgagaccccgagcggctcagcagcacatcccatgcctgctgctggtcatggtccctgagccttttgtgccctgctgtgctgtgtggcaggcctgctgctggatggggtctgtcatcccagagtgtcttgtgttaacctcctgacgccacacctggtactgtgctgcagtggcttggtggtggcgtggatgccgtggacgtgtctctgctcctcatcactcttttctacttctgccctgatcatctttattgttttcccttatcatcccctctccctcagtgctgggtcatccagagtaattttcatcatcttcagaagtggtaaccactgtcactcacagggtccctgctgctcagcggccagcgacagaaagctttagctggcttgagcagaaatctgcagctgaaggtctagagaggacgagccccactgcggccgggtctggccggggaatttgccctcctggagccctcttggccctttctcctggttggcctctggctcatctggattctcgccacatagaagcaatggtgtcctccagcatttccaggcagtgccatttgtactgcagacagtcccccaggacccgtccggtaaaggaccaggaccggcttggcttgggtcctgctcccatgctgctgctaagtgaggtgacaggtcatgtgcccacccctggagtgggcgtgccgcccccagtcatgtggactggaggaggcagttctggaagggtaggaaggcagggtggcagggcagagtgcaggtcacaagacccccatccctggcatgagccaggtactgtgccaggcctggactctgtttcccttaaagcccgtgtgggatgagttctaggattctcccattttacagataagaaaacagaggcacaaggtacaggggggtctggttccatgttctgctctcaggggctcacccacctcttccgctcctgcctacgcccccgaattgtgttcatctaagcctctgaatgctgcgaagctcagtcctgggcttctaaccacttcctggcaccaccacggttgaaaagtggactgctgctgccttcttgcagtgttctctcgtctcctgggcctggcgcagggcctcagtctgctccttccagactgtgagcgtcacaactatttctggttcttaggtttcctttacccttttcccaagacctgcaagggctgccccccaccccacccctgctatgtcctcccctagcaaatcagatcctgcttccactggtcacagagaagcacatggagtcgctcttgtggacaagcagctgtccccatacccagctgctcctgagcaacacccggagtgcgatgaaccctgaatccttcccaggccctgccctaggcctcctggatcagaggcctcagggtgggcctcgaatgaggatttttgacacgctccagtggtggttctcaggttatctgccctggcatttgggacccactggcccataggtaaaggctgggccacagggtgacatcctgggcctctgaggcgtgccccacctttatcctctgtcctgcgtctcagcccccgccccctgagagggctttaagcttccagagccccagacaccctttggggagggcgcaggactcaccttactcctctctaagtactcttctcagcaccggtctgtagttacccttcagttgctctgccagatggcaaatgctgcctcctctttgaagccttcctttattgccagcctcctcctctgaaaggatcgaatcattttgtgagtattttcacttcctgaagggttcgtgctccttggacttctggggacaggcttccctgtgcaaagcggatcatccctttgttaataatccagcttttggaaaagcatgtttatacttagctattcctattttattaatattcatattaatatattgtatttatatattagtgtaatatttatcaatacaatgacagtttagagcctgtaaaattattcgcaggtgcaggttttgtgttttttttgagacggcatctcgctctgttgcccaggctggagtgcagtggcacgatcttggctcactgcaacccccgcctcctgggttaaagcaattctcctgcctcagcctcccaagtagctgggattacaggcacctgctgttatgcccagctaatttttatattcttatagagacgaggttttaccatgttggccaggctggtctcgaactcctgacctcaggtgatttgggaggcccacctcggcctcccaaagtgctgggattacaggcgtgagccaccatgcccggctgcaggtttttaatgaaacttaaaaattattaaattgtaggctgggtgcagtggctcagcctgtaatcccagcacttttgaggtcaggagttcaagaccagcctggccaacatggtgaaaccttgtctctactaaaaatacaaaaattggctggcatcatggcaaatgcctgtagtcccagctactcgggaggccgaagcaggagaattgcttgaacccaggaggcggaggttgcagtgagctgagatcatgccactgtactccagcctgggcgatagagccagactctgtctcaaaaaaaaaaaatgtaacttttattgttactttccctatagttttgagggtagcgtatatgttcattgtagaaaatctggaaaacacagggaagtatgaaggaaaaaccacagccccgtggccacagttaacactgcagcacacgcacctcagtctgttttccaggtatcggaatgtttccacgggcttagaacccatagcgagtgctgcagcctggtggtccccactgcaggcatcatttcagctcctctttgggacagcacttggaagcttttcatgatacatcctgagctctgctgtcttgtgtcctccattgatcgattgcttcgtgcttttatcaagcatctatttaagaaacaattaaaaaatatattttccagtttttgataacatgttataggcacatggcacaacattgaagcaatgtatgaggggacacagtgaaaaggaagtccctcggccaccccagctgcccttgcccttgaccaggggccctgccatgattgttttcctgtagcgccctcaggttcactctgtgtgtacacaagcacacatgcttgtcctggatgttgttcttaacacagataattatctacagcacacagggttttgcatcttacctgtttcacacagcaacgtcttggagataattcctcgtgggtgcatggaggccttctgtgttcttttttactgctgcatactattcctttgactgtgtgtggtttgttaatgtcccctcttgggggaagtttaatttgctgctagtgttttgctatcacatacagtttggtaattaacagggcagagccggaaacatattgcacacttgagcctgtctgtggggtgatgaggtgggatcatggagccagggttttcaggaggaacagtcacttgacaaccaatgctctgatttgtgttccctcctcctgtctcccatgtcccttccttctccctcttcccctttggcttcatcattcaatttctgaactttctggttatggcaggactttaggaacttgcttcttggggaatcgaggttgttggtgcctttgctctgcacgagtttcccagtgaaaaatgagccccgacaggttgttttattttcccgagaggctgtggtggtgcatgtgggattccaccaccagaggggatgcagttttccgctgccacctcctggtccttccattgcactgaggccctggaggctggagaccaggccttccagcttggtgccacccttgcccacggtggtgcacctggtggtgaacacgtgggtgtggggagagccctgttccgggccagctcctgcacttcctgagtctcccaggcctcggcctgctctgcaggtaatggggtaaccactgtcccaccctcatgaggctgcagaaggtattggtgagtggtgagcttcaaggggtgtgtagcatacgtgggtggccccctcttttctgccactgttgcaacttatcctttttttggagctctgagcgacagaggaactgctgtggctcctgggagatcaaccccacttaagattgcagccgatcttttctctagattacttttttgttgctttcttattttatgtgttccatctgttttcagtgagagactgtttttttaggactaagggagggagagctgcctgggatgatgtaaaatgtggactgattggaattgacctcagtaaagagaggagagtcacacgctgggataacccagatgccagcagggttgactcagagggaaaccgaggccctggcccagagcccagtggaagtctgcgctcctctgtcaccggcctttcccattgtgcggttcacagtctcggtgatttgggacttgagttttctgtcctggagcagggccgctggagtttgggctggctcctcaaggtcctctgctgtgtgtcctgggtcaggttcccgtcagtgacgcttccttcagttttctcgtccctgcggggggaggggcaggatgattgggaatgaggcaggggctgaggtgtccacaggtgctcagaaacggtgcaggttgtgagcgggtggttgggtgtagcacaggttcctcatgatgctatctgtcactgtgctgtgggctgtggtggcccagggctatgctgttgtgtatctcccctgtccctcatgaaaccgtggaagcagatggatattggccaccattcctacaggaactgcagacaagctaagagacactgagggtccctgaatgcctcaaccagggtggttctcaaactggattcctcggggcccaggtttctgttgaggtgtcgggggtttgagggaaggtgggctgggtgcttcccacagtgggacctggtcagctctccttggcctctgtcttcctgtctcatggagtggctcctttgtgaggttccgctcagtgccttgctatcagaaggtgttgaggaagccctcactgaatgagctgacaaacagatgtaggaattggtgggcggcgcctcagctgtgccatgaaacaagggagcaagggtgcccaaaggttcctgtggggcttgtgcccatctcctccctaagaccttgagcctctcaagggcccagactgtggaggttgcatttgttgtaccctccgagtgctgggcccaggagctgagctaaattgttacacatttacaccttcatctgccagcagccgttgaggagtgtctgtgtgccaggtgggcatcataattgggcacgggcacacatagctttaaagtttggcatagtccctgctccaaggagcttgggtgagtaaaccacacattcctgaccttgcctggctgcagccatctttgagcatctgctggaggcctttcttcccagcacaatgtgcacagtatgctgtcttgggtgcctcggtccctgcaggtcctggtggccctacaccagtgcttgtccctggctcgtagcaatcaataccccagaacaaagggccgagacagtggtagccttaagttcttccaggttaggaggcgtcctggagaggctatgctgagccgaatcctcaaggctggggtgggaggtgggcaccagggccagggaggagaaagccctgtgtgccagagctgcacaggtgggcacttcctgggcccacagtaagaaatgtgggatgggggaggctggacgtggtggctcgcgcctgtaatcccagcactttgggaggctgaggcaggcggatcacctgaggtcaggagtttgagaccagcctggccaacatggtgaaaccccatctctactaaaaatacaaaaattagccgggcgtggtggtgggtgcctgtagtcccagctacttgggaggctgaggcaggagaatcgcttgaacccgggaggcggaggttgtagtgagctgagatcgtaacattccactccagcctaggcaacagagtgagactctgtctcaaaaaaaaagaaatgggtcaggaagagaagggtaggagtcaacagaaagcctttgtgtgttctgggcaaaccccgacccaggccatgaggctcctaaaattgggtggcaagagtcaggttacgtggtggccgtgggactgcatgtgagcggggaagatgtagaggacatgagtgcagcttggaggctgttggcgaggccagggcaggcatcagtggagcattgggaaggcagcgggcaggactgtgtgggcctcccgtgtgtggcagtggatgggttggggcatgactggctgtggcaggtcctggggcgagacctgatggggaggacatggggacctatgggggttgagctcggcagggacggcaggtggtgaggatggtggtgaacttggtggcaggggccttgggacgacccaggctggagctcggctgacagaggcccggcccaggagtggagggaggtggctggcgtggggcctccagaggactccagcaagtccctctgcagagccagccctctcagtgggaaggtggtttgaggagtggctgggagtggaaggcatggctgttctgggacagtagcaggagaggcgcagctgccggctccctcctgaaaccctctcatggtcctgccctcagccggctgtcgggaaccttcggaaaggacgtgtccagcctgctggagtaacgcttgttttctttgtttttctccacaggaagcgagggatggaggttgtgcaggtgagtacagaccgcgtccccgtggttctttgggtagtggggcccttggtgcccacctctctgtctctccttctctcctccagcattgggcacggctttctctcttcttcacgtgcagcttgtttttagctcccctgtggatttgatgtggtttctgccctggcctgggcagactccgacaggggcttctcgggtttggagggttgctgtggctttgtcagtggggagagggttggtttgggagtcctgaggggggtgtgcatggcagtggtcaggttagggtgggtgtgggaagggtgagggggcagtaggcacccagctagatgtccagttgtcttgtgctctgtgtagcctcaccctgggtggacttggttcaggtgctcattaactagaaaaagaaggatggatggaagaagaaggaagaatggatggagggggaaggaaggatcttggagggaggggaaaggtggacagatggagggagaaggaaggatggagggagaaggaaggatggatggaggggaggaaggatagaaggatggatggagagaagagggaaggatggatggagggggaagaaggaaacatcaaaatactctcagactctatgtgaggggcaggctgtgttatttgcactaaaggctgtacctggcacctaatgggtacttggtaaacctgatggtggcctggccatgtcctctgttccccacgctgtccccgtggagggtgactgtggtctgtgcagctgggctggcatcccatctccttgtcttacgggcctcatctgcctgtagctgcagagaggggaactcaagctggggactagatcagggcagtggaggtgctggcccctgctagaatatctaaggggctttcaaaaagcccactggggagctcttccagcccacccctgttaacttcagctccaggccttccctcagcggtcataggagagcagcgtccccattcctgcaggttcagcattgcaggccccaggtttcccctgctcctgggaccagactggggctggttgacgggtggggctggtaaaggatcctcctgacctccctcctggtagtttgtgggttgaacttgtcactggaagactgagatttgttttggggtaaggaggtagtttctggaagcctctcagcagctctaggtttttgtccaggctcttcttggctctggagaattgcatgttctgcactagatttttcttttttctcttcctttttttttttttttttttttttttttttttttttgagaaggagtctcgctctggagtggaggctggaatgcagtggagctatctcagctcactgcaacctctgcctcctgggttcaagtgattctcgtgcctcagcctcctgagtagctgggattagaggcgtgtgccaccacacccagctggtttttgtgtttttagtagagatggggtttcaccatgttcctcaggctgatcttgaactcccgacctcaggtgatccacccacctcggccttccaaaagtgctgggattacaggtgtgagccaccgcgcccaacctgcattgaatttttctgtgggctttaatttctccatcatcaagtgggggatactggaattcaggaatggcttaggggtgtgtgttcagggaccatttctgtttgattggttttggcagcctggaggatcctaaatctgtgagtgggtgggaacaggggttgatctgtagtgcctgccaggggtacaggcgtggaaagaggaggtgtggttattcatctcatcacggggttagatggtctctaaccattgcacctctaggatgcggtggcttctatttcccttttagccctctatgatggttcactgggaaatccacggatcctttacagatgctgctttacccacaataagcctgagactgacagctggggctcactgtgctcaggaaggccccgggttgccctgtggttccgcccagccacttgggagggtccatgggggaactgctgtgggagccattttcagaggaagtgagttcaggcgctccccagcaaacacactgcctgagagggcaagacagccttcccccatgcctgatcctgtccatacgcgacctcaaactgtcacacagtgggtgtcacccccaccgctcgaggagaggatgagagatggacaggggtcggcgggtttcatttatgtggcattctgggaagatttagactaaaatctttaatccgctcggtctgtgggaggaacaggagactggagccattgtgtcagaatgtccggggcagaagaagcattgcgaaatctttctagacatgtatgctgttcatttaggtggtggcttgggggaggaagtggtggctggggaccagaacgaagccaaactggacactttacacttcagcatctaaaaataaaacctaccacgatacctctctgttcacctcctcctggcatccctgcatttggagaacttttagattttaagacattgagaaagactctgcaaaaacaggaagccaagccacttggctggcttttcaaaatcagctgggcttctgtgcgcaggatctccaggctgctgggccctgggagctgggggtgtttgcagtcctctgggttcaggtgctggtgactgaagaggacacacgtccccttgctgccagccgtcttcctgtgtttcctgtgtctggtccctgaggggcgtctcccgttctgtgcagccacccagggatgatgtggtgttaagtacccttttgaggtggggaaactgaggctcagaatgctgtgctttctcttggggatttcagctggccgtggtggagttgggatttgagtgcaggtctgtctgtctcaaaagcctgtggcccatggttttctgctgaacggtctcctctgcatgttcataggttctccatttactaaatgcttctgttcctcttattacctggactttggctgctatctaaaaaaaaggatgttggggccaagggtcaggactcaagactgcaaaacgctggtgaccggaggtcggttggtcatgggagttgtttctcttcctgttatttaatggcaacagtaacagtccttttattgaggactccagtgtaccaggcatcatgggtttactttaaggaagcatttgtgtgtaaccttcccgaggtgggtgtgggagcatatttaagaaagtggattttgcagatctcagtgtcctcaggtgcctgtgctggaggctgaggagctcgggagcccttcttccctgccacccctgtgcctcttcacctcgttcctcctcccacctctgcagaggattgtgcactctgtgaggcgcagggccgcctggggtcaggttcctgtctgtgtgaccttgggccagttgcttaacgacgctgtgtctttctgctcatctgtaaaatggggataatcatggtgctggtcccctggcaccattgtgaggactgagttactttgggtgaagtaattggcactgggcctggcacactggaagctggctgtctgcaggagaactgtacactatccacaggcagacctgaccgagtgtgagacctcagggcataaaaccctcctggtggtcaagtacagtggccagtcattgtcatcctggggccagggaggtatttccagttccctgcttgcagcaaaattcaaagagtacctgatggtgtcgtcagctgatagcacattaagaatgacctttgttttgggtggctgaggtgggtggattgcttgagctcatgagtttgagatctgcctgggcaacatggcaaaacctcgtctgagggttcccccccaaccacaaatacaaaaaattagttgggtgtggtggtgtatgaccgcttggggctgaggtgggaggatcacttgaacccaggaggtcgaggctgcagtgaactgagatcgtgccactgcacttcagcctgggtgacaaagtaagacactgtctcaaaaaaaaaaaaaaaaagaataatatttgataagagatgactagattactgtaattcttggcaaataattataaaggaatccaaagaatttgctgtggtaaatctctttccattctattttttaaatttgaataagtggtttctgttctcacatctgtaaaaattaaaaaatggagatgaaattgataaaccctgtcttattctagcaacaggcaatattcatctgagaattcatgaaataatttttcaaaaaattcccattcattgtatagatgtatttttaataagatttatttattaaattttacttatttaattttttttttttttgagatggagtctcgctcttgtcgcccaggctggagtgcagaggcatgatcttggcccactgcaacctccgcctcccaggttcaagcgattttcctgcctcagcctcccaagtagctgaggttacaggtgcctgccaccatgcccagctaatttttttttttttttttttttaagtagagatggggtttcaccagttgaccaggctggtcttgaactgctgacctcaggtgatctgcccacctcggcctcccaaagtgctgggattacaggcgtgaaccactgcgcctggcctaattaagtttatttttaaaggttatttcttatacaattttgcaatatatttctgtcttattgatcaattgtatacttatagtaattgttataataattcagtccaggagaaaacttctgacagagctttatgatcacaggaaatcacaggaaattaaaaaaaattaaaacattgatttttgtattttttggccctatagtatataataggataatcagtataaggctttcaagcataaaatacactgtgatagtataaacatctctgagggagatcagagtttgtggaggaaaaaaggaacactgttaaatttccaatggttaaagaagagcttgattatgtaatttaaaaatggatgatggcgaatctctaatcgccgtggtatttagataccattggatccatttaaaagagaaacattaacagttttatttttaaatgttaatatttacagtatgttggaaattacatcctctacaagtatttagacttatgatgagaaatttttcatatcaacttaaaaatgtgcaaatagatatgtagttttaaacatttattttgtgggggtttggtttgaagtccactgcttcagaacattaccctgtttacttctcagaaccaggcctgaggcaaatccttcctcggagagggacagcacgaggccttgctctcaggctgtccagaggccctgatggggctgggctggactgggctgactctggggcccagaactgtgctccgagacttgcttggcagtggacttgtctgcagacctggtctgttgggccacgtgatgatgatcatgaaagacacagcactgtctgctcagggctgctcaggcaggaaaggaagttgcaggggagccaggacccaggtagctcagaagaagaggatgtcctactttgtgtttagagcagggagttgggctgcaggacaagggaagagtgtagtaagggtcgtgggaccagatgctctctacctcctgtcttgagaggctacttgtcatgatggtgatggtggcaagtgcctgtttcctcagccccgtgctctgtagtatggtaatgggaatgctggacgcacgggccaccctgactccaccatttcagtgttgagttggtctcactgagtgctgagctgagggcccctcatagccaggccgtgcagatgggacgcagtaacatgcagcagtttccccgacacttgctatggataggccccaggtgctgggggctcacacaggcccaagccaggccccttcaactctctgtgatgtctgcagacagtggccaaggtaggcagggacaccagacaggcacagaggagggccctcacgcagcctggtaaatcaggaaggctccctggaagacgagtctggttagtggcaatgagcccatctacccaacagatcctaactgagaggcaaggcctgacagagctcaacccagttcctaggtccttgtgcttccttctaaaacacctagttgctaaaatgaccaagtgccaagcacggcactatgattacttcccccgtacacaggagccttggtcgtctgtgatctggggagtggggctggggctctcctgtgggccaggcagaaggcctgcatcagccttgctaggtgctgtcacctgggggcaccttccactccgatccaatctgtggggaaggctcaggaggagcggtttccccatccagggactcactgcctctttctggaatagtcctgaatttggtggaggaagaccctgaaagaaagacccacctgctgccgggccccctccagcctggacgtccttagggaagcatgttttgcagcctgacctctgccctggcctgttctctgggctgcctttccccagttactgtaaaagatcggggagaaggtgactgctggcatgaggggactcgaggtttgactttaaagtgcgaatgagcaagctgtaagtgtgagaagtgcagcagccagttagagattcactgtcctccatccacattccttgagaattcagacactatgaaacccagtctctggtgcggcggctgtttctcaagcaggcaaggaagtaagtaagttctcccggcttgcgaatgagtgaatggtgggcatacgtctttctgtccgtgttttctccagagctggtgctggctggcttgctggtgacctttgtatatgtgtttttaccccttcctgcaccagactttcagggaaggaggttgggtgggtgaccatcaaaccaccaagaaaaggcaagtctgagaaagagacactaagacccaagggaaggtccatgtgcctggggccgaggcagaactgggtgctgggcctctggaggcgaaggaactgtggggatgcccactggcagggaaaccgtggggatgcccaagcccaggggcagggcaggcctgtctgagctgtgggggagtggtgaggacgcaaggctgggcatgtaaggaggagtgggccatcaggggatggaggccatacctcctgacatggaataaactgggcgtaggggctggcaggaggcgaggtgttagaatggccttacagacaaggagcatggccagggccacacacagcagctggggaagggggtcctttggctgccaatggcttggaaaggctacagccccaggcttgagggggctagtgagagaccaggctggagagagtagcggtgccaggtgagttgttcatggggtgctgtgtcgggggcatggaggggcttctgcaggcgaaagctgggtgctccaacctgaggctatgggggaagagccatggggaggatacatggagggtgattagacagggctgcactggaaagcagacagcagggttttctgagaggggctgtggctgcagcctagtgaggggtgatgtgctctccaggggctcctgcagtgacagagggcagcaggagacagatggcagggtgtggtacctgggtagatgtgggaggtgagagggggaggatcagtccccagactcctcccttgtttctggccggagtgcctgggcatgggggtgcaggaggagcagccgccagggagggaaagcccatgccagcactggcgctttccgataggtgtgctgagtgcaggcagcggaggcctgtgttggtagctgctctcggaattcagagccagaggggactcacgtggttgcgtggtgtgcatctctggaaggattataggtgctaaattctccatctcagcattaaaaatgtacttgttatttaggttatatttttacatggtaccaacatttttttaaaaggtatgctgaacacagtgtcaaatgatcaatccacagcggggttccctctgccacccatactctccagcgtaccccagctggctgaccccggtgctcttgatggattttatttccaggtcactggggcataggtaggggtggacacctgtgaacatccttccttctgtcgattttctctgccgtgtgctgtggagccaagcgtaaagggctttgggaataacaatcgctgtggggttctgacgtctttggagctgggacagcccatggtagacttgcggtccacccatatcctgggcagtggctttctgaagttcacgtgagcctgactctgacctctccccagaccccatcatctccaaggaggaccgccacgggcttggggggctggctctgcacacagtgtttccatgtggtcatttgaggccagtaatggacacagattgctcttggctgtgcctcacttccctgtggggtccagagacctgggtttgagtttctgagtctgtttcctggctgtggatcttttccttcctctttaaagggatgacagcgcacaggattgaagacacctaagagatgctgaaggaatattaattgatttttactcatctgttgttatgattaatggtggcatttcagtggggaaaatacagctacagatgaaactgggctgttgagaaagatacattgtttcagtgtggagaatatagtattttttttttttttttgcctcccctctgtatcacttttgggtttctaacaattgtggattccagcttactccttccttttttaaaagatagattttatggtttttttaaaaaatttgaaatgcaggtatttttttccccctaaacattgacaattattttcattctccatcatttactatttgcttaggctatgtagataacaaataagacaaagttatgtgaaagcatgatccccatagtgttttttaataatgatgatacatgaggtgctgggaagggttatataaatgaggtctgctcatagcagttctccaatgtggccattaaaaaaaaatcacatttttcacattttggaagacagcgtggggaaatgctcgtgagttgctttgagtactgtcgtcatactctgagtggtttcatttctatccgttttattttggttcctgagctttttaggtttgctgttagaaatagaagctgtcaccgtgttgcagtcttgtgcagcttccgaagcctgtggcactcagttctagggtgattctttctccagcctttgatgcactgagtcaatttgagcaaatcctttaaaaaaaaaaaaaagttcccacatcccatgtcaagacaacagagctctgccagggcaggtggggctccctgtgctccagggtgcctgggtgccttcttgcaggcaggcttccagaaccccaggccctcctcaccacaccacgcagggttgggactggatctccctggtacctgccacccttgcttggctgtcaaatgtcaagaattccgtggcctcagtggagcgtgccaggtaagcattttacgtaaaagcaaagaaaagagatggaatgaagtacacaggggaaataggaagggatggaacgggggttttagaaagggccagaagcaagattctgctcttaaagtagctgactgtcctggcattctggggtgaaggtatccatagcattgctactcagagtgtgatcctagggaatctgggtgcagatggagaaactcggatgcaaacactggattcctcagcagtcggttcccgtttggcctggtgcagggctgagactctgaggaggaggcatcttgacctgagggccctggactgtgctccttgtccagctgggcgcagaaccatcgtagtcaaagccaggaatggagatgcattgcctcaggtcagttccaaagaccaggaagcgtccctgagtatttcagttgagtaaggacctggcatctccctcttcagccccttccctgctctcatatttttattcatgcttttagaactgctaaatgtcaggtgggtgcagtggctcacacctgtaatcccagcactttgggaggccgaggcgggtggatcatgaggtcaggagatcgagaccatcctggctaacacggtgaaaccctgtctctactaaaaatacaaaaaattagctgggcgtggtggcaggtgcctgtagtcccagctactcaggaggctgaggcaggagaatggcgcgaacgcgggaggcggagcttgcagtgagccgagatcgcgccactgaactctagcctgtgacagagcaagactccgtctcaaaaaaaaaaaaaaaaagaattgctaaatgtcaccttggcagtgacacctaccctgctttcccagcagacgcctctgccccctacacacacacacacacacacatacacacacacacatgcacgcgcacacacgcacgcacaccaagctgagctgcctgttggtgtgtcctcctgaggctgggacttgctggtctctgaggagcacgtggtctggccctgatgtgcgctgtgtctactgggtgagtgaattaaggactgaggtattgtgctacacaggatgtggccaggcctcgagggtctgtgcttgctaaaaataactctagattattcttttgctcattaagtaatatgtacttgtggaaatcttgggaagtcaagataggctcacaaatgaaaacccagagataattattgaagcaatttttacataaaatatgctcctttttctatatgatgtgcattcaggttaggcttttctgtgtccctagttttgccacttgcatttgggggaacagttgagcatttgcctgtgccatttaaacaccttggaaattgctgttagagtggctgcaccagcttcccaccatccctatgtcccagcatctagaaccatttctctgctccagagtctcaagttctaggttatttctggtttgctgttactaacagtcctgccctgggtgtctctggacctaaatctttggggacctaagtcacatctcaggctgtttcattgggttatggtctagaagtgacttcaggattttgttgctaaagaagaaggggagaatgggggacaggttgggctgcagctagtcagctgtgtccagcacacttgggccctggacttagaactggacaggttacttgccccctctaagcctcagtttattcttctgtaaaatggaaataataatggacccagtctcatagagttccaggagtgaggtcatgcagataaggaacagcacagaacctgtttacctagtttgtcctcagaaggagctgtttgtgattatttactggtgccacctccaccaccatcattgtcatcctcagtggcccagggaagcgtgagtctgaatgaggtgtgttgtgtagttaaatgatgcgatgggtagatgagccaaaatgaaaggatctcttctgtttgatttattttcatgagtaaaaaagccagaaatgtctgtagcataagttatgtctgtttggtttggctaaagcagggctgaccagggatgagtctcctgctgtgagtgagtgaggtcccagcttgtcctctggggttagagcagattttgctctggctggggtgcatttgggggcatgggctgatttatgttttccttctttctggatctccccaggtctagccatgatggggtgaaggcatcacccccagggagtgctgacccctgaccctagccccatgaccccctcccgtgctagttcattatgggcaggggaggtcccagggattccccgcacactcatcgtgacttttccaaaagctgtgtaaatccagagttgtaacttggctctgtctttctccttccccttgatccaccctcagctcaagaactcccctgggaagcacagtggctcccgtctttgcctcaagttctctgatgttctgcacaaatggtaggcagagacagccctttcagggacctgattgccctggtgtctagttctcctttcacaggcctgttttccagctcgactgtcaatctgagtctttctctttttgagctttatgcaatggccttagagtataccctataaggagatcccggcttgctggtgcccggccctgcagctgtgtcccagaaacttggcggtggtgcatggggctcactcagcacttctacagaagccgcctggggtggctcccagggttccggtgggaatggggtacagaggcctgagagggggctttgatcaggtgtcctgggggaacatttagagctcctggattctctgcaggaaggccaccagcagccaggcatgatggcctgtgtctgtaatcccaacactttgagaggccaaggcaggagaattgcttgaagcctggagttcaagaccagcctgggcgacatagtgagaccccatctctacgaaaattttaatttttattttttgagatggagtctcgctctgtcgcccaggctggagtgcagtggcgcgacctcggctcactgcaagctctgcctcccacgttcacgccattcttctgcctcagcctcccaagtagctgggactacaggtgcccgccaccacgcccggctaattttttgtatttttggtagagacagggtttcaccatgttagccaggatggtctcaatctcctgacctcgtgatccacccaccttggcctcccaaagtgctgggattacaggtgtgagccaccatgcccggccaattttttttttttaaaggtcaccagccctgttgtctgggcagtaagcacctagtaggattgcttcagagttctagaatgcgcatgtaaaaattccaaagtgcgtttggcgtctgggctgggcttctatgagcagcccaggcagcagcagtgagaactcctgtgtgtgcctcgtctactgagtgccagggttagtgccccacttgccaggtgagaggactgaggctcacacaggtgggcttgtcacagcctagcatgtgagctgtggagctgggattggattctagaggtgtgatggcatagccagtgcctcttctgctccgaagactgcctgcctggtgagagtccagtgactcctccctagttccagctccatccctccaaggctgtgcagtcctgggtagtggcacaacctctctgaggcccatctaccagatggtgatgagatggatgattgagacgaggggagggcaagtgagaaggccttctaaaactcaggccctcgtaggagaagcgtgggtagcctgaggtcagggacagggcttagtgtgctgtgtggggctgtggggagtgggaagctcactggttttctggctcctgagatgactcgaggggtcttgtgaagctcacacccctgtctcactgggcaggagtttggcctccactgtgggtctctgccatctcaggtgggtgggggaccaggggtccctgggcaggagggtgtgggtcctggcttggaggcagaccttggctcactcccttccttgcccaggcagtatttttgccgcaggccctgccaagtagaaataagttatttacagtgttttgacaggatcatcggcagccgggatgggcaaggatgcctttgggactgagctaatggccaaggagtggggcttggagaagggtctggcgtgggagagagatgggagatgggggtggggtgggggcgcacatttactgaacttgttaaatcttgacaaatgccaggcctggccctcccttaagccagggctttggggcctggtgagggcaggacttgatgagttttcctgtcgaccaaatattccgccggatcgctcaggaccctcggttatttttgctgtctgagccctcagtgccttcctttgtccatcagggacaaggacccctgcccacccagtatatcttcttggggagaagatgaaacgccttggtgtatggtaggccaggccctggccttgactgtgagcctggcagcccctgcagcccctcacactgggccaccattgacctgctttacgacttcaaatagcacagacctgccgtgggaccagggcctcctgctagtgcctgacctctgtcctgcatgatgttctgaccctccagaagcaggtttgaaagtgcctttcaggaaggtctggagagcctcctgtgtagcttgtgggaacaaaatgtgttactccctagccgaaggataaccagcacactaaaatgtgaataaagtgtgactttattcatgtcctttgagcataaaaatggcacacacactgatgcattaaaaaaacttttttttttaattaaactttttttagagatggggttttgctctgtcactcaggctggagtgtagtggtgcgatcatagcttgctgcagctttgaactcctgggctcaagcaatcctcccacctcagccttcttagtagctgggaccatggtgtgcaccaacatctttgatgcagttttttttttgagatggaatctcgctctgtcgcccaggctggagtgcaatggctcgatcttggctcgctgcaacctccgcctcccaggttcaagcgattttcctgtctcagaccccagagtaactgagattacaggcacgcgccaccatgcctggctaatttttgtatttttagtagtgatggggtttcaccgtgttggccagggtggtcttgaactcctgacctcaagtgatctgcccgcctcggcttctaaaagtgttgggattacaggcgcgagccaccagccttgacatagttgtaaacaaagttgtggttctgttgtaatctgttcccacaaacacacttagcattctcttagagcttccccctttgttaaatgtctacttaggcttgctttttaaatgactgcataatattatctgattgtaactgaagttctttgattcccttggttgatgctgaccatggttctggtctgtcacctttataaatagtattgtgataaacatccacttttgatactgtttgggcaagcctgtgatgattatttctttgggttacataagtaagttgtatatattgtttttgtagtctgtaggaggaatatgtacttcttggtgaaataaacaaacccctgcattttggggaattacagaaagggaaggtcttgtgggagtttgtgcttctagatttgaatgctgtgttatcacctgtgcaccaggcacgcatacagcaactcatttctctctcatgtgccctccctcccctcctttctcactcctgccccagacccactctctctgcccatgaggctgggggctgtagcctagccgcagctgtgcccatggacttttctccccttgcaattgttcctcaccccagggagaggaggaaggagtggtgggctctggaggaggtgggtggtccccgggtggcctctggtcttgcttcttcccagcaccgagggtgcttcagcctccttgcctggaaaaaggggttgtcgtaacaccaacctctaaggttaagaagggtaattgagatacagtgtcaaagtacttatcacacagcctggccccagatctgtgttgaggaatctgcagctagtggtggagggttaggagtcatttggggaattgcagtccggaaagttaatttctgaagagtatcaaacaccagcttgcatgttaagttgtcttttggagtgatccctccagtgattccctagtggtatggagccagtccagatttggagtggaacttttgttgtgggtgtgggtcactgttccagggaaccccagctacctgaccttgaaccaaaatccttgtcattgtggagcctgtgtccccctctgccttggacttttttacttttatcttcctagttctcataatagctctgtgagatgggatctatttattattctccctattttgcagatgaggaaactgaggctcagatctgtcacctgcttctgtgatatttctagtcacagagctccaagcaccaatcactctgggtctttgaactcagatctgctgttgcctatggcctaggctctttctactctgactcttccatcccctgccccttccccagtgctaaccagacctctctggttcctcataaaaacctcccgtggccttcctgaattttccaaggctaccacacaatcagccccctaataccttgcaagcatgggccttttgcagcagagcagggtcccctccattcctgagcttgtttcactgtccccatgctgatactcgcctgttccagactgtgtaccctcagcctggcctctctcctggtcagggtgcatgcctggcccacgtagcctggtggttctgtgctcgtctctgtggctcaaatttgctccctgtcttctgaccctgtatgtgtggtgacccagaacgtgttcctcttcatattagccagggagcttgcaggaagcagagctcaccctcagtggttcaaagagagccttgaaagcaggggctgtttgttgagctgtgggcagggttaagggagcagcgggggctggtgaggcacctagagcctggcagcagagaggagctgttctgcttcttgggccgcaggtaaggtgaagaaagtgtcgcagaagctctgtgatggtagtcatagcaagccacagccactgcccaggcatgtcactgaagcagggagagagaggggactaaataccccacccccctcctcctgccctctggtctcctgccagtgacccctcttggccaagtgcaactggaagccctggatcttgaatgctgcgttctacggcagtcagcctcccaggctcagagccaggcagtgtggatgggggtgagcagggagtgaccagcaccccccacccctgcctcatgacctgcaccccctccacccctgcctcgtgacttgcaccccctccactcctgcttcgggaccctcaccccctccacccctgcctcgggacccccaccccctccacccctgcctcgtgaccagcaccccctccacccctgcctcgtgacccgcaccccctccacccctgcctcgtgacccgcaccccctccacccctgcctcgtgacccgcaccccctccacccctgcctcgtgaccgtgacccacaccctctccacccctgcctcgtgacccgcaccccctccacccctgcctcgtgacccgcaccccctccacccctgccttgtgacctgcaccccctccacccctgcctcatgaccagcaccctccccacccctgccttgtgaccagcacctgcgcccaccttgagacccgcaccccctccacccctgcctcgtgacctgcactccctccgtccctgcctcgggatcagcacccgcccccgcctcgagacccataccacctccacccctgtctcgtgacccacacccccctccacccctgccttgtgacccgcaccccctcccccctgcttaggacccgcaccccctccacccctgcttcgtcacccatactccctccacccctgcctcatgaccagcacccatccccgcctcgagacccacacaccctccacccctgcctcgagacccacacccccctccacccctgcctcatgatctgcaccccctccacccctgcctcgtgacccacaccccctccacccttgccttgtgacctgcaccccctccacccctgcctcacgacctgcaccccctccacccccctcgtgaccagcacccgcccctgcctcgagacccgcaccccctccacccctgcttcatgatccgcaccccctccaccccgcctcgtgacccgcaccccctccacccctgccttatgatccgcaccccctccacccctgcctcgtgacccgcaccccctccaccccgcctcgtgacctgcaccccctccacccctgcctcacgacctgcaccccctccaccccgccttgtgacccgtaccccctccaccccaccttgtgaccagcacccgcccccgcctcaagacccgcaccccctccaccctccctcgtaacccgcaccccgttcacccttgcctcatgatccgcaccccctccacccctgcctcgtgacctgcaccccctccaccccacctcataacccgcaccccctccacccctgcctcacgacctgcaccccctccacccctgcctcgtgacccgcaccccctccaccctgcctcgtgaccagcacccacccccgccttgtaacccgcaccgcttccaccccgcctcgtgactcacaccccctccaccccgcctcgtgacccgcaccccctccaccctgcctcgtgacccgcaccccctccaccccgcctcgtgacccgcaccccctcaacccctgcctcgtgacccgcaccccctccacccctgtgttgcgacctacaccccctccacccctgccttatgaccctgtggacctcaaggcagagcagcaatgtgtcccgtggcctctgtgagagcggacccagttcttctgtccctacccagagtcccgcatggccactctggcttcgaccttccagactggccctcccagatgcccctgtggccatcaccccatggctcatttctgtcatcaatttatgattgatcctttaagggagctgatgggcttgcaggcccagggccctaacaggggctcagcccttcattccttctgttgctgggtgctcacccaggccccagtggcaggtcccctgctgccctctagggactctaagatgaccaagtctttgacctcttctgcgtcagtagctcagggagacagacaaccatggggccgcctgggaagatcgggccagggagctggggagggctctcgccgagctgatgggtttctcccacctgtcagtaggtagccccttgagagacagcatgtggtgatgccagaatcgtgggtcatgatcctttttctctccatcaaggtgcctagcgccaccaagcatggtgagaatgaccaggagggtgcctggtgggtgagccctgagtcgtgtggcccccatgggagagcatgaagccacggctgcctgtgctgcaggctggggccgcaggagactggggtccctgctggttctgcctctcctccctgcatggcctcggccgggctctgcttctttctctgtctgacagctgataggatctcatgggtcccgtttcactctcaccttctgtaaatccctgattcttcagaaaacggggctagaaaatctcccaggtgtactcgcacgtctgtttcctttcttagcctttcatcttgaagtcagcttggtgaggttgccctgttcatactgcagaatccagggatctgaggcctctcgccccctgggcagcaagtgagtaggagtgagcaagtgtgtgtgagtgagtgaatgtgtgagtgagtgtgcatgtgggagaatttgtcgatctgcttgaagcaggctctttgggtgctgtttcagcaggacagatttcgagagaacacagctagctctccacgttggacctcgcctgggtgcagtgtttctgtgtatagcaaatgcacacatggctgcctgtgtatgcgtggtggatttggagtctgggtgatgggtttgcacgctgcctctgaccttgaccagccttgtgaccctggggagtcactgtgctctgggcaagtcgcctgtgaggctcataatcctgacagcattactcatcctcggcctatggtctcccgggtggcatttgggagcacccagagggtgagccaggcgctttctaagctgtaaaagtgccctgtgatgtgagcagttatgtgatgtgctctcccagcagcacccagttttggaggctcaggaagcattcccagcagggcctgtttttagccttgaaacatcatgcttgaaaaatgcttgcatggggtttatttaactttaagtggggcaaattctgaaatgggttgtttattgtccaagttgaatttttaatttctcataaattccccacaaattgctatagtacatctttatttgttgaatctgtcagagttgtttatggcactgaagcctgggctccccctgtttgtggactgttgccatggcaacaccaggctctggaggaggggcactgctctgaggtggtatagaaggttctggaatgggctggtggtgtgaagtagagctgtggctgctgcactgagacccagccgtgggtggactgagctgcttaagaccctggttcctcttcaacatcactgcacccctcttggtccctcttcccttgggggtgcactgctgaggtctcctaattctgcttccctaagcccttgctgctcccagtgtggtctgggaaccagtggcagctgcactgatggggcgcccatgaaaaatgcagactcccttgcccccagacctgctgagtcagtctgcagttcaccaagctttcaggcaccttctcagcatgggtaagctgcagaagccctcacatgccacactgcccttgggtgaccccagaggccttggcctggcggttcttggtgtttgccaccgtcctccctgtgatctttctgactccttccccgacagttccctctgcttggccaggagtgggctttgcctctcaaccctgctgcacccaggccactctcctgctttgcacacaccagtctctactcacacagtcaccccagccttctctatctggggaactctggacatcttggaagaggcaactcttgagacacctcctctgtgaagccctccctcctttccccagaccgggtgatgttcagtttcactggagctctcctgtggcctaaacacctcacctgccccagcctcatcaggctgcctgattcacctccctagccgtgacctcactgggtgccccggctgctcctcccgtctgctgggtgctcagaccccagccagcgctcaggaaggtctgtggagtcattgccactccagtcagctggcttcacaaggctgagacttgagtctggacttcttccaagagcctgtactctctgcccggggagtggtagggaccgctgggcaccttcagtttctacctgaggcctgactggcagttggggctaggaccggataaggatgggtccttggactttggaaaggcgctgtgggagggaggcatgggaggggacagctgagaggagtcccgagctcatgcgcaggtgagtgcagaagttcaggtggcatttgtatgtcccttgagtatctgttctgggccaggcagcaccgaggctcgggagagtcccagtaaacaaaccccaaatccctctgccttcgtggagcacttgtgtctaggttgagagactgaaaacagaaagaagtgtgggtggcgagtgaggtgggggagggggactgggagaaaaatgaaggagagtaaggggctgagggctggtgtgggatttgggaacatggcttggttaaagctgaggagatgctgaccctttggccctgcaaatcctccatggcatgtacccaagagaaaggagggctgtgtccaccaaaagacacgtgtagaatgaatgttcccagcagcagcattcctgatggcctcaaagaggagacagcacgcatgcccattggctgtagaatgggtacgtacatgacctgtgttatcatctggccatggagttgtatcgaatacagcagtgagaatgaaccatggatgagtcccataggcatgaaacgtggccaaagatgccaggtgcagaggcgtattcagtgtctgattccatttacatgaagatcttgaccaggccaagctactctctggggacaggaggcaggctggcggtcacctttggggacaaggtgccgggtgggaatgtgaggagcctgctggtgtcttgcaactgtcctctcctcagtcttcctcttgggtgccagtttgtgaaatattcaagctgttcacttatggcatgtccttcctttcttatgttatacttcagtgaaaggcttataaaagaaagaaacagaaggggaaaaaagccatgagaggcagagagagtgctgttttctgtaatatatgcccttagattctctagaacattggttctcaagccaccgtacatatcaggacatggccaccgcccctcctgaagctctccttgccaggagtgatgcaggctccgaggatgaaccacctggtgagaagccagtagccccagcggcatctttcttgctcttcactggactggagcctctctgtaatcaagggagtacatgttctgtaccccctggcccagtgtctagttagaatagacagtgagcatttacagattgaatggttttttgtttttttcccaatggttttagcttgtctttgggaatatagggtctgtttctgggcatggagaaacagggttccctcctgtgctttaagtctaacctccaagccagagaggtggtactggcaggagataagaccacccgttgtctggatgctgttttccatgcagcagacatgggctccagtttctgtcaatcagtttattaaaacctgcgtttattacttgtttgccctgtgccaggcactgggctgtgtcttagtccagccccacagtaccctgtttacagatgacgtcaaagcagctacacgtgggtgactggctcggttcacttgctagaagtggggactctacctctaagtggggtgaatcccaggctagcacttgacccactgacagggtggaggggatgtggggaaagaagatgttcagtcagggttggatgcatgaagtgctgggtgggctgccaggaagtgcttctaagcctttgctcttcgcttccttccccgaccccatctctccctacttcagtctgacttccctccatctagaatcttcccagatgactccacaactgggtagttttacctgctgtttctgaagcctggctgtcccgtctacctcccaaacatcagcccaggctccagagactactggaatcacagtcacctgggagattgatttttaatagactctattttagagcagttttgggttcacagcaaaattgagaggaaggtgcagagacttcccgtatctgccctaccctgacacacatgcagccccccttactgtcaacatcccacgctagcctggaacatttgctacaatcagtgaacctccctgggtgcatcaggatcacctgaagtccccagtgtgcatagggctcactcttggtgttgcacattctgtgggtttggacacatgcatagtgacctgcatctaccattaccataccatacagagcagcttcactaccgtgaaagtcctctgcaccgcctgttctttttaaagcacttctaaaaagaagtgctgatggggtggcatcaattatatccagatctctggggcagctcttgagcactggctgtcatgaggcccccaggacaacaggcagccgggagaggggcgggtggggaaccactggattgaagtaatggttctcaaactggagtgtgcactggaacccccagggagcacatcttcaaacaggtggctggccccattcccagggtctctgaaccagtaggtctgagggggctgagaatccacatctgtaacaggtatccaggtgatgttgaccctgcttgtgagcccctctgtctgagaaccactggtttttttttattattattttttattttatttttattttttattatactttaagttttagggtacatgtgcacaacatgcaggtttgttacatatgtatacatgtgccatgttggtgtgctgcacccattaactcgtcatttaacattaggtatatctcctaatgctatccctcccccttcccccctccccccaccccacaataggtcctggtgtgtgatgttccccttcctgtgtccatgtggagaaccactggttttaaacagtggtgacgaaaggtgtggttgggccagatgtgcctgctcagaaagccaccagagcgctttccaagtctttggggcatctgggagattgtgcccggcccctttcccagttctgagtgagggactgaaccctgggatgggagatgtagggctgtttcctgtaccaccagccccttggggacctgggtttggagggagggtggtggtgcgggcaggtattatattgaatatagagtgagccagaaggccggtgaggcttgggggcgaacttccagcccactgagtcactctcaggccgtctctggccccactgaaggatctcccgtccccctaccccactgggggttcctttggccctcacagaaggacagataaggcccccagggtaagaacaacccagaccaggcctccctgggtcagagagtcagccagggcctggtatcgagacttagaccttggagagcttgggattatgggagaatcaggctgttcttcagacaacaggccgccctagatgcctggcgtctgttgtaataaaagacctttagtggaaactaagtctgttgcctttggcctcctaggagcccagcaataaaatcagtgtaaatagagctaacatttgggagtggtttataaagcacttgaaaaaaatccctcatataaacccaaagacagtcctacaagctgcagggacaattaattatcctaccttttggatatggaaattgaagttgagaaaggttaaataacttgcccatggtcacagatcttttaaatggcagagctgggatttggcctggggactctgccacccaaatctctgtgctttctgctgtcttattccccttccaccacgtggcccctccaggcagagatgaaggcgctcccctggtgcaagctccagctacaaaagggtgaagatggtggtgccctcagagtggaatgtgctggaatttctcacaacagagttgttcttgaaataggtacttattcttggcatttcttagccaaaaactgcagaggtgagtaccccatagccataacagtggcagggattagggagtgagttagcgttacaatggaagggcttccgcccaatctgctgtcttccattccccatgctgagacatttggaggcacagggtggtttccggtctcattgaattggctttcacgcttggctatgaggcacccctaggggttccttgaaggggtacctgcttttcaagggggatgagttgctcaccactcccttcacctgagcagctctttcttttttttttttttcttttgagacagagtttcatccatcacccaggctggagtgcagtggcatgatctggactcactgcaatctccgcctcccaggctcaagcgattcccctgcctcagccacctgaatagctgggattacaggcatgcgccaccaagcctgcctggtttttgtatttttaggagagacagggtttcactatgttgcccaggctggtctcaaactcctgagttcaagcgatccgcccgccttggccttccaaagtgcagggattacaggtgtgagccacctttcccagccactctctcttgatctgtgtttgatctggggtctgcatgttagatttcatttcaggaaagacatttgaggtcagagagagtttgaaaaccatggtgtctggggcagaatcctgggatattcagctcccccatgcctgggaaattgaggcatgtgtatgtgcagagagctgtgggcctgccaggtgcgtgatgactgttggctgtcaggtcctgggggtggagtgtggccatcaccgtttgattggttccttgtccgtcaggtgtccttctgagtgcccaggcaggccgggccctgtgctgagcactgggcacatagctgagagcaaaactgccacatcccggtccttaaggagcttccagtttagtgggaagacagaatctgtcttggatggactttgagtctcttccagcaccgcaaggcgtgtttattaaagagctgggcattggactcgcctgcacaggtacctctgccagctctgcttgctgatgggccagtgacactcacttcctcccccacacgtgtgggcctacccgatgctggcgactggaggtctcggtaggtcagccatggggtcactgaggtcccgtgacttggctccctgggtctctaaccattcctcacctgaccccatctctccagaattactcttgtggacccccctcacatccagggcttggatttgtcacctttctgggtggagagaataaagggaggaaacacgaactgaggtggggtgcaggagccaaggcaggccctcaaagtgtgcatcgatgccttcaaaagccagctgcagtattcggccacctgcgatccctgggtgcccgccatcagcccttgctcctctctcttgccttggataggacagaagttgacacttgggggctcttggagaaccatttggagcacgtggaactcaagagtgaatcacttattttttgctgtgtggcagcagggcctccctagacaggacatattcgggggcttgcagccaggtaggggagtggaagtacctcctctcaccccacacacgggaattggagatgaggcagccgatcctgcctgcttgagtctcagctgtcattttccaggctggcagcaccagcaggagaacccgtgtgtccgccgggctttctttaaaatgcaccgagtgcaacccagtcctccttgtgtaaactttctccaactggccagatggtttgcttctatttaaggcagtgagagtatttcctacggcctgctgccccctggcctttgttttgccccgggaaggccattcctcgaaagggaagctgagcaggagttgcacttcccagcagcagggattgtcggcgcccacccccatggcaggcctagaacctttgccaagtgcctctgcctggagggaccgtgtttgtaacttgactccctctgtcccttccaaatctgcttgtgctgtgttttcttagatggtcatgaaggtctccccccatctcccaccccagctgccagcccggtgcctctgtccctccacatccacatcttttctgtttccaggttctgttgatttttccctctggatatttccttacccaccccccacccccgtccttctgttctgtgaccccggtcagtctcccagtcccccttacccattattgccaagcctctggctggcatccccagctctgggctctcccaccctcagtccagcccccacctggcagaatgatctttcatcgagaatatctgagtcactccactgatctaacctttcctggcctttcattgtctttaggttaaagtctaagccctggagaatggtttatgaggcccttcccagtttggtcctgccagccaggcagcctcaccccctgccattcccaactcagacaccagcaacacctgcgcactctctccctgcctctgcacttgctggtccgacctactccagccagatgtcacttgctggcagaagcattcctggcttcccctctgtcccctcacctcctctgagccgactgtgtttacctgtgggctcctcgcaggcactcaccttggtacttagcacagagccctgcatgcaggaggccttccacacaggattcttgtgtattgctgactttccccccaggtctacctagaagccacagaaggggttttgtagggcttttaaagggcaaatggaatctgttattctttagtatcattaatatctgcaaagtttccttctcagcagatcttcacttctcattgtctacactgtcccttttcctctgggtggcagtgatgattggcctgagcctgttatgagatgcttcattcccagcctcccttgcagtgggggtgcccatgttatgtgcacttctaaccagtaagacatgactggagagagtgtttcttttttttgagacagagtcttgccctgtcgtccaggctggagtgcagtggtgtgacctcggctcactgcaacctctggctcctgggttcaagcagttcttgtgcctcagtctcctgagtagctgggattacaggtgtgtgccaccatatctgggtaacttttgtatttttagtagagatggggtttcatggtgttggccaggctggtctcgaactcctgagcttaagcaatccacccaccttggcctcccaaagtgctgggattacaggcgtgagccaccgcgcccagctgggaaagagtgtttcttctctttcaaagggttggctatttcgccctggccccttcttccccgcttccagatattttgtgggagtatcaggagctttggcagctgtcttgtgagcgtgaggcgacaggcacgtggacaaaggtctaccatggcgagcatggcagaatagaaacttgaaaggagtatgggttcttgctgatgtcaacctgttgaaacaccctggagactccactccctcctaacgttccgtccttatgattaaagccatttttagtcaccacttaaaaccagacacatcttcactcatgattctgagcttgttggaattgttttttgttatacgaaaaccaaatgcacccttgacgtaaagactggccatcattgaaacaaagctttgaaggccgaaggcgcttgccaaagagaaggatgccagtgctttgagtgttactaccatcgatgtcagaaatgtaggtgcccaaaaggatgaccgttgggcaccctgttcatttggacatgttatgtcagaaaacaaatcataccatgttcaccatgttatgagaaaatgtaaagcctcttcaggttgtaagtagcagctgtcaatatgaaagaaaaatcttaaggaaatgtcaataaatagaatttattggcctgaatgtctcagaaggtccagagataggtctggcaggtttcaggccattaagaactcacatgtattgtcatcagaaatatttcttcacttttcatgctccttgtgaaagtcattttgggtgggcttgtgccaagtcatgtgaaactggttgcctgcagcttcatccccttggcttaacagccctgcaggaagcagatgtcgggctggctggtgctggctggctctggttggcctggcttgggtcacatacatatcatatttgcctgctaggaatgccataacaggtcactgcaaactgcgtggcttaggagaacagaaattcactctcagttctggaggctaggagttggactcaggatgtcagcagggcactgctccgtctgaagccccgaagggaggagccttccttgcctctgccagcttctcatagtcccaggcacgccttggcttgtgggagcatcgctgtagtctctgcctccatccccacttggccgtcctgcctgggtgtctgtgtcttcacctggctttctccttttcctataaggacactagtcatattgaatcagggccaaccctgatgacctcatcttaatttgattatatctgcaaagaccctgttttcaagtaagatcatgttcataggtaccagaggttaggacttcagcttatcttgttgggggacaaagttcaacccatgacacctgtccttgggctggatgacatgatactctagctggccaggactgtatcacttgcccaccccaaagtgagtgtgggtcaaccccctggagttacgtggcttaaacgtcggggaggaaggttcttcaagggaactaagttgagggcagtccacagatggaaacttggcaaaggcagtggtggtaatggttcaccagcagcccggcttggcctgagggccccagctttccagtccggagtggtccattggtctgattcttctctcccagttcggtcccctctttcctgacttccattctttaactctgcaggagggggcgcttagtttagttggaggtgaatggagagggaagggagacccaaagcagggaggcccttgtgatttccctaccagccgcctgctctgggctggagcatgggcctcagatagcctaggtgctgggctgcatgtgcggccttgtgggagttccaccgagcagagcttctgatgggggttcgcagcctgggtgggctagctagtgactgagctttgatggtaatgaaccatcgtttgctgcttttattcattcactagtttttcatctgctgtgggagaaggctgtgggagtgtgcagtccgaaagaaatggaaaaacaccagtctcctgtttctgccctgtgctttccagttgaccactcatttggagatgtttctgtttgcttgtgttccccccgccgcccccccccgcccccggctgctgggccatccctgcttacctagcctttttctgaaggtcttgaagcccagagcacttaggaaagtctgagcactaaattgcgtcctgcccaatcaccatatcctgtgtgtatgtcttatctcctttatgacaggaacatggttcatagttgcctttatctggagcacatggggccatgtgggaaaggaagcttgagccaggccaaccctgtgcagaccctgctgtccccaccgtggggccccgggctagcgctgtttctctgagcctcagtttctacctcctcagaatagaaaatgggagtagcactaatggttgagatttctctcagccaagtgtctgtgagtgggtttgtgcatgcctgggacctgagcaatggccacaagaaagtcctgtttggaacttgtggtcagcctgggcgatgaggtcaagatgccctgagagtcaggagggaggggtgcggcttgactgccccagaccacactgggaggtttgcagaagaaaagagcgtggggtggggatggggtcaaaaaggactctgtgtgtgcctggtgagggcttgaggcccggctcacagaccactggtggacccgtcccgccagagcagtgaccgcttgggaggcagtgagctgtgagtgtggaaaggaagtcggaggcaacgtgggtcctcatttgggggcactggggagcgattgaaggtttttaggtagttgcagaggacagtttcagggaaggtattctggcagttctggcccagggtggattgggttgtgtccaggctagaaactggatcctgaaattagttctgaaagaataaaaaaaaaagtctgaattagagagtatagcttaattttaattactggtccttgttaattagttctctgattgcatgtaagccaaggtctctaattggattttcttagatagggtttcgctgtgttgcccaggctggagtacagtggctatttcacagatgcaatcatagcgcacttcagccttgaactcctgggctccagtgatcctcctctcacctcctcctcctgagtagctgggactacaggcacgtgccatctaattggtttttaagtgctgtcagtacgtttcagggagactctccacccactttgcgctaatcttcccccatcctggtgatttgctgtagagtctttgttatggggcaggggcagcatagcctacttccagcctctcagtctgcggcagtgctcttcagggtcaccaggggagttgaattaaaaggccactctgacctggcctctgtggtttcctggccggctgcatggaccagccctcaagcgctgcgggaggcagagctgctgactggcagggacaggggcctgaggtcttgcccagaggggtaactggcctctgcttatttgtgagaggtgaggcttggaggtttggtttgatcttgatgccctgtgcctgcaagggcaaggaaccagtgcctggtgacttggaactaaggcacagacttccatttcaggctcaaaagcagcatggcactgggctgcaaagtcagggatctggttctttaaggtagatcttacaggagggagaccttaaatgcccctttcttcctgatctgacagatcctagagccctggggcctgccctggccaggagtcctggtgctaaaccctgtcaggttggtggggaaagggcatttaaggcccttaccctgttaagatatatcctaaagaaccacaaccctgacttgcggcccacgctagtccgtcacggtgtcgggtttttcttgcttcttcctcttcctcctttgctagccttggtgcttgcggtggcccttctggccaggccatagacagaggccacacccttcttccctctctgccgtgttgctgtccgctgggccactgtcccacctcctctgagatctacagccccacagggttgggtgatggttgtcgccacattggtcagttctgcatctgggtcagtcccaggggcttgcatggctggctgtcagtcctttacctggggggccctgtggctcatccgtggccctcgagttccagagtttccatctgctgccaggccgagtgcagcatcctcaccagcttcacagccaagcagagggatgccagtgttcggcctaggcttcggtttaatttttatgctagactttctcagtaatcgccagcacaaacttattcatggtcccttccttgtgtctggatttcagctttcctatctctgcggagggggttggaccagattacacgtgggtgactcagatatacctgggcctgcatgcaatctgtttggcccacacaggaattttacattctttcctttgaatttgttgccagtgtttaagctggttgccccttaggccccaccattctctgttgtcccacaccaccagcctcatggtttacatttgccccatgggcgcttcagtttgtgaccctccatttgctcctaggaccccctcctcacctcccccccaacccctcccacctgaattcctcagtaccctctggctctgtcttcccagggtgatgggacagaagaggagggaggctagagcctagccatccacaagccgggttccagaatggttggatttgagaaatctggtgaaggggaaaagatttttcatttgcccagaactcagggtagtggacttggggcagtaaaggtctcaggaacagagttgaagccagaactgtaggaagatgtgtattggggccttcaggtgggcggcaggagaggaagggtggggctgtggtctgggaagggcctcctgcaggatgccagcctgccaccaatgaggggaaggagaacggtggcctgggcatgacgtgcgcttggaacagattcctggtgacaccacccccagccttggggcttaaagattgtggtgtaatccaagcttgttttaatcaagccacagataagaatgagccaggctgaggctggctacggcctgagtgcacattcctgcctggtgcactttgttcttcatgtaggtggggctgggcggggcagggaggctgccctgctgccttggacccaggatggcatttcccctgcttgacagggacacttggaatttcctgttggaagtagccccaaaggaaagagtgcctgatgggttgagccttggatgtgttcggtgctttctgcagtgactccacagagcactgggcttttgcagtctctactgtgctgtcttcggctttcccactggtatttcctgccctcagaaatccacctgccccacatctcttttctccccttctgtctgtgcacataaactggggtggatttcaatccgatctccttagctgtgtgatcttgggcaagttattttgcttctctgagccccagcttctggttctgtgtgtgctgtgaaaccacctgtggcccacgtggccaatcctgggtcaatatttttttaaccaatgacaagaagtttctaagggttttccccaaagtgtgggcctcggtggggagctggcagtagctggatgagaaagagtttggacttcaagtcaatttgtagagttaagattgaaacttttttttttgagacagtctcgctctgtcaccaggctggggtgcagtggtgcgatcttggctcactacaacctccgcctcctgggttcaagctattctcttgcctcagcctcccgagtagctgcgattgcaggtgcacgccaccatgcctgggtaattcttgagtttttagtagagatggggtttcaccatgttgctcaggttggtcttgaactcctgacctcaagtgatctgcccaccttggcctcccaaagtgctgggattacaggtgtgagccaccgcagccagccatgattgaaactttaatttccttctccttgtccgaggcccttctccctttctttgcccaccagtttctccctctgagcgctgcagccaccccacaagccccagtgccctgtcaggcccatcaggacatgcaggtggggcactggcctgagttttggatctttgcttcaaagccgtgttaagtccagctctgccttgtcccagttcccagccctgtcgctgttaggggtatccgatcagcaccctcaaaactagagagatcgcagcctcaaacaaatccttttggcaaatggctgcatgttaggagggttttggtgacccaaacatgtgccaggcatgttccaaaacccccagcatcaaggcccactcagggattagggtcgaagctgcttggctggggagagagggactgtttttgttcttagccactttctgttcacatatggctatcattcactgaatgaacgtttactagaacagcagggtggcggagtagagaaaacgtgtttccagtttgctgtacctgtgtcagaatcttggatttgttactgtgagattcagggcacttgagtcatttgttctctagaaggttaatttcctcaacttataaaataacttgatttgtacctcctgcagtgggtgttgtgaggactgggtgagaggaagtctgtgaggacccagcatgacacctgcacatggcagctgtgtggtaggcggtcactgctgttgtcatttagtaggtggcccttaggattagacaccgcgggggacacaggctgggtgagatagggtccttgctaccaggaacatatggttaacagggggctgcaggatagatttgctgtgttttgggagttcctagcatctgaaccccctctgagtttacatctgaggattctcttccatatgtatcttggaggccagacaggaaaggccaggaactcttgtcacctgtagtgctgggtgcgagcacaggactggggcctgccagccagacccaccccctggtgctgggattcaggaagcaggacagggagcattcgtcatggtggctcagtggcagaggcaggtgccagatgggatgctgagccctgtgtgcccgggtgtgggctgggcaggggccttgcctgcctgcctgcctgccacagggcctactttcactgtgcttctctgggtgaacagcctccctggcagaggcccggtttctgagcgtggctctcccagcttcctgtgttttctgacctgcacagtggccttttagtgaggtcccttgctgctcaggtcagccccaggaaggttctggtgctcacatcccagaacctgctggtctctgggcctcagagtaactcatactgagaggagggaaggatgcccaggcaatactgtgcagagacagggttgccacttctggccgcagggaggagtcagagaagacttcttggaggagggggcatttgaaaggtactttgtaggacagagggcctggagggaggttcagatcctggccgggcagtggaagcctggcccttgccttatagcctctttgaaatgtaaatgatgctagtgcctgtgggatagggcctttgtgaggagtaaatggttgaggacagcgcctggctaatcactgatcaaaatagccccctcctgacaggggattaggttcatggctgtcgtatatacgagaccaaccatctccccccacactctgtattgatggggagtggtagagttacacttctgctctgagctcagtgcatagacatcctatcttgttgaatgtgcacgacacctcgagatgtaggcaggatccttccttttttacaggggagaagacggggccttggtgaggtgaagtagttcccagggccttccatccaggtgatggagccaggaccttgcttctagttctcctgcctcccaagcttggctgtttcctacagctgcatacggccccacccagagggaggcagtcaccagagaaagagaatggcagtgacccagagggggcacagagctacttcctgctcagggagtgctgggcagcctcctgcgggggggagaggggggcattgaatgggcccttcagagaaggctgggagctcaccaggtcctgaggaagaggagggactgcgtgcaggaagcctcaaggcacgagccagcttagcatttgggggaactccaagtatttggtgtatacagtgtctgcagggtgcctgggcaggggtgttgggccaagcggtgtggcaggggaccatgtgtgctctggccaggggccttgacctcattctgttggtggtgagggcctctgcaggtggggagtggcaaagtggaccaagaccgcctctcctccactatctcccctccctacccctgctctgtccttataccccaggccacagtgaaggacattgggccgaggccctgctttcataggaggaagcaaagctctgcttcatgtagctgaagcccaggctccccattgtccaccctgacacagaccctctgagtcctcagttttctggtctgtaagtggctatgaagtctgtcttgcttctcctcccagagaaatcatgagcataaagagcctgccagacgtgtggatatgcggttttaaagattaaggcagtttaaccaaaaagaacaaaacattggctgaattaatagaagtggcactgggcgttcttcccgtcagcctgagttggaggtggggtgcctcccagcaggggctggcaggagcacccgtgtgcgctctgaccccatccagagggtttctgggtgccctgcacagcgggacaccctctggaggaggccctgtggggaggacagagggccagtaagaacactcagtggccttggagaagcaaaggtgtcatttgtcccctcccaaccaccctgtacttcctgtactgaaactgacagcaagggagactttggcagggagaactcccagtttagctcctcaagtgtttttgaggctgaataccagcctgacagcttgctggcctgctgcagggtgtggggctgagacggcctcagcgacttatcacagcgaccctgtgaggtgtaggtgcgtcctggtcccccattcagtggtcacagaagcacagtggggtttaagtgaccagtcagatctgcgagcagcggattcaagattccagagtctggggatctgacaccaagcaccttgggctggtaaagatacaaagtctccagcaggcacagggtggaagaggaggtttctgtttttaatttttttttgtagacaaggggtcttgctgtgttgcccaggctgatcttgaactcctaggctcaagtgattctcctgccttggcctcccaaagtgctgagattacaggtgtgagtcaccatgcctagcaaaaaaagaggaggcgtcttgttgacatggattgagagaaggttgagtagctgagaaggagagagaacagcctctgtagaacaaggaggtggggggtgtttctgggtatggtgagcatggagcaaataggagagggagcccaaagcatgctggggccagagcctgcccaaaaggcctgtgcccagaactctgggcatcgtttagtaggaaaggggaagtcagtggtgggctcttgagtttggcagcacccccgtgagagctgggcgtatgcaggcggacgctgtagccatggcagcaaggtcggcggtggtagcaaagggaacttaactcccaacttgggacatcttttggggctcagttcagagaaaaactgagcaagaaataggtcacaggttttaggaacggtattagagtatcttattttctggcatgtccaggaaatgccattttccactggatgcattttttagatagttgcttggcacttatgtctttgtcttcagaagaatggttttccggttttaaacacatatctggctgggtgcggtggctcacgcctgtaatcccagcactttgggaggccgaaacgggtggatcacttgaggtcaggagttccagaccagcctggccaacatggtgaaacccatctctactaaaaatacaaaaattagccgggtgtggtggcacatgcctgtaatcccagctacatgggaggctgaggcaggagaatcgcttgaacccaggaggtggaggttgcagtgagccgagattgcaccattgcactccagcctgggcgacaaagtgagactctgtctcaaaaaacaaacaaacaaacaaaaacccacatatatcccacttttctttcccttccaaaagagagtatatggatataatttaatcatttttcctgtgttatgtataattgtacaattagaaacaaccaaacattaaaaggtagggaattgattaaataaattatgcttgatttaccttttaatgataatgctttagaagaatatgcaatgttggctggacgtggtggctcacacctataatcccagtactttgggaggctgaggtgggcagatcacgtgaggtcaggagtttgagaccagcctggctgacacggcaaaaccacgtctctacaaaaaatacaaaagttagctgggtgtgattgctcacacctgtagtcccagctacttgggaggctgaacctgggaggcagaggttgcagtgagctgagactgtgccattgcactctagcctgggcaacagagcaaggctccatctcaaaaaaaaaaaaagaatatgtcatgtcacaggaatatattccttatagtttgttaattaaaaagtaggatccagatgtttgtgtagtataatttcagttttagcaaagataaatattaaaaacttggaggagtacgttatgtaatacaaatgttacaggctatctctgagattaagttaaaatttttcgatccctgagtaaataactggagatataaacatctcttacaatggacattaatttgatcagagaaaaaagacagtttttttgaaaagctgtattactttatagacacagctggtatctttattctgcctgagtctcaccatctccactgcaggaggcagctgggtcatgttaagggttcctagagccccaggtggcactcttctgtcttccttgtctttaacatccggaccacaccttgtcaggaagctgagtttgaatctcagccccgggctcgccagtaggagttcttgagtcctgggcctggccttggactcccgttgtgaagtgggagccagccttgcaggtggctgctcaggtgagcatgtaaggtgcatctaggtggctggggcctggggctacatcctgaagcttacctgcgccttcagccagtggctgctgtttattccagcagtgaaacccaaccgtcacattccttgaaatacctttaataactcttaccaaattttgaattttcagtgagtttgaccttgaccatctgtttgaaagaaaggcagacacacacccacacacacccatggtgaaatgcaggcaggatctgacgtcctaggctgagaaatgctggtctcctcttttcctatcaacactgccctgttgaccatgcaaggggcatggagatgccattgtcccggggtcagagggttggcagggagaattgctgtggttccggggcttcctgtgtaggccccagggattgggactggcctggctcagagcaggagccacccagggagcaggggaacagccttccagggcctccctggtccagctgcctgggcctgcaggctcttctgaggacagagccctgataagtgagggtcagtgcccaagaaaaaaggagcattgttagggggtgggggccgggggaacagccagggcattgtcgccgagccgggaggctctgtgtgttccgtggctttcccagctctctgacagtcacaagcactgaggtttggggcttccaccccttgacagcaggtaggtccctttttggcagctgtcagcatctctcagcccttctctgctctgctctggggggatttttcttggcatttccaagttctgggggctgcatcctcccctgcggtattgagatgagtgggagagaatgcggtgcgggttgttggtaacgatcccagagcccagagaataggggcagtgttcctgggggagagccctcacccggcccctggggtgctgagcctggtgagtcatgaggggtgtgggccacagaacgccggggagagtggctgggggttagggggtgtggagaggctgccaccagcaaacagcaagagccgtgggggtcaaatggggcacgtgctcccaccagcctctcggaggaggtcacgtgtttgtcattgttggctgtgtctgacgtgcgggaaagcagccgtgaatactgaggagcctgtcacatttgttctctcagcatctttggtttatcttaaacctcagtgagatgtttgcagttcttctcacgctgtcacagagcatgaccttgtggcctcaaccggatgccctttagacattgcagtccactgcaccatgtggacctcctggggcagggctggttgctataggagcggcccttcccagtaggacggggacagtgtccctccggttgtggcctctgctccccgcagctcttgaagttaccgaccttgggctcctgggaccttgggctcctggggaggggcaggtctcactgacgccaccattgctttcgtagccctttcttggaaagggtggccttgggcttggcgagtgctcctcccacctgtttccaaactctgaggatgctcctcaggaattagaacaattcaaattagtcatcacgtgccggagtcaggctgggaagaggcagccacttggcaccacatacatccacctgggcctgccacccttagcccaggccttggacctctctggtctcctggctaggccctgggcccagctggtttctggtgggaggtgacaggcccagtaactgaagcaggaggctctggtccagaccgacctgggtgggttgaaacctgcctctgccacctcctggtacccaggagggtgaggcagctgttcacggtgctgtcgggcaccaggccctggacagccatggttgttcccattctgggcctcatgcagtgcctggtagaccactgcctcccactcaccagtgtcacagcagccagacaggtttctgcggcctgagccccctccctccctccctcccgtcctgtttcctaggcagcatggcctctttggccatttgttgacctcccattccccttggcttctcagtgcagaatttccatagcacatcagtctgcactggtgatttggggctctctggtgtacatgtgcagatatacacacccatgggagatgagggaggcattccactgtccttcaaggctcagcttacctgccatctcctttgagtcggcttttgactgcccagcgtgaatacctgtgcctgcctttgtgtgctcactgcactcttttgggtcattctggaagagcctccattttattttgcctcactggcccaactgccaaccatgtctgcccttgaggccatccctgctgccctggtgcagcatgaagtccacagcgagtgcctggtctctatttgttgaatgaatgtctgcaacgtaatgtgaccaaggtcccacagatcagcatcctagtgagctgagagctcaggtgagctcatctgtgtgtttcagagggggtggtgggcagaggacagcaggctgttgtcctgaagcccctagaacctagcggagaagaggcaggacccaaaagaaggaggtgtgttcaccctgtaggacttgctttgtaggtgcaggtgcccagaggccaggcccgtcagtgctacctggggtggggctggagaagggaaggcctgccaggccccataggtgatgggagggccaggacctcaggttggagggaaccactgaatcctcggccctgtggtgcaggcccacacagggcatagcccctgggcactggcactgcccactgcccactgcccgtgtgtgctggggccatgccagccttctccgctgctaaactggcttcttcaccctccctcagtgggcacagctgccgcttccatctcagtgtctgcttctcccttgcttggtgggtcattatgtgcccacttagccataggctttcactgagtccccaccttcatgcaggatgtgggaggtcccaggggcccccaggcagctcaggctggcctgccctctagtggggagcagagcagacagatctcccagcccagtgggggccagctgtggtggagcccgcctccccattctattcttggagaggaaaagcacagaaatacaggagtgaaggcacagactgggcagaggggccggagtcgccctctgaggaggcctgtagggcccccagaagagttttctgggtcagaatcaagagactcaggagcctttttgcattttgtgagcccagtcactttgcctctggtcagggtaggttttccagagcatcttcctgctccgacagggggtgggggagtgttgggggtgggtggtttgccatgggaacccccggctgctgcaggtgctgtgtggctgaagccacctcccagttcagtgtgctgggggcaggatgtgggggagggcacctgggaggaaggtgtcggggcagggcttaccagggacccatggggaagtattagacggcttttggggctacactttggatagggagctgggggctcccagcatcagagcccactctttctcccccattcctgagtttggaaaaaggctgccagctggtgcctcacccctgcccctcaccagaagaggtcctgtgcttgccccctgccccatcctcagtccccagtcccacagctgctgtgcagtcctgcttctctttctgtctcctcccctgcatcattcctgccctagctctagacctctccacctagctacccctgtgctgcccgagagccctcctgtgccccaccacacacccacatgcacaggcacgcacattcacacactccgttctcttccaggagaaaccctccctggttcctgaggccctggggaccagtgggtgtgtgtctgtctctctctagcgcctctttctcctctctgcctttccttagacacgtacctcttacctcctgtctggcctggcttcctccatgaagtgctgtttggttttctcagcaggagcctcccagccccaaggctcccactgttcctctaccagtcctgtcctggggccctcactcctgggtggtcactgttgactgattactcatcagtggtccctctctagaccctggttctgatgtctgtgctcagcagggctggcccagaggaggtggtggggaatgttggggggcattggctgttgtggggctttgaggaagcctccttccttctctggttaggaagttattgcagcagatccagcttttcttattctccttttcacaaggctcacaggtcacatggctgctgcctcagagtccctgaggcactgctgtgccaatgcacagttggtttatcttaacatcacccaccccaggaaacctcccttgaccctgtccctaggcctggctgagatgaccttcggtcctactctcacctgtaggattgcaggaataacaaatgacacttaatcacaggcctctgagcaaaaactgggacccaacaaatttgagtgtgctgatttcatttgtagaccctgggaaaaccgatgcttatacctttcccaagccctggcagggcattggcacagatctgctttcaccctgagtctctctaggtgtctctgtgtccatgccttctcagcagctcacaactgctgcccagggagatgaagcccaccagctcctttgctaaagggctcaccccctagagaaaagggctggctttgcagggtgcacgatccgatccgtgctggcctttgtcacccgattccctgagcagctgctcagagctgtggagtacgctgcagtctgcagagtgcgatggccccttcgtgagtcccagcaactcaccagggtcacagccagagctgggtggacatgtgccttctagatgaggctaatcggaagatattcaagggcatcaagctgccccgcccagcatggtgtgtatgtggtccctgggggacttcctcccattgagggtggggcaggtcagatgtgggtcagtaaatttctgtgacctggcagcattctctggaattctcccaagtgagtatgcaagggtttcagtgtcagcttcttcctctctgcaaatctctgtgcaagtgaacatattaaagtatctgagaagtcctgcaggaaagcttctgctgctgcttagcttgacgcaaccgagtctttgcaaatgattttgagtactgaacttccccttttcatgtgatgtttaaaaggttgttaatgctttattattattattattattatttgagatggagtctcgctctgtcgcccagcctggagtgcagtggcgtaatctcggctcactgcaacctccgcctcctgggttcaagtgattctcctgcctcagccttccgagtagctgggattgcaggcatgcaccaccatgcccagctaatttttgcacttttagtagagatggggtttcactgtgttgcccaggctggttgcaaactcctgaccccaagtgatccgcccgccccagcctcctaaagtgctgggatgacaggcgtgagccactgcacccggctgctttgttactattatatcaaataccagtttggaaaactgcctcaaggaatgctctcttcggattggaaagcaatgaatatagaaagagtacagcttcagggcttaaataataatctatgcaggctttgtaggagtttgagtcagagtttccctccttattgttaaaaaggatgcatagaaaatttttttgacttggagaattctttgccacttgtggccggggctgccagttgccattctagggggaacatggagataaagcaaacattgaaatatgttttttattgtcagcaaaaataaacatcccaggccggaagccagggtgtggaagggaggagtctggggacatgaagtcggaatcccacttggggatgggcacttattctcttaccaccacctcttggagccagaccaggaggccttaggggggtctatggccctcattaaagcccaggcccccagcttccagacaagggaaatgatggctcgaggtcccacagcaagtcagtgccaggctcctgacccctggcccgctgctgtcttcgaagcatcatggtttctgaaaatcttacctaagtcccttgttccatgaggccataaaaatggcaactgccatgtatgaagcgcttacagcctgtaccaggcaaggtgctgacacctcacctgtgttaacttccacagcggtctctccaaagggactgaggcatctaactccctcactcatggccttttgccagcttcccccactctgaggacactgactccaatcgtgcccccacctctttgtcccccgtcccctgcacccacgctggcctcctctgctcgggacccctgcacttgccttcttcttagttcagaacattcttccccaggtctctcctgggccttcttcttgcccaggccttccttagagaggccttggattcatttgccagtgctgctgtcacaaagggccacaaactgggcagcttaaatagcagaaatgcacccctcccagttccggaggtgagaagtctgagatcccaagtggggctccttccgaggcagcggggcctgttccagccatctctccctgctgggggtggattgccagccatctttggcgttcccgggaatgtagaagtaccgccctcatctctgccttcatctcctcacgatgttcctcctttgtgcgggtctgtgtctaaatttcccctttttataggagcaccagtcatcgtggactagggacctacctgctctggaatgacctcatcttaacaaaggtcatctgcaaagaccccatttcctaaccaggtcacgttctgaggtactaggggttaggacttcaacataccgttttttggggacacagtttagcctgtaccaggccttctctgacgagtgcccccctttcctatcatgccctctgcacttcattgatgttgcagccctcggtggtgcctccagtcgcttcctttgcttgtttgttgtctgtctcccacactaggctgtgagtatgagcactgaggacagggacctggcggtcatcttcacgttgcatcttcagagcttgagcaatgctaggcacaaacttactctgttcacttaattactcaatgaatgagtgcatgaatgaatgaatgaatgaatgaaagaaagaaaagaaaacaagtcctgttgtctttcccatgcatcactcacacaaactgaggctttgagaaaaccagaggagagtaaagaacaggcttttgtgtgtgattcatgaagcagtaacggtttctcttttatttacattttggataaagggcagaagcaagaagggtggctgtgactgcattcttgatgttttcagcatttgtcaagtgggacgtgtcacctcattttatttttgcacattccccagtcagctctactgagtgtaaatgcggggtgccgctctcacaccctcagttcccatgttggcagttggaagggagtgcagcctgcattgcgcgctaacttcgtgcttgccatctgggagggaagttgggatccaggtggtgcagtcctggatctgaaatcctctgtgggaagtgcagagagacagggtagctgggtttctggaagggggtagcagcctttgaattcatctggctgagagctcagatagaaatccatccctcgccacagctttgggacagtcagatgtggtgcaccgaagacaatctgctggggactgtcagtggcttcctttgttacccttgccttgtccactctcttgggcctgggagggtcagtgtctgtgactgtttgatccttactatgcttggctgtagaggaaggggcctgcaagatgctcatggcctgcttgggaggacaagagtcatgcccaggaagccgtgccagtgaccaagggtggtggctcatctcctgccttgtgtgcttgttgtcagagctgtggcatcttcagccctcaaagattgtggcctgccggcttggctaaaagcacagctgcctggagcctctgtgccttttgggcttcctggggcccatgtctcctctctgcaaggtgcaccctggggctgaagctcgggtggctcgggtgtccttgcctgctctgttgcccagagacggctttatttttcttaccctgctaggcccagggcatgtgtggcttattcctggggctgcttgggacatcgtggaattctttaacctgaagattctcacctctcccaccataccctccagagtccaacacagacacaactaagctcagggtccccaagggtccagaccccaggtggaggtgaggggcgggcagtgtgaggtgttggctctagggaagggagtggtaagaaaacatgggcctgccgcttactctcagtgaccttccacgagttccctcatctcatcatgtccttttttcggagcaaagcagggataacatgtccttggagggtggttatggaaatgcccaatgcccaatatatactgtatggataggtgaatggcatgaatccctccagctttggggaatcaattcagtccatgttggctggtttctagaacaactgggcatgatgccaggccacacaggggccacggggaggaataggacatagtccctgtcctcagggagggggcacaggctaaggagaactctctgcaactcatcagccacgtaagctcagtcagcttgagcgtctctgttctccctgagtaggcaccactgcgaggaggcagtgaagtgttctcaatgggagggaggagccacagccccatcatcgtgcctgggacgctgaggcttagaaatgccgaagctgaacctgaaggcggttactgtttggcgttagaggtgggagatccaatgggaactgtgattgctgaggttccggagggtctgagagctgacatccgcttggggaggtgcctgcagggggcctgctctgggccaggcttggtgctaaggcttcaccaacactgtctcgtggaatgctgatggcagctgtcatcggctgtattgtaccagtgaggaaacagtgtctcaagggggttgaagatcactgactgaaggcccaggtctgcccacagctgcctccacccctccattgcttccagtatctgggacttgagttccaaagccatccttggcgtgggcacacagtgagcagtgcctggggagagattgtcctggctggagagctcgtcaacaggctgagcgaaggtgttagaacaggctgccctgtacctctgggggttggtttccggctcatgtcacagtccagtggagaccagcggcctctccaagcagtgactcaagaatctgtgttcactccatcaggttattctgtcatccaagtctttttcgtcagccacatgaatggggtctagggaaggcacgctgttcatcatacacttgaactagcttggcctggaagcacccactacgtctgctcccattctgttggccaggacgcgtcctgtggctcctgtgcgtgtgcaagggaaccagggcatgttgggcgtgtggctgtgggagagcagcctccgggtttctggcgggagccagcaggtgcatggacccacagtgccggtttcccacagaggtcctctcagtgcagaaagccaaggaccagcccctttttttcccactgctctctgggtgacttggaaagtactgaagcctcagggcagaggttggagagaggagagccaggattccttgggcactgagagcagggaagggttttcagtgagccccttgtgctcagccaaagcagctgggtcaggtggccctgggtgagactgaggttgtcacgtgtgccatttggtgggaatgggggcaccagttggacagcagcagaaatcatttctgttttctgttgatgactgtcttgcttactcagtgactagtgcacgggctctgagatctgcagaggagtcctgaggcacgtgtacacagttgtccacgtgcgtgcacatgttgtagacgtgtccctgtgttggaacatctggagtgtggttctccagttgtctagcccagagtctgcctccctggccccctcccagctccttcatcattagctgtgtggatgaaggcgagttgccttggtgtccccatctgtacaatgggaataataattggctctgcctcatggggtcattgagatgattaagtgagatagttcatgtgaagtgcgtagagttgggctgggtgcacagaggtgctcgatggatgttagttattggctggatttgaatctaagcctgtctgactctcagactccaaacgtgtgctcttcctagagactgctcagttggtaatttacaaactttcagtaagtaaataagacatttcactggttttaaatttctgggagcacatgatgagcagtctccctttcaccctgatcccacaagccccctggtcctctcccctgtggtggctgccactctgaccagtttctagtgcacatcccaagatactctgtgcatatccagtaagatctcacttaacgtcttcgataggttcttgaggactgtgcctttaaatgaaatatataatgaaaccaatttttttctcactgttataaaaaagtgacgttgaaggaattgatgttatttaaggacctgctgtacaattcagttgatactgcactttccaagaacctatccccaatgttcagtgaagacttactgtacaagcacatgttgattttgtgtaacccttttttcccctccccatacatattctagcatggtatactcagtgatcggccccttcttggagatctttccacgtcaccacagaaagcactccccgttctcttctgtggcagcatggtcttccaccatatggatcttcataagtgattcagtcccttcttgttggacttttatttagttactaatttttggcgattacaaacagtgcagcaatgtgtgtgagtgcatatgtgggtgagttcaccctgtgagatcagctcctggaagtgagactcctggacgagaaaggttatgcatttatattgtgatggatattaccaacttgctgccgtcgagacggttgaatctgcatccccccagccctggccgatacagtctgttatccgtctctctgactttcaccaatctggtacataaaacatggttatcataatgtagttgtaatttgcatttgttgtatgaatgaggttgagtattttctaatttttatatgttggaagccttttgtagttaattttctgtacttaacattcaaacatatcttttgttcatgttttctgttgtgttaggttttctttttaaaaaaatcagtttgtaggatcttaatatatttgagagagattagtcatttgtgatataagctgcaaatataatacgtggtgttcctggctaagaggattcatgatcaaaccatgggttttccttaaattgatacataaatataagtaattctccatccaagtcctattctttttttctttttttttagacagggcctcactctgtcacccaggctggagtgcagtggcgcaatccgtgcttaagccaccctcctgcctcaacctcctgagtagctgggatgacaggcgtgggcgtggtgtgcaccaccagcccggctaattttttatatttttagagatggggtctcactctgtcatccagcctggtctcaaactcctggactcaggcgatccacctgcctcaaccttccaacaatcccatgctgggattacaggcatgagccaccacacccagctccaagtcctgttcttaaggatgtgtaggaaaaataaatgagcatgactggtcaggaaaattgtgaaaaagggaggacctagatcttattggtattaagcttatcatgaagcaattgtaattaaaacaatgtgggaaaaagaaaaccaaacgaaatcattgtgatattggtgaaagacaagttaatgaagagtccaaaaaatgtgagaattatgaaaatattggcatttgcaaacagtgggtaaaagatgggtaagtaaatgttgttgagacactggagtgctcatccggaggaaaacatacacagatgcacacctcagtctttcactgaaacaactcccggtggatttaagatttaatgataaaaacttaaaatgtaaaaatagttgagaaaaccgtgggctgatttaaaaaacagtctagggagcaaagatcaaaagatgaaaatatttatacatttgaattacagaaaagtcaagattttctgcctggcaaaaccaccacaactaaagtagaaagacagcaacgtgggcggcgctaggcaggccttaccactgtctgcttgcccccacagcctccattcctgctcttgatttccgggttggggtgccagtgccaggcccttcatcttggagaactctgcaaagctgacagtggtgtgctgtgtcggtggccggcaggatggaaagaccctgattccagccctggacaggttctcgcttcctgacccaggtggctctcaggagatggcgttgtggttgaaaacttgaggcctgccagctaggatttcagaattgtcctgttctcctggaactggggcaagtctgggttgttgacgctgtgcttgtgggtgcttccctgcctctggccccctcagattgtatctcggaccacatgatagctccccccagcctcaatccctgcacatcaggaaaggacgtctagccagctgtgttgtcggcccactccccttcctgatgaaggcagaaggctcaggagcctgtgtcccggagccacagggacctgggggtgttgggggagatttgctggttatacagcctcagttcggttgttttgcctcttgacttccttgcttcatgtgtaaaatggtgacagtggcctctgcctcctaaggacatggagattatgtgctaaggagattaggtctgtcatttgctcactgcagcacctggaatataagggtcccggtagttctggtggaggtgattatcagaatcatgctggtggaaagccaaagaaggccagaaaggcctccgctgaggccagagaacatccagcctcatgtgaggaagaaagtcctatttgctgacacctgtacagcatggtcagctctagtcacagagggaggtaatcgatggctggccctggctgtgtgctcatcgcgactataggaaggatatttctttaccctcactccacaggcgaggaagcaggcttggggaggggagggatgtgcccttccccaggctgcacagctggaggctcagcccctgccctctaacccctgggcatccttctgcctggggagggagcacctctgtgcttgaggtggcttgggaagaagagcactggccagccatggaggagtgctgtgggcaagaggattccgcgagttccttcctccaggcctggcaacaggaggttcatgtgtgggatcctctccgctctccccgcaacacacacagggcggtcaggctttgttacgtggcttctgactccccaccttgtggatccagacctgccagcccttttatgctccctttttttctttttctgctagcctgtgattcgtactttccccccaggacaggactagattggtgcctggcaacagaggggaggggttagctcctatcagctctgactctggcctctcaggtgccactgtgaacaataacacagatgaagcagccccttggccaagatgcacgggatcgagggactcatctggcaggttgaggggactgctaggggtgagctttcctaggatgctggggaatagccacgtcgtgatgtggctctatcaaggctcctgccttttgctcctaagggctctgacaagttatcttccccttacaggataaatccccattcctctctcatccaaatactaataaactacaatgtgaaaaaaatcatagctaaatcctgttctcaaccttgcagttacctgtcggggcctgtttgccttaatctgcttttctccccttccctttcccttcccttccatccttcctttgtttcaacaaatgaaaaagaaaagcttggggtagggggaccagctattttatgaggacagatttggttgtgctgtattaaccaacagcctcagaatcttagctgaaaaccgtgggttattccgcactcatgccacatgtccacagggccagctgggggctctgtccatcttattcactcagagatctaaaactgagcagccccatctggaaggttgctggtcctgcaccagaggggagagagggctctggagaccttactcctgcagttacatgctctgcccaggaaacggcatgttctgttttcactcacagctcattggccagaacgagtcacatgatcacccatttaccagggaatcaggaagtgcagtcctgccttgtgtccagaaaaggggctgataggccgtgtgcggtggctcacacctgtaatcccagcattttgggaggccaaggcgggcagatcacatgagatcaggagttcaagaccagcctggccaaacatggtgaaacccagcacatctctacaaaacaaacaaacaaacaagcaaaaacagaaaaggggctgctatacccacagtccttttattttcatattctgggttttcttatcagccttttccacagtaaatgttggttcatgtggttgtaattcaagcacctactcttatctctatcaagacctcttcattgtcatctcagttactgtttttttctttgtttttgtttttttgtttttgttgttttttaagagatatggccaggcacagtggctcacgcctgtaatcccagcactttgggaggctgaggcaggtgaatcacttgagtttaggagttcaagaccagcctgcccaacatctggtagagatgagtagtgaaacccatctctactaaaaatacaaaaattagctgggtgtggtggtgcacgcttgtaatcccagctacttgggaagctaggcaggagaatcacttggacccgggaggcagaggttgcactgagtggagatcatgccactgtactccagcctcgacggtagaccgagactgtctcaaaaaaaaaaaaaaaaagatgtggtcttgccatgttggccagggtggattcaaactcctgggctcaaatgatcctcccacctcagccccatgagtagctgggattacaagtgtgccccactgtgcccagccacaccatctcagtggctcttgactagccctttgtggtggcatgcccagcattagccagcaccccgttttcacacatgctctctgtgtcttttctcttgtcaatatgttgtcagtgactctccctaggccagaagtggccttcacttgttgatcatttccttaggccagcatcctgggagtgggtgtgcttatcctttgcctgctcttggacctggccttccagcacccagtgttgggaacgcagaacaggactggcccatcctgagaactcagggtcagtcctattcttaaggagctgtgcttgctgaatgggtgtagcttttctgggtctaatgtcagctcgtaaattcccagaactttggctctgcaaggtagcaccatcctcaggccatttagttgtcttgaccctttatcttctagggagaaaagttacccactcttatgccttcacgagtttgccgtttcttcccattatccgagtaattggaaaccagttactcagaaatcagggaattgggtcagagagcattttcaacagcttccctccccagcctggggcagaggctgctagggtgaccagtaccatccttgtcccagcctgctggtcttggtggcagccccaaatgacctttagctcttgacctctctggagcacctttgagaatgagagttgttcttgccagggaaaagactccatctcctcttctccagtcttcctttggaatcaaacccactgaaaacacaccactggcatggagtcctctgaggccaagctcgtttctttttctttttcttttctttttttttttgagacagggtctcattctgtcgcccaagctggagtgcagtggcatcatctcggctcactgcaacctccgcctcccgggttcaagcaattctcccacctcagcctcccaagtagctgggactacaggtgcacaccaccacacctggctaatttttgtattgtttggtagagacagggtttcaccatgttggccaggctggtcttaaactcctgacctcaagtgatcggcccacctggcctcccaaagtgctgggattacaggcacaagccactatgtccggccccaacatccttctggaagtctgtccatgaggttcccagatctgactttcccttctggagagacctgcttctgcttggcaaggcctttgaactttggcaatggcagttctgtcccagattctcagatccatggagagggcagaggaataagtcagacttcagccctctcaccctttattggggccattttgtctcaagcttggttgggacaaaacttttcggaagtttccactggtcagtaataataagaatagtaagtatagggaaatacaatagctgacatttattgagtgtcactggctaggtactgctaagagtgagtgtgaagttgtgagactgtgacatgttatttaaccaccctgtgcctctcatgagtccccgtctcagactattgtgagaattgagcaactcagtgcatgtgaagtgcttagagtagagcctggcaccgagcaagtgtgcaagagctgggtgctagtgctgggatcgcgaggcttcttgctttaaagacaaggaaactgaggttcctagagggcggtggccacacagccctccccattatctgagtaattggaaaccagttactgagaaattgaggaattgggtcagaaagattatatgataccgtgggggaagagcagcccccagcgcaggagcaggagacagtggattaaagaatcagcatcataactggggttacggtgcaatcctggagcgacgtgcaaagggttctggggctgtgggcaacacaagggagccactaattcttcctgtttgggctgaggtgagttgagaaatgtgaaagaggattgaacttttgctctgggactcataacaatcctgtgaggtgcagggaagggtgagtagcatcctcattttatgactggggaaactgaggtaccacacagctcagtgacctgctcttgttcagaagcagtggattggagatgggtttctaggcctgtctgcctggcccacccctccccagttccagatcctgggagagacagggatagtgtcagggcctagctcagcttggttaccaggctgggtacgattgggttaatcattttggaagtcaaagaggactctggggccactggggtttgcaggcctttgtgccgtctcccagccctgcccccacctctagtaagtctctgccttcgtccctgagggaaacagtggccccttgttttctctgagttctgaactccaagcgccacacagagcaggatccagcatgggccctgcgagatggcatgacttggaaacggagtgcccacagacctcaggccccggcgggcagcctttcattgagacacccttgctcctgctgggagggacaaaccagaccccgtcctctgaggagaacaagaagtccctgggaatgttcttttttctgggggcagagtgtggtcagaaaagcagaatgacaaccttgaaatgagttcctgtccccatcgcatctgggagacctgcctctgtggtgtccttccccccgggcatccccctgcacagtgtccttttctccgtggcctccccagtctcaggagctgggccctttctcctgtgggggccgcacccaagggcccatctcttttctagctagtggagggagaccgcagcctgtttgcagtgtgttcaggggacagaccccttcagggcagttgtggcatgtcaggcacctgaggaagagccactagagctgccagcagccctgctggtacccagcacagacgccacagcgagaggcggccgcacccgagagcagcccaggcctgatgtgtgtcccaagctgctgttctcacagaagggttttactggcatgaaaatgcttggaaaatacacaaaggagggtggcccgtttccagagctcagctgtttaccttcagtggagcgccggggatgcggagagcttattttccaaacagctgcggttgtcaggtctacgggcctcaggctgatgccaggggaggacaccaagggcgtcccctctgctcacctccttccccagcgccaagggaaccccacagtttctcccaggcagggaaacctggagggctgtctggagatgtgggtgctggtgggcatgggggttctgtgggcccggatgcgtcgctcctgtggcccggctccccctgcgctcgtagctgtcttggcctctcgtttgtggtgcctgacccaccgaagccacaggctgtagtggaaatgggttggtgtttggctctgtctgagagcccagtgttctctgcccatggcctctctaccttccttcagagtctgctttttctgggaagaggtattgggtggagtgtaatttggaatctgtgaagagagccatcaaagctcttgcagtttcttgtttctatcaaaggggaaactgaggccccaggggatggtgagcccaggtcagcgggctgctcatggagactgacacatgggcattgctgcacagcctccatcctggccgcttcacctgcatggccttgcttggtcattttccttcctgggccgttggtgtcctggtctttgcagcagggagcgtcttccccggcccctgggcttgccgtgaggatgagccggcgccaagtctcaggagatattgggaagtgtctttcccttccccttcctcacccaagagccccagagatgggcagcttctcagctagcctggttttggttttattttatgttgttttgtacacaggcctgtcaccatggggagggaacagcattccttagtagtttcttattgtgaggtctaaaggatattttttttttctatataggggaaatcccttaacatctttcctggcaaacagtaagaaagaggagttaaagacaccagcagacaagagctgctgcgttccgggggtgcaacggagaggagtttagtaagggaccatcacagggtgtgggcaggcccgagagccagcacaggacaaagttccccggtgctaacaagccctgagagctgtcaccacccctaggcctgaggggactaggggaccaaaaatgtacctggagccataggggaggcggtagtgttgagagaggggctgccctgctccatgggggctgtgactgctgccagaaatatggcagggggtgggggcgtgaggatgctgcaaatacattccctccctctctccttcttgcccatcttctgctgtgcctccagttggcccgacttggccagaggacaaggcagccaggtgattgtggcctgagaggacagctgcctagggcacagagcaggcgtggggagcggggttgcaggggcaggcagcggggaatggagtgagaagcgcagccttagatctgagtttgtgtccccacttcaccgccttcctgctgtgagaccctaggcaggttttaaaagtctccgtcctccacttttctcattcgtaaaatcacttctcatagtggttgttaaatacaatgaaagaaatgcacgcaagctttgagcgtggtgcccactgccagtgaccatttgtagttgtcattatgatgtctttcgtaacatttttaaaacagtcagccttgaatcctggagggaaacccacttgggggtggggatgagagcaggggtggggcttgtggccttctctggcctctgctaaggccagattgggggtcagccaggtgccgggctggcgccgctgcctccgaggcactggccttgcaggtggtggtggccgcgtgccgggagggagacatgtggcgggtcaggaagcgggggtcaggctgccctggcttttggcaggtgctcctgtcttggggtcaggtgacgctgactgttggccagaggctctggctctcttggggcctgatcttcccaacctcaggcacttgcaaaaataaacaccttccctggcatagcaggagagcagtatggaacagattgcaggcagccctacgcgccttcgcttctcccgatgagcccagatttcagtgtgaagtgcaagtggctggtcgctcaaagcggcaatttctagattcctgaggaccacagctttgctaaggctttttatagattagcagaagcagtatccacttagatctaagttctgatctggctgtgcgatgttagtcatttacataaccccttggaaccctagttttcctagggcagatggggtgtgttgagaaaagcctttctctgtaaagccatttctcagcatcacttgcctggcctgttgacactattgccctgattcctcttatgtgtcttctgcatcctgggtagcatggggcttggggaacagaagttacaaacgtggggtgtgcccttgaggagttagcaggagagaagagttgtggggtcttggagggtttgtcctgcttgtcctgtctgtattttccatgtcagccctcctcctgccccatctccagagtgctacagggaggctcgagggtcctctggtgatatgccccagggtggacaagaggatgggggcagtggactcaggtgctgaagttgttgcttttgtctgtgttccctgcctcacagctgaaccttagccggccgatcgaggagcagggccccctggacgtcatcatccacaagctgactgacgtcatccttgaagccgaccagaatgatagccagtccctggagctggtgcacaggttccaggtgagtgaggaccatgcagcccttggctgtggcattttcaggaggaggaggggaggccctggaatggccgtgtgtgtatttagggcggtagcagctctctggaggtatagtctggagaaatggctctgccactggcaagacatgggctcgtgggcaggtacttctgtgcggcgtcagtgtcctcgggtgtagcgtggggactgaaccagggcatggttgggccgtctccaccccctggctgtgtagacacggtttactgatgaggcatcgctgagttccagtgtggcctccacgtcctcagcacaggcatgtgcaaccctttcccctggctcaggtaggcacaagggatggaacccttctgctgcacttggtaaaggggacccccgagggcctttgaactgagtcctgccttggtggagaaccctgcctctgcccattactttgacctgggtactcacctttgagcatggcctgaggtatcttgctgagtcccttggctgcttccctctccccacaccacttccccagcggcctcccaggtcctgatcgcacagtgacctgcccactgccctggggttctcatgctggctactgacttgtcctgtgttctctctgttgtggacaagaacgtgattctgtcctctagaaagcggctcagaggtcatgaaaaacaaagttgtattgtcagtgaaagtgcagtcaagatggtagctgttttcaggtgtgcctagtgggatggggatgcctgagatggggtttctagcgtgtgacaggcgcagatttggtgccctgcttttcttcaccaggacaaagggaatcttacccgcctcctagtcacccggtgctgccgtcctgccgacactgttctctccccgtgtgttcggggtcagccgccttggccccccttgcttccttggggctctcaccccgttccttggccaactccctgctgcacattcctgcttcccaccaggaagtggccccggacacagaggcagcctgctcctggcatcccctgcttgggggcagggcatgtcccacgttgtgccctccagggcgtctgccctgccagtggccccaagtccattccacttgctgaacactgtctccttgatcggactggagactgtgggaaaaacatggtcgggctcctctgtgacctcgtggagcctcagtttccttatttgtaaaatgggtgctaggaataagaaaagctcagaccatgttgggaggagtgtgctggggttcgaggggaacaagacagaggagatgtgtgccctggtgatgtgctgcttcctgagtccctgccctgtgccagggctgggctgatcagcactcacccatgtgctacatttgatccccacagccctcagtgcagactcaccagccttgttgataagcaggaagtggaggcgtggaagcatgtgcagcttgtccacagggacccagcagagccgggggtcagtcttgactttctcaggtgagccgctgctcatcctgagggcttgctcttctgttcctctctgcctccaacctacacaactgtcctggggtgtggtcccagctgatcccaagtcatacagcgactttcctctcccctgagccatttgctcctgcctcacccccgtctccttcggaaggcccctgagtgcccagttcatgtgcctgtggtgcccttggggcttattctctggaggagcacagccatgcctgggctgccacgcagacctttggggcagggatggtgcatctcttgctgagtccatctgggggacgatggccttccagatgcctgattaccgttacctcagaaagcactgcagagcagttaccgcttaccaagccctgctcgaaagcgcttcatggcggttgacccacttgctcccatgagctgtaaggttcaatgattcccgtcctgtggaggaagaagcagctgcaggacaactagaaagtggtccaggtgggatttgagcctgcgctagcttgctctcctcacctgtcgtgtggcctctccagagatggatgaggcggaggacttgggagtcaaactgtcttcaaggcagatccttgttccaaaacttaggaaccgcgtgcctccccacagcctcagttccttcctccttgggtgggcaggttgctgggaggagtaaatgcctgtgggtgtaaagtgcccattgtagctgagtgccacttcatcacacccacacggttgctcttcctagagaccacatctcccagctagcctgggcccggagttctggaacatctgctcccaagctcttatccctcttgcccacttcccagacacacacacagcccacagcccaggcaagtgatgtccaaacagtgaatgagagtgcccgctgtgttccttttctgggcagaaaacaatattaacagggagcgtgtgtggagggcagcatggggccttgtggcttaaggctgtcaggcagccacaggtgcatttctcaggcagtgtcttgtctgggtcttgggggatggttgccgtgacctcaccataacctcccagcactgatatttctgggataaattttcatcaccgtctgtgcttcagtaagaggccggatatctgataaggtgggaagtttcctcctttgtgaggagaacaatcctttggagaaaagggtgcggggctgcactttccagaggccccaggagagaggaggcaggcagggttggcacagagaatgactgagaggcactgggatgggggctggggaagaggcttccttctaccaccggtcactgggctgtcagcattgatcgtccccttccctctgccataagatgcaagttcagagccagaccacatagacccagggaggcggacacttgacctcagtcgtgccctttgttttcagatttttgttttaaattttattctctagacattaacaaggaggcatgagtgtggtttgaggactgggagggatagggatgctataggcagaggcaggggaagcagcacccagagctggggtcctcccattttgttgtgagcagggaaaccgaggcaagatgctttgccccagcagggactcagcttgaagggccttctccacagtccatactcaggtcctgggagggaggaggaagtggtttggggctgtgtgggtggagaaaaatgaatttctgagatgttcctcagggccccagagcactgcactgggctgcctctgtgaaagttccggtccccagggagggaagaaattcccagagccaggaggccgtgcctgcttctggctgccctggtgggcaggtggaggctgtgggccagaggcttactgcagaacattaaagctgcttgtcacagaaccttcatcactgccccagagttttggattttttttgtttttgtttgtttgttttttgtgtgtttttgattggcttctaaatggcttggcttggagactcaattgggatgattcagttgtttttctgctccaaggttcatgtggagccagcagcctgttgcccctgaggctctgcctgaggtttggttctcagtgtgcagaaccaggcaggggcccccagggcctgcccacgtgggcaagtggggccggcatgccgagagggtccctgcctcaggctcggggacactaggggcctcctggcctggtgagtggctttcccaggggggcaacacgagccttctcctcgctgtggcgcccagagccacctgacaggtgtgggtgcagggtgggaagggaggggcccaccgtcctcttctgctgccccttctagccctggaattgcccctgaaggggtgctgtgattgtgatccatgggccatgtggggctgcctcgggggaccttcctggggttctccctgaataagcttaggactaagaaggaagtttcagtctcaactgctgcctttgccctgtctttatcagctggaaggacggtaattgtccctcagatgtcccctgaattcccggtctgcacacagactgctaggagagtgtcctctgcggcagcactgctgggtgccctgcccgcgagctcctggccaggaggagaggccagcaggcagacccagaactgacctcacggcccctaaagtgatgagttaggaaaaacacaggtctgatcacagcacagcttggcttaaaacatcccatgctttcttattgctgtgacactgaaggccatgattgccagcttgacccatggggcctcggtgatctgccccacccgctccttccctggccccctcagcagctgcccaggctctgatgtgtgtccacctcagcgcctttgcacaagctgttccgtcagctcagtgccccttcccaagaaatgtcctccctcgtgagctgattaatgacacatctctcgtcccaggccctgccaactttgcacttttccttcatgcccttcggaagttcgtaattctttatcagtggctattgtctgtcccttcactgcggcagggattgtgtctgctcccagcagctggtgttcccattgccgcctgcagtgcctaagtgtttgggtggcggcgcatgcccagtgctggtcatgcgctggggcggcctttcatggggtgccctgatggccttgcggagggaggacgtggctctgctgggctgcttggagcggggagggaggaggccaggagcgttaatgaggcagatggcgctgcctgatgggcatgtgcggcgatgtctccaggtgtcagcgaggttggagagggagcagcaaggccggagcttgagggctttttcatgccaggctgtgcagcttggactctatcctgcagggagggtggggcggggatggcggtgatatgatcagatataattggcaagagagaggccctgcttggaaggggagattgccagtgcaagatgaactctgagcagctgaggacactgtttactctttggagcccaggtgcgtccaagttgaagaaggagctcatggccccaggctcagtgttgtgcccatcctcagccccaggtgcccctgcatgtggtcctgagcatcccctccctccgctgccatgaaggctggcctctgagcagcttgagccttgcccagcctacacaggacaaagttgcactcacctcctggctcctctcagtgtgtaatcatctaaagtggatctgggaaggaagctcctgccccgaaggatgccggaagagaatgcacacttggccacactggttcttctcatgttgtccctggaaggaaaccatgtgtagccttcagtagtgcctccccgaccccaccatcctcctgaggggacaggaagtgagtagggctgggagctggtgggagggggtgatgtttggggccctccctgctagtccgccaagcgaggccaggcttcgccacagggatagacagctcccctcacccagcacaggcttagctgggcttgcaccacgtggtcacggagggttaactacagctttgcagcctgaaatgacagccgtcatggcagagggatgagaaggcagtgaggcttatgctggctctcagtgtctgccctgtggtgacacggactcatccatctcactggacctccctacaggcaagggaacccaatactgcatagttcctttttcttcttaaaaacaattaaaataccttgtagggttattgttagcattaaactaattaaaatttgcgattcccctagtgcctggcatggtgtgaatggtgcacgtgtgtgtaagggtcagtcagccacgcttactgtgaatgcctggcatggtgtgagtggtgcacgtgtgtgtaagggtcagtcagccacgcttactgtgaatgcctggcatggtgtgagtggtgcacgtgtgtgtaagggtcagtcagccacgcttactgtgagtgcctggggtgtgatgatgcgtacgagccactcagtacaggcccggcgcctagtgaaccatcagtcaccgtggcttatgtcaatattattattacagtgacagtaggactactctgtcagccttatctgtggccccagctgacttgagagctctcagtcctaattggagtcagtgaggcagtgattatgaaagtgtccccaaacgggagatgcattctgtgctagggcagtggaaatgcctaaaaggcagggccaggtgggggtcagagggactcaagtgctgttcctagccccacccttcacctgctggcccacctgggcctcggtccccttgcctaccgcatagggaaggtgcaggatggcacagaacaccttcagagctgttgcgtctgcctccaaaggactacccaaggccgcggttcacgtttgccacaaatgtgatttcacagctgcattgaatcaaaccctgttggcccctgatgtttattgagcagtcgccagcacagggatggagaggaagtagaagaaacaaaggtttttgttgttctaggtgttcgagtccgacttggaagataacatctaaacctatcagaggataaataacaccgtagaatctaagtgggcttgtgtcggctttgcctttgtgcctgctgaccagtggggtcagagtaagaaccatgggccccgggaaggggtttgtgttgtcaccagggagccatgggagggctccctattttctaagaatgtaccacgtgacccattctgccacgggcgttctcatctcttatgtctttggtccccatctcagtccctgagataatggaattatttccccatttttcaggaggagacaactgcggcccggggaagttaagtcacttgcccagggtcaggtagaaagtggcaaggtcaggatcatagctcggaggggctttggtgacagctgatggcactgtgggtggtgtgagggttggtgatttcagggccaccttggcaggaggtcatcgtctgggattgcctctgacacagctggtgccgtgtgacgatgagactgctggccagcagatgctacgggaggcagagttggacgcatctggcagccctggtcccagagaaacagatcatgtcctgttctggggttgctgtgaggtcagcctctcgatgactgctgccctgggtcataggcgactcctcctgtggtggagacagccacacaatctgtccattgtgcaccaatgccaggccaggaatcgccctttctgcttcggggagggtgggaccattctgtgccgttagcccgttgcagttgcttccccttgtggaaagcaagcctggtccccaggaagacatgtggccctcttaccaaccaggaacagagctagactttgtgcagcccagttgggacaggggcaggagagggcaccccaaagcctgcgctctgagccagcatgtgggctgcagcccctctgcttgtgtgtggacggtcagggtttttcagctcaaggtctgggggcatgttgagttttagaaatatcaatgtttatcaataatacattttccccaaagttttagaaataacttttatgcacattatttctgggtttcttaacctcaacatgattgacatcttgggctggataattctgcactgctaggggctatcccaggcaatacagggtgcttagttgccttcccggctgctcattaccagatgccaacagcactccccaccctgcccctcatgacaaccaaaaatgtctccagatgttccctggtggagggagcccatgccacccctggtcgagcgtcactgcattttgtaagagatgggtccagcagctctgagagctcaggtgggccagtcaagttgtttctgatttttgtgtggacactgaggccccactgggtgcagtttctgggttttagtgtttggaatcacacaccaagaggactaacatcttgtcacttcttttcttcagtaatattagtacctgcggcagaaaggacaccctgttttctgtttcctcctggtttgtgtgagtggcatgacttcccaacgtgtttctgtgctgcctgtgcaggctgtgtgcccgtgataaagcccactgtgtctgcctttgtcttcatgtaataaatcccattgccacctcaccagccaagagcacagccggccgggtaaaccacgcgctgggcctctgctgacctcggccctctgggatggacagagtgaggcatgaggatatcctctgagcccctccctataggtccctgccccaggcctcccacgcctcctggcagccagccctggatctggccctggcccctacccgtttgtctctccactgatctgtgagatcattcatcagtaactattatgttcattcagcaagtcttagtgagaacttactgtctgccagagttctcctaaaagacattacagatgcaacaatgaataagacctggtggacgcagcccctgccctgctggagctgtatctgagtgtgagtgcatcggatgatgggaacaaaacataggtaaatagaggacaaggtaacacagccccagtgatggcgagtactaggaagaaacacaccgaggcctgggagaacagggaggtccttgttactgatcctctgaagagctgacattgagttgaggcctaaagggcaggacactcaggaggggagcaggcaagggagcagcacctgaccaggcccttcagtgaaacaggatggaggcataaggacccgcagtagctgggtgcagctggagcacggtggatagggctgtctgcagtgggctggcaggagccaggctgagcctgggcctggtggcctcctgggagcgctgggtagctctttgaggacacaaaatatcgtgccagctcccctctttgatggccccaagttgagccacagacaacgtgccattttctagtccccaagctctctgaggaggaaggggccctgcccattgcagcagtcagaggtcagggaggagctcctggggcggcaggacgactcccacttctgagcatgcccgcagccactgaagaggatggctgacatgtggaacagaggccagtgtcatccacggggtagatgtcgtagccaggtcacccctggcagcaggatctgtctctcttattgtgcacctagagcctgtaccagaaactagaagactcgggtggctggatgcagaggtgaggagcccaggggtcctctggcctcagtgacccagttggcctaggtcagcagcaccaccgcaaactgtgccctgattctggatgactgttctctccctgcagacactagtttgtaagccctgctggctgtgagtcacatttgcaaacccagcaatgcatcacacggacaaggcaggggagcccatgggctgccaggaggcattggcttattctgggaactgaaagtcagactcggccgggcgactgtgggccagggtggggtgggtggggctccagcaggcatgtcacctttggccttgatgtagggaagctgctcttctgtgtattattgtatacaggggaggggcagctgcataggcccacctgagcaggtgcgtgggaatgcatgtaggggttcagacaggtgcttagggggcgtggggctgctgctgaggtgggtggaacccagctccgtgtgaccttgggcaggcagcccctttcttgccctcctgttgttcagctggtagctgtgacagtgggccagatgaccgaccccttccagctccatctgcgtggaaatcccagctgtcccttcatcctgcgggatccttccctggtcgcctagaggacctgactagtgtgatggtgctgtgacacagcatgtggcatttgtcaggggaatagctctggctgggcaccttgcctgcctcccgctgacagaaggtggagaaagctcataaaagtttggtgtgaaatctggggacagaggggaggtattgttttcagtggcaggcctggaaaaagggggagtttgctgtctccaaataatagtgttctctttccttccagccctctcctctgtagcagtcagggttattttttggcctgaacaccattgttttgcatgggtcttcctgctggctcttgaacaacagtttcccccccagagagcctgtggtttctcccagccgtggctcacaccacatgccaggcggctaagtgaggagcatgacactgtaatgcctcagtagcccccatgggaggatgacccgaagtgaccattgtgggtagcacccaccttcaggatgggtgtgcctgtgacctgcaggccacaggagacacagtggggtctgcatgcagaatcacattcagggtgccccatttgcgtgctcgggcccctgccctgctccgccccacacagccccttttaatgccttcccccaatctgaaatggagaatcatgtacagttcattcaccctggaggctggagcctggttgctttgaatcccttattctatattcattctgttcaccagggaggggatgggttgttgttggcgtctgctccagggaagcttccccagcccttcccagggctccagcgtttcccctaccccttgttgggcctgggacaccgagtttgaccagcttgcacatggactgtgagtctgatggatcctaagtgtggcttgccctgcgcaccactgctcggctctcagcagtcctgaacgagctggcacatgcatttggaacaagtttgtgaacagagtccctctgctgctcagccagccgcttcccatcttggggggcagccatcagttccagtggcctggagcctttccagggggttctgtgggactgaacagagacagtcttcctcgctgcacagcccctgtacaatggggctgtacggtatgccctggaagtgatctcatcttagtcttttgcaggcagcctcattctaactgctgcatgttaaacggcctccctgtcctttttaccaagccagctctctactggtgtatacctagggcatttctgatcatgttttagaaacatgctgtagtgaatagcctagtacatgtatttttgggtgcacaggtgaggaattctgtaggataaacacctaggaatcgggatgctgagtttgcgcattctgcattttggctgttgtccggtttctctctgcagaagcagtaccagttacactgccaccaaccaaggactggtccctttccaccaccttaggaagcgtctctaatcagtttaccttggcatggagtcacagagtgttggagggtgccaggatcctggcagtctcctcctcttgcctgttggttttgctgctgggagctccaggccctgggaagggtggtgtcatgctgcctcacttggcttgcccggaccctgaatctgggccatcttgcccctgtctggtgctgtgttctcaaacttcacttttctcttccgcactccatgtctgaccaccccagcctgagctcatgggtttaaatattggctcacaggagctgatagacctagaggcagattgcatcagagttttctttttgccagctctaccaaatcacagagatcactgtataaaagatgaaggcagcccatcagttcttcctgaacagtgaggtccagcacacatacccctaaggccagcaccacatctgacacaccaccaagaccgcatccatccccagctccatcctgtggccttgcaggctgctggactggtcactccataacccatagctgtccttgtcacttcccagctcaggaccctgttgctttagggtcaagtccaaactcctcagctggtccgtctcctgctctctaccttgtcctcacttttcatgttgagactgccgtccgccccagccctgccaggcccccagcaggcccgtgaatgtgctggactccctcaccccagacctctgcttttgctgtcccctctgcttggagtaccctttctcccctggcccatgcctgtggccctttgtggttgacatcaccaacctcagcaggctcctccccagcccccaaccctgtgccccccgcacccacactcctctgctcctttattgctggtcagccccacgcctctcctttgctcagccacatggccgccacttaggagcctctgggagggtggggagaatgtggctgctctatagctgaataggtgacatccatcaccacacacgcacgcacacacacacactcatatgctctcacactcattctcacacacacacacatatgctctcacactcatacacacacacgcactcactcacaagctcccacatacacgtgcttctcagaggctgtcactctttctgctctcgtactgtctgggaggcctcaggctgagtgctcagacgtgggagatttctctggaatacaaatgagggttgcttaagacccaagtgtctgctgatgggggagctcaactctcccaaggagccgttttagaaaagttaggaaagaaggagtgaggaaatggcctcaacacactaggactgaatccaggcaaaacagagaccgcagggaaccgcagcctcagaggacagctttgcttgggctggtggtcggtgcctgtcgccaatgcacagctgtccactgcccaccagggtgtgcctcctgctggcctccctccctcacctgtggtgggcatggatctcgctggcttgcaggcgactgggatgcgtgcagtgaccatgccgtgggtgtgctctgaggacagcaggccctggctcctgcgtttgaatgtctctgggcctgggaggcatctggctccgttcaggggcctaacagctctgtttttggtttgttcgtcacatcacagaatcaaataatctagaacttaagaggcagaaaggatgttataaatgaattattctagcccacacatcttacagatgggaaactgagatacagataacttaagtgactttcagaaacacacataaagtgaatggcagttctaggacttgtaacccaagtttcttgactctgcatttgtttcaacttgcacagtgccccaggacccacgcgctcgggttaagttagccaggtgtagctgggctgcaaaagattatctgacagtgatgggcaggcagaagccttggctgactgtcaggactgttacataggttgcacgctgcccagcccagtggtaggctttgtgaatggcaccctgggtagctaggcttggtggtcctgtcccagcgtacagtggatgctgctgcaacctccttttggctcttgagagcccacctccaaggtttacctgcatgcatctccaactccaaccctatgccagcctggccacctggcacattctgttgcacctaggcctagtgtggatttcccaggactatctgtggcatgtggttttctgtaagctgtaatcaacaggcaggtgttctgggaggtgccaggaagacttcttctgggggatgttcggctggccttggttgatgacaagttaatcaacaggggttggtttcacggttgcagtggtctgccaagagggttcattacttgtccttcccagaaagcattgcttggcctggccccaccccctccccatgtgacctgacctcccagggagaggctttgctttctgcagaaccacactttctgccttcgaaagtacaactgctcttgacactgttatgtctgttagtcctccccctgcaggggccactccattcagcagctgccttgggagccctcctgtgcataagtgcagtgctggccctgacacgctcttccccctgcgccacgcggaccctcctcacagaggccctgtggactgtggccttcagttatgtcatgtatttactgtcctaaggggtgtgtgtcttcatttgctttcatctgtcttgctccagggctgggaagagatgcagagcctctggtccagctgtggctttgagagaacaaacaaccagtgaggaccatgggttgggaggaacagtggaaagggagctgcagtctcagctctgccactctcccttgcgaccttggcctcgctaccactgcctttcccctttccaaaaagatgggggctggatgaagggtccatctgggttttgctagttctgaccatctttgcctttccctctgggaaaggaaatcgcaaactggatctactattttttttcttggatgctctacctcatgcagaccccaaatggaacacacccggcctccctggactgtcaggctggtggcctcgccttggggtagtgaacatgagaaaggcttccctttttcctgaaatgccccagagcaaccctggccctagttagagttgagatgcttttcatttcgccaggccttccatgccttgggtctttgactggagggctctggagccagaggccctgggttcagactccatcttggccactgctcgcagggagagccctggccacctactaggtgctttgagccctactttgttttcttttttcttcttattttattttgagacagggtctcactgtaatgccccggctgagtgcaatgtcgtgattactgctcactggagccccgaccttcctggctcaagtgattctcccacctcagcctcctgagtaggtgcgcaccaccatgcctggctaatttttaattttttgtagagacagggtcttgctatgttgcccaggctggtcttgaactctcagactcaagcagtccacttgccttggcctcacagaatgctggaattacagacgtgagccaccacacctggccaggcctagtttctttgattgtcaaatgaggctgctaacgggatctacatagggttgttttgagggggaaacatgtccattcctgcaaggtgtataggtctgtgacccgtgcgtggtgagcatgtttataactcaccctggaatcttggcaggacccccgtcaagatgccaaggcttcaggaaccagagacttccagggtttcacccggcgctgggtacggaggagctggtggaaaggccaggccttgtggccctcagctgggcctggctgtgctctcaggaggagccaggggagtgaaattgtgctgagtgagcccagggtcgcttcctttcccatgaaagcccctgtgagtacttttaacagccataaggaagtaatttcagttcttctgtcaagggtagaatcactggtgttagtggggtagctgagtgttaactgaacacacaggccctgatgcagtggatcctagagtcggctgggaagtttcctctgggtgtggcacgctgggttcgccttggtgctgacacctatctccttctggagccaggtggtgatcaggattctagaatcctgttgggttcagtacaggaggctgttgtcatccccagctgatgctgctgtggccatgggggaggtgacggaattgtgccccctctgatgcttgatctattccacgtggaaagctggagtcccgagaagcaaactccaggcaggcccacgctgactttcaggcctgtgcttgccgttttttgtttgtttgtttgtttgtttgtttttcctgagacagattcttgctctgtcacccaggctggagtgcagtggcacaatctcagctcatgcaacctctgcctcccaggtacaagcgattctcctgcctcagcctcctgagtagctgggattacaggcgcccaccaccatgcccggctaatttttgtgtttttaatagagacggggtttcaccatgttggccaggctggtctctaactggctggttttgaactcctgaccttgtgatactcccgcgtcagcctcccaaagtggtgggattacaggcgtgagccaccgtgcccagcctttttttttttttttttttttttagttggagtctcactttatctctcaggctggagtgaagtggagtggtgcaatctcagctcattgcaacctctgcctcccaagttcaagtgattctcctgcctcagcctcctgagtagctgggattacaggtgtgcaccaccatgcacggcaatttttgtatttttgcggggggttttgctatgttggccagtctggtttcaaactcctgacctcaggtgatccacctgcctcagcctcccaaagtgctgggattacaggcgcaagccaccgcgagccacagtgatatgtcgagttcactaacgtttagctttcaggtgctccctagcctttctggagatgcacaacagttcagtcacagagcctgtttctgtaggtgaccaggtgcactgcagtggcctggcgtttgacactggaatggctgattttgaatcctggcaaagccccccagctggttgtgtttgaccttgagccagtcacattgcctctcagaaacttggtttctttatttataaaatgggaataaaaacagagacgttttgctctgtaaaccatggggctgctctgagaatcaaatgcaatattttgtgtcactgcccttgttgaaccagaaaagtgctacacttgtatactgtggtggatcattatgactatgatttaaaacatccatgcctgaggagccaaatcctggggtcttttgtattttcatttcaatttatacacccaagagaagtgaaaacgtatgttgacacaaaaatttatacacgtatgttcacagcggcattgctcctaacagccaaaaagtggaaacaacccaaattccttccaatgatgaatggataaacaaaatacactacaccatgccgtgaagtactatttcatcttaaagaagaacaaagcactgccgcacgctgcaacatggatgcattttaaaacacgatgtgagcaaaaggagcctgtcatgaaggaccacacatcacatggcttcgcttgaaggaaatgcccagaataggcagatctacccagacagaaagtagatgtgtggttgccagaggctgggacttggggctgagagtgaaagggaatgggatttccttcggatgggatgaaaacgttctaaaattgagctgatcgttgcacaaccctgttaatattccaaaagcccttgctttggggtaaattgcatcgtatgtgaatgatatctcaatcaggctgtttttaataaaaatcctatgaggtaggaacaagtacaatctccatttacaggtgaggcccgggcttacaatgaggaaggcccagttaactgggcctggcggcctccagctccctggcatgcagtcccttcatgccatcagccctcactctacagagaagggagctgaggcccagcaaggaggaggggtttccaggctctgtgtggggtcttttcctcccttccagcctccccacccactggaggagagatttcctaagcagcgtgtggagcaggaccttcccagccctgccatggtacccgctcggcgctcaggccatgcagcccagtgggcagaatttcagcccctgggtcctgagtgaaggaaggagcaagctgttaggacgggcagggccggagcccgggactttgtctctgaccaaaacctctcagagtctcagggtcctgagaaaaatggggagaaaccctgccaccctctctgtgctgtgggggacccgcaaatacgggaaggtgctgcgagacctgccaggacttgccttgtgcgcagccgtccctgctggcttaggggtcagtccgggcccctgggcctctgccaggcgggtcacgcacaggctctcctcagagcacaggcctagggcagatgggggctggaactcacagaggtttccagtttccatgatgtccactttatctgtttctttttctgtcttgtgcttttggggtcacatttaagaaactgttgtttaatccaaggtcacgaagatttatgaccgtgttttcttctaaaagttttatagtttgggcttttacccaatagcgtttttatattgaaagaagcagtgtgcatatagcaagtcccaggtaagtggccactgcctttatttttaaatgattactgatgatgatcatttttatttattattattatccttactataattaatctctcgttgtctttcccatctgggtagctggctcttatttcttcttgaaagatagtattggtgtttgaatccatttctggcacacttaggggtgcagggtagaaggggaagatctgattacctgcctcccatttccccccaaactttgtgttatgggaaattaaaaatatttgagaagagagaatgccgcaacgtgctcccaggtgccacctcccagcctcatgcgtcagcagctgcagccactctcatttcatccgtccctcacctacttctgtccctgcccccaacccggattgttttgaaacacatcccagattcctatttaatctgtgagtcctttttgagttgcatctctgaaaaacgaatcccttggaaggtcgctgcctggagcctgggctgccggtggggttgggaggttgtgttgcaccccaggcatcagcaggagggtgggcatgggccagaaccacagcccccttccatgggcacagctggctcctctggggtcggctgcacagggcaaggcagggtgagcccagaaaccttgcgtcaggtttagccctaggagcccaggtgttgcagggtaatgagaatcctttcatttttgtgtctacaaactccttttgcatccatgatctccatgatgcccacagcagctgcctccggtaggctttattcagaatggaccttacccaggatgagtctcagagggttaactccagacacagaatcaatgtcagaggcagaatctggactcaggactctgacagcattttccattagaaggagcaaatccctgtgtctcactccctgctcatttcctgcctgtgaggatcgaggaggaaagagtatctctgacgttcatctcattctgctcagattctcagtggcagcttagcaaagggccagttgtctctgttggcatcattccatgggcttggggcctctgaaaaccctgagagagcttgcgctgtaggtgggcaccgtgacgctctgccccaggtgtgttccagccctcatcctggcaggggctgaatgtttctgcctagagccaggctgcccttgttagctccaggatcccactcttggtgtcctttagctggcaggccctgcgagggaacatgtgcttacaatttgccatggagacggcgctgcccttcttcctctgagtggtgataaaatggtacggaagctcacccacccagcagattggtaattctaagagacttgtgaaaaatacacgaggccctcagtataataggtaagctggaaagcttggcacaaagtccgcttgtggatagtgaggtgactggaaaaattctttgccctctctgttcccatcccagaagagatcgtgtttaggaagaattcttctgttaatgctgatgctttcatccccagtcaaaagctagttgacgcctgcttgtcagatgttttcccctttggtttcatgtagccgctttccctcatgagtttggcttaacttcatgtcttaatgaatctgagttctctctttaaaggtcactgtcctaacgcataaacatggaatcagaatcgccctcatttattcagagctgagcggagacttttcttgggacttcgaggggaggaaggagcacatctgtgttctaagtggcctcggttgctgagggagaattgggtcatcccatccacgtgctcggctgttggcccccttttggaaggaaggcagcgaatgcgtgggtggccctcccgttacctggaatgcctctagctggtggtccatcccgttctagaatggctcccctgtgcagccttcaagtttacctttacaaatacactctccattttctcagtctgtttacacccttggaaccagaggccatctttacagagaccctaagggcatctggagtattcttcatgtcacagatgaggagactgagactctgagaagccaagtgacttgcccaaaggtgactctgagaggtgacgacatcgggcgcctgggtttcttgactctaggtcacatagccttcccactacaccaggctgcttcctggtgtgtttaggggaagggagtgaggacagccaagtgcctttagctcataaccgaggacatgaacttgctagccaggactatagatctggcggggtgaagcggagaaggcttttgatcatctgagtatctgctgcaccccacataatgccctgagcactgtcagtgatgtgaagtctcttgagtggatgacctttttttttttttaaatttaagttctagggtacatgtgcacaacgtgcaggtttgttacctatgtatacatgtgccatgttggtgtgctgcatccgttaactcgtcatttacattaggtatatctcccagtgctatccctccccctccccccaccccgcgacaggccccggtgtgtgatattccccaccctgtgtccaagtgttctcattgttcaattcccacctatgagtgagaacatgcagtgtttggttttctgtcctcgcaatagtttgctcagagtgatggtttctagctgagtggatgaccttttaatgttgacatttatttttctttattttttttggagacagggtcttactctattgccaaggctggagtgcagtggcaccattgtgcattgctgcagcctcaatctcctgggcctgagtgatcctcccacctcagcctcccaaggagctgggactaggggcttgtgccactgcacccagctattaatgttgggctgtgaatatgatttcatacatatgtgtgagtctcggcggggagggcctcatgcatgacctgctctcttggaagcatggactgcatttaaaagaacaagctctgatgacggaatggtgccaagaggggtagttgcccatggagagctcccaaatgagacgagggatcaggtgtaggtgcttgggtgaggctgagactgtcaggagagaggcactgggtgtggctgcttggccccagggcagctctagataaaaccttccttaaggagactcctcggttagtccccaggctccatgtgggcggcagacttgggctctcccgcatcagtgcctggttcactgtctacaggcagtgggttggtggccaaatggcttgctgacggctggagggttctgccccgcatctaggtcctcgcacttatgtgcagggagaggatggctaaggggtgaggagagtcacaggcgtgaggactggaatgcgaggcctcccctaggttacgccggccaccactgaggccagaggaagtctttaaacattcagacagaaaggagcccagggccagatactctgccgcgaaatccaaggagaggctgatttcagagcagaagtgggaatatgagtctctggtttttgtgttaaaagtggcttttggcttaacaagtggtcactaggaccaaaataagttcacttaagaaaaataattccaaatggctctttctctctgtccataaggctcactaggaaggcagcactggggtgtgtttccccagcctgtgcaggcctcactgacgggctgtggagtgggtgagcagagggcaggggggctggctgggcggaggaatcacgctggcatgtctgctgcccccggctctcacaaccaagtatcacaaacagggaggcttttaacgctgcaggaatctcccagcccagggggccaacagctccagtcagggcgtcagcagtggctccctccggaggccctgagggcgaagcttccctgcccctctcccggctcccagtggtggtggtggtgggcaccttccaccctccttggcttgtaggtgtgtcactgcagttgtctgtctccacacggcctcctccctgcgtctgtgttcagatttctctcctaagaaatccagccaggggattcaggcccacccatatggtgtggtccacccatatggagtcctaactctgttccatccacaaagaccctgtttccttataaataaggccacgttcacaaatgctgaagggttaagacttgagaggacacaattcaacccgcagcagctggttgaggccttcttcaggccagctttttccctgagacccccacatcacaccagcattccagttttgtccttagaatcatggaggttgggagcaagggtgggctccttcgctatgtcagctcgggttggtctggcccacctgggtggcgtggggttctgcccattattttattgagttctgttctggacagcagtgtcttccccccatgtaagttagggttattcccctaagaagatagtaagttccttagagactggtttttgtcacggtttctcttgcatttccttcgtgcctaccccaaagctagtaggtacagaagtggagtacttgaggagtgttgggtggctggtgcccaccctgtggcgtgtttctctccaccacaccttcccgcagaccctctgatgactcctggcctcatcccactctcccgcccctgcctcagagtccttatcagtgcggggcatggggccgccactcccagaggagccagtgcctggagtggatctgcttccgggtgaggttttatctggagtcaggcggcctgccctgagcctggttgcagtttcctctctgtcttctgtgtggtgctctatttctgagtttggcctagtcaagcctctctctcagatctccaggtgactgctcgaaatgtcccagtgctggaatgcaccaccctccaccaaagctagggctggaggataggacaggaacggatggacgtgcagagggcgcgaggggtgagttgctacctggccctacccctgctctaaccagagcagcatgcttccctttcaggagtacatcgatgcccaccctgagaccatcgtcctggacccgctccctgccatcagaaccctgcttgaccgctccaagtcctatgagctcatccggaagattgaggcctacatggaaggtagggacacgtgtggcaccacatccgtggcaggcagccacctttgtggtcacaaagtggccacggcctgaggtgtggagacagaggggtcttgtctttttaagcactttggggcaggaagcatttgaattccatggtgcagtcattctggggaggtcctttcattctcctgtgaccagcagtgaggaaacaaaagcctcagggtgctcttgcggaagggggctctgagggttttgttttgctgtgttgaacccatgggtgacattgaagtgtcccggtaacacagtggctggagagcaggagtgtgtgtagacagctcagtggcaggcaagcaagtggagttacgtaactgcgcggaggacacaaacagaaactgaaggcctttaatcaaacacgtggagatgtaatgtggctgctggacctcatgggtccactctgttctggagggcaggggcctccctcttcactgcggcgcctcccctgccagctgcaggctcctgtccctgagggctcaccctgacgcctccccaccccttgggcaggcagagccagagaactcaaggccacattctcaaggtgtttatgtgagaaagactttgtggagagattcatgttaacagtaacctcctagttcactgcttagtccaagtgtgccctgctgagagctcttgtttaattttaaggaaaagtgcttggcctgggccctccggctttgtgaggatttatcctggggtcaaggaggcagcccctgctccctgccctacagaccatgattgaggcctaacctggctgccttgaaccctgacctggatggtgacttggccttgggcataatttcctgtgatggtgaccggtgggaccagtgggtaccatttggctcacagctccagaggcagaccatctgcatgggagtctgagaccaccatttattggctatgtgttgtgttcctgcctttgggttaggccttctccttgtattctcccttttggtactcttagaagtgggcatgataagccttcccattttacagatgaatcccagaggctctgagaggttagcagacatgccacgtcacgcagcattcaggtggctgggccagcatccagccaggtctgtctgactcaggctccccggcccctattcctgagcttgactttcatgtccatggccagagggccctggatctagaagaacctgaaatgggtaccactgaggaccctggcctggagagtaggtgagtcctcggttccctctctgaggaatgtgccctgcagaagagctggctgctggatttggctgtcctggaagggctcccgaggcctctttccctgaatgcctgacacaccgctgggtgcagagaatgggggtgtcatgctggtgccccatgtaggcaggctttcttagcacatgccagcagcctttatttgctaggcctggagtgattggcctctgctgtgcacttcatctccctttgcactgtcttcctggatccatccagaatcccagatgggaagaaagagctgtatgttccctcctggggtcaccttcatctcagtctgccatgggtgaaggtttggtaaaatttgggaaagggaatcagcctctttccagaaggtgtgcttgttggacactgcctgtgtgaagagcaggaggctgtattagaacatgagaaggcccagctagcagaagaaggtggcagaccagcagccacatctcatgtcccggacaagtccattcgaagagtgatgggtttgggtgggattcgaggaggtgccgctgaagggccttttggagccaaaagcacaggctctggcatgtgggttcctgtctgggctcttgttagccacgtggtctcggacaaatcagtcatttgagttctgctggtgttctggaagatatgggtgatacctggttcagccacggggtcaggggtcaggatacctgggatgatgtctgcagagcacttagcatgggaccggcccactgggtcacccgggaacagcagctgctccagctgttcccaccacgatggcaggaccccagcatcctaattgagtcttcacatccatcttagatttttaggagtagaagcccagggctggggatcaagggtgagcctgggctcagggtgggtgtgtgcacggtgtgttcaaggagcaggaacccggtgatgaggtggaccgtaggaagtcacatggtgagaggaaggcccaggaggtacctctgttgcccgctcgcctggcttggaattgggcctctcctggaggcagttaggaatcaggtcaggaattttaagcagggtgtgtcctagttcactgggagattagaaagtttaggagctacccataaggggagagctgtgggtgttccaggagagggccccgtcctcaacaggtccagggagagctgttgaccaaaccctaacgcatgcttggttctagatcagcaggaagtgtagggtgggtgggccataaatgttgcacgctgggttttccttatcgtgcacgccgagcctgggcttgtattcttccaggagggcggtcagaggctgggacttcctggagccctttcctgacccccagtggctgtccattcaccagcatcgctgggtgggtccctgctgcatgcccccaccagctgcagaggcagagagccttcctgggaagcacaccctgggcccccctcctcaactgcctgctgttcctggaggcactcagccctttcaggcgtactgtaaatggccataattacccttgaagttccctcagataatcacagcaatccagtgacacgcttttgtgctgggagaaggagcttggtgagacttcctccggttgtcaccccccctgccccggttgtcaccccccctgccccggcagtaagactgctctgttttcagagactctggacagctgcagggaaaacagagctggtgggggacgggtgggtgcttcgggactgctaggatcctcattgatgagcagtgggagggagacgaccagagcccctgctttgcggtgggggtgggcagttgggacatggcacaaggggaggctctcccaggaatagcaggcagagcccttggataagggtctgtgctcaggtgggccgtctgtctccctgcagagcatcagccgtggagggcctctcccaccccagctctgcatccaggagacagatgaggcctgctgctgggagctcccagcatcgctgtctccgggcagcctgtgtgaggtcactgccttctcagttccacattcccagagctcattcttgtctcattcagagcctggaggggaagcagggtcatttctctgcctcggctctggcagcttcaaacccacccacttcgtatcaattagcattcaagttgctttaacagcagacctaaaatcatggtggcttaaatgcgacagaacttcctttctctctgatgtaaaagcccagaggaaggccatccagcacgggcacaggggctgggaccctggctccttctagctccttattcttctgtggtctgcccatctggtcctgggtgatggctgtatttccagccctcacatccaagatctagacattaggatggagaggaagatcaagaaaaaggaagcaaatgagaagaaggcctagttctcttttaaggaggggttctgaaagcaatccagtgacatgtttttgtgctgggagaagggactttggccagaattagtcacatcctaagctgcaagggagtcaggaaattgagtccttgttctgagcagccacatgcccagctacaattcgggttttatcaccatggaagaagggctagaacgagttttaggggagcattagcagtcttccaagacatgggtccctgcctgaggacccaactttcccatggcagaacaaccttggaatttctcctctggctgggggtttggcctcggcctgtgacctcagcagcagtcccctctttgtagcaaccagcatcctggaggcttgcagaatgacccaccccagcatgccagggccctacctttccctcatagatgactgcttctgggaggcagccatgcctatacccatacccatgtccctccccacacccgcaccccctaggcagaggcacaggcagcgttgagcctggattcaattcaaaccaagcacttaattcttcctagaaattaagcattccctggtgcaggcctcggggagggagggaggaggccgcagtaacaaacattgaatttgcaggctctttctcccatcagcagcccactctgccacccagggccagggtccagagatggaagccccaaagccaaggcatggctgtgctaccctagggtgagcgattctgggcacggctctagctggctcccaaactggctgagaaggcaccatgtatgagaaggcacctgggccgtaattgcatggcgtgggtttgtgtccctgtcttcagggacagcaggtctcagaccattgggcaacaggctggagagatccttgaaagccctgactgctttggggtgatgggtggctctcctgttcttcttctcttagaagttcccatgtgtctgctctgggggtgacagatggcctgtttgggatcccaggcctccctggggatggggggtgcataccgcagattgaatgcttctgcctgtggttttacgggaatttaattagggctcatcttagaggccatttgaaacctgggttgaaattgagtagtctggatacaaagcaaagagaaagtaacattccttagagcctggagaaataattccccaaaaagcttttgccttgggggtgggtgtttgtgattggtggggagctgctcccagaggcaggaactggctctcaaccctcggggagctgcagaggggtggggacttggagtcaaggcctcagaccctgcccattgccaccgccacccctccaaccctccgccaattgtgtggcctctctgagctgtgcgtctgtcagcgcttaggcaggtgcttagtgtgccaggcactgggttaaatactttacagacagtacctaatttaatccacttaatgaccctatgaggaaggttctgatttcatctccgatttagaggtgaggatactgaggggctttgatcttaagttacttgaggtcacagagctagtggggcagatttgggatcagaatccacacagtgtgggtctgctcttagccagtggttcccaagccctgtccctcacccctgtgtgtaccccttccacacccccagttcccctgtggctgatggagagggaccgaggcaaagataggtagggatggggctctgcgcctgcaggtgagtcctgcctaggctcacctggtgctggtggcatggccatcatccctgggggtgccctctggggtccaggaaatgatacttgagggcagccacacatcatggcaggaaagaaggaccttgtcgctgataaggcttccaatcttagcccctcggggggctgggccagtcactctcccctgagttgttcactcatctgggaagtgggtcgccagtgcctcggacgtgctgagtgggcgtctcagctggtggccccaccccagatcgggcagagcgaccccttggtgtgcacctgcccatgcctcccccagtgtcagcctgcccagaccacagggctgaggtgaggggacagcgtgccccatcgaagggtctggaatgagggaggacagggtgccagggaggtagggtctctcaggggaggtgcttggtttgtggttccctttcttggacttcagggatgtgtgggagcaccactgtttttgttttcacatcggctgttgtctgccacccaggctgagacccgccctttcagtgcaggggaggctccgcagagcaggattgtgcttgtggctcccctgccctggggcggctaagcgccagctgcagaccaggccgggtaggtgcgttgccggcatgaggcggcagctgggaccaaggctagccctggtctgagtctgcgtgagctgccgtcctggcgtctgccgtgtggaagccagtgccctcccccagtccgggagtcatggggtgaggaagaaatggtgccccagagcatgtggaaccaggtctggcctgcaagggtggctcctcctgtccttgaagctgctccttccctcagctgtagcgttccccctttacagatggggggtgtggaaccttagagaggttatggtaacttagttgaggtttcagagctggtgcatcttcaagctgagctccatgttgatgccaaagctcaccctgttcccttacaacaaacatctattttacagctgattctcagaatccctcccatctccctgcccttggctgacccttctgtgggttctgctcctgtcctctggagccaggggccacctgtgcagccatccagacattcacattctaagacaagaccctgtcagcccccaggacctgggaatctcggaagcatcagtcctgctggccgggctctcagttgaggcagcagaggccagggatgttcagggcaggacagggcctcagggagcacgcccccacattcacactgccccgtcccctttcctgcacccccacagccaaagccagctccacatcaggcccacaggcctactcgcagccctttctgtgccatctcctcttccctggcctagctgcagcaggggtccctggagagtagtgagagcttccccactctccctccagcagcctcacccctttgtcccaccaggactggggtatgtgcctggaggacagtggcccgggagcctggatcagcttttcctggagaggttgtcaggtccaggcctcctaagggcactggcagagatgaaacagatgctggattctctgccaagctcctcatttccacagctgtgggcactgtggacagggcagcagcccctggcatcctgatggtaggcttgcagtgacccccatgagaacagaccctgccaggcatttgctgccctctgtccctcctgcccagggcactggtctggaggctcccaggagagactcaaaggagtggactgagctctcatggcgactggctggcaccctgcaggagagatgcaccttcatctagggaagaatgttcctgtctgttcactcagagcttaaccttgctgagcctttaagaccatggcagggacccgctccccagcaaaacaagaaggcccctccacccacagcccaccaacccctccagcgccctccagctcagtggcttctggacgagataccccacttggtccaggtgggcctgccccaggccttcctgcagagctttctgaaaacctctgtcccctctcaacccacaggcacccctcctctaggaggtactctcccaatgacatcagctggctccgatcacttttctagggcactgctgctgatcctaggccagttggtgaacagactgtttgtctttgggactctggctctcacccaaaattcctttcccctggctgtgttgactaactccctccagactccactcccaggctttcttccccctactcacactgagtctcctggctcccctgggatataagcagggtacatgggtactcaaaacctccttgttggtcagattggtcagaaggtatccaacagcagccatttacactttagtgtgaatttatagctcacttagtgtttttccagctgaaagagatcttgagttctggaagccctacaaaaactgctcttctccacatcctcaacaatgagaatagaggcccagagtggttgcatggctgacccaggaccactcagcacctttccgactctcagtccagtgctgtctccatgggacccacatctctgcaggggtcttttcagaagcagcgccatagtgaatctaaagtcagactgcctgggttcagatcctctcctaaacacccagctgtgtgcatttaggcaggttatttaactgcattgagccccagctttcctatctgtaaaatggggagggaggtaatgttggtggcaccttcctcataggttgttgtaaggattcctcaatagatgggagctctcctggcagacagtgcattgtgagtttcagaccacaccctgtgtgctgtgaccctgtgagtcctgtgtttctcaacttgcatttagtgctaaaggcagcagcccctggcgccctgatggtaggcttgcagtgacccccatgagaccagaccctgccaggcatttgctcccctctgtccattctgcccaaacgcccagccccgtgtttgcaaatgtgtacctgggtttatttccccaaacaagagtgtcttcagggtgaccaatcatgtaacacaagcgggcttttaaaaatctctttattggctactagatgatgtattgtagatttattataataaagttcacattgcacaggtttgtttagtgtaatttttatttttaagaaattttgacagagttgcaaagatagtacacagagttcccatataccctttgcacagcttcctccagtgttaacatcctatctgaccataattatctaaaccaggaagttcacattgataactattcaataattgaaagacctaaatgaattcgaatttccccagttgtcccactaatacccattttttagtccaggatccaatctggttgtcgctctctgtggtctcctgccatctgggatggagcctcaggttttgaccttgacactttggaaccttgactgtttattttgtggagtgtctctcaattcaggtttatctggtgttttcgtgactgggtcaaggtcatacattttcagcaggaacaccacccagcagtgccagtccctccctagtgcgtcatatcaggaggtgcatgaggacaacgatgtcttctgtctgctcagcagcagttatttggttaaagtccaccaggcttttccactctaaatttctattttttcctttgtagttggcaagaaccttctaagaggattctttgcagactgtctctcatatgtttgcccttctcttgtagcatccgtggatgggtgttgccattgttactgtggtatttaccgaacagtcatcatacagaattataagaactgtgtcccaaccaccccagttgccctagaagtgacaggatccccttgcagctttgcagacatccacagggcaccaggtggcaccttgtggagtgtcagcataatctcacgtgtgaacaaagggaaaggcaaaataaggaaaagagaaaagtgtcagatatgttggagaatcaggattacatgtttctttgctgcaggacttctcagagccttagtaatgtgttaatatgaatctttagtctgggggcagtgttgaatttcattaccgattgtaagatgcactgatacttcatattctataaaaaagaaaaaaatcctaagtaagttgtgaaatatcaattatgagacacatctcaatttcagagatggaaaatatgaaaaacatgccatagaatcagtgaagttctgcagaatttagccttttccatccagttaactatagagtcccctcctctctttgaggcttctcttgagagactgttgcactcaacacactcaggaattccctgactgggtgccttctggccgccctcacttccggccctgcacaggtctgttcttgagttccctgtattagtgtgtggggccctcattgctggtgcttctcgaatctgtttaactccagcctcacttccctgaggcagccactgttcatagtttggaacttatctttctagacccttcctattcatacatgtagagatacatgtgcacttttagtattattttttcattacagtaggctctagtgcaatgtgtacatttagaaacagggtcattttacacgtgtcctgatacagctctttgtccccactgaacatgtgtcttgcttcgcttctttccatgttagcccatgaagatgagggggatcaggtctgccccttttgctggcagcataatatttccatacatgaatgaatgaatcctaatttatgttgggcccataaggtcattccagtcttgtttggattttttttttttaaacaaactgggctgcagtaaacagctccctgcatatttctgcataattaatccctagaagtgggatttctcagccaaagattataaacattcctcactttggcagatctcactggattgcccttcaaaaagtttgagcaaatttcactcctgatggtgccagtctgcctggggaagccgtacccacctcgattgatgtgtgtttgtcgttattggcacaattgagtatcccatcatggattcactggctccatttgcttgtcttctatgaatgaatctttgcctgttgtttgcctattttttagttgagttgttgggcttgttgattaattagatccctttttgtatgaagaaaattgtcccattgttaaaaattgtggacgggttcatgaatgtaagcgtcatctttgctctgggtccaagctaagatgttttgcttttagaataggtactaccagaaagagccctccaaacattttaaaaatgtcttgaaagtaaaaaaggctgccatgttttgggagcgggagctggagctgagcagggacagtgagcgtctgcctgggtccagaaggggctgtaaatcagtgggagcagctgccacagagtctacccacgtttccagctactgccgccagactcagacatcgggcgcagaaatgcctgtctctgtctgagccagtgtctggctcctcttctcctgggctttggacattgtggttgcaaacagctctctggtcacataagatgaaatgagtcactagctaagtcaggtgggaggaaacctgctcttcccctgcccgtggcttgctgtattggactgtaactttgcacctgtggcatttgttgtcttctcttctcgtcctccagtgttttctctccacagcttgcctgtcaccaggtagctaagtgaggatctagctgctagcagggaggttgcacctgtggtaaggccatagggtctcttagatgccttcaaggagcagggtagggggctgtggccactggcgaaatgccccctgctttcccccagtgactccaaatatcacaattgcgtttcccccttgaaagctcatagtagctggatgtgttaatttcctattgctgcatgacagatgacagcagattgagtggcttctgacagtacccatttattatctcatgggtgggtgggtcagaagcccgcatggtgtggttgggctcttggcccagggtgtcacgggctgaaatcaaggtgtccgcaggggcaggtgatcttctggaggccctgaggaaacatccacctccaagctaactctcattgacagaatccagttcctggtggctgtaggactgaggtccccacccttgctggccagcagctcctacaggtcctgtgtttcttctcacggtgcccctctacttgcaaggcggccacagctggccagtctccttgtgctttgaatctccagcttcctcttcagagaagaagctctgtgtgtgatgccctaagagttacccagaccatctccctgttttgagggcagcaatgcaacagaaccgagtcacagaggagaacccatccatcatgcatgcagttctggcgatcatgcagggtgttgcccggccacagggatcttggggttgacttagattctgcctgccacactgagtaatacaatggttttcccttgcatacttataagttcaatggaatttaattgctatcattgcatctctccaggccctgtcacctgtgctgggtgtcttggggcatgtcgcccctgcccattccctctcctgggtggcgtctcctgtcatactgcccctgcactccacactgcagccaagccgaaccccaggggcacccctcttgacccttggcctttgtccatggtgttctgcctatctggaatactcttggtccccaggactaactccaactttggggtttggctcaggccacttcctcccagaagccctctgtgctgcacactcccttccctgcgtgggcctcagtgccttcctccctactcacagaccctttgctgccctcatcgcacattcattccactgtttcgtcattgtctgctggccgctgtcttccccacctgaccgtgacagccttgaggacaggggcgagtgtgtctttggggaccatgacaggtcagggcctggaacatagtacctgctcaataagtatgcaaaggagggaagaatgttttcaagaatcagatacataagaaggagatgcactgggggaggctctgagcagaaatcccactcccatgggagataggcctggggcaggtggggtcatgggctcggggccacaggaaggggtggtcctggttgtctgtggggctctcgcggaggtggtatttggagcggctctgaaatactgggctcaattagaggaaggtgggagccattccagggagagggagcaggatgttcaggagaaatgggggctattggtgctgcgggagagagccccatgccgaggcccagagggcctccagggccagtttctgcttagcctatgcggggagagagggaggccattgggaggctgctgtggcttctggaaaagatgctgagggtgtgatgagggtggtgactctggtcaggaagaaataggatggaggccagaaattgagggggaacattggcaggcatcagggcaggcattattatctgggatgagttaaggagaaggaaacacaggacaagccataaccacaatctgtgtgccagctccacagggcaggacagtgctggggggctccaagggtgggccaggtgtctccacggcggccaagaaaaactacaagagaggccgggtgcggtggctcatgcctgtaatcccagcattttgggaggccaaggtgggtggatcacctgaggtcaagagctcaagaccagcctgaccaatatagtgaaaccttgtttctactaaaaatacaaaaattagctgggcatggtggcacgtgcctgtagtcccagctacttcggaggctgaggcaggagaattgcttgaacttgggaggctgaagcaggagaattgcttgaacctgggaggcggaggttatagtgaaccaagatcgcaccactgcactctagcctgggcaacagagtgagactccatctcaaaacaaacaaataaacaaacaaactatgagagagggaccctttgtaggcccccaatagtaataagtccccagcctgggccaaatcccagggcttcagtgataaagattccatttcaacaggcagagatgagaagggagggcattccagtggcagatacagcacagacaaaggccaggcaggtaagaaaggccaagttatcaccaggaatagagatggtccctcttggtgagagcctttcttgttttggggcatggggtggtacaggccccctccacctggcttggagtggacttgttggccttgtcatgggccagagccctccacctttctcccctcctctcaagccttcagagaagtttctgtcatggagttcactcggctgcctcaggggctctggctcagccaagaacattgtcagggctgggtggtgttctctttgtgttttctctggacttgttctggcaactgacagccccagatccagccttgtattttaaacacgaggatcctgcatcgaagctgtgtgttctgcccaaagatgatccaggcctcagtgctcctctggggctggtgtatagtctgttatcacactgctataaataactacttgaggcctgtcatggtggctcacacctgtaaacccagcactttgagaggctgaggcgggtggatcgtttgacgtcaggagttccagaccagcctggccaacatgggaaaaccccgtctctactaaaaatacaaaaattagccaggcgtggtgatgtgcgcctgtaatcacagctacttaggaggctgaggctgcagtgagctgagatcacacactgcataccagcctgagtgacagagtgagactctgtctccaaaaaaaaaaaagggattaaaaaaaacctacctgagagtgggtaatttatgaagaaattatgaagaggtttaattgactcacggttttgcaggctgtacaaaaaatatggccagggaggcctcaggaaacttacaatcatggcggaaggcaaaggggaagtaggcatgtctttacgtggcagcaggagagagaaacagagcaaaaggggaagtgcgacatgctagatttcatgagaacttactatcacatgaacagctagagggaaatctgcttccatgatccaatcacctcccaccaggtccctcccccaaattgggaattacaatttgacatgagatttgggtggggacacagagccaaaccatatcattccaccctggcccctcccaaacctcatgtccttctcacatttcaaaacacaatcatgccttcccaacagccccccaaagtcttaactcattccagcattaactcaaaagtcccagtccaaagtctcatctgagacaaggcaagtcccttctgcctataagcctgtaaaatcaaaaacaagttagttacttccaagatacaatgagggtacagtcattggttaaacagacccaattccaagagggagaaattagcccaaacaagaactacagggactgcagtccccatgcaagtccaaaacccagcagggcagtcattaaatcttaaagctccaaaataatgtcctttgactccatgtctcacatccaggccacactgatgcaaaggatgggctcacaagacttgggcagctccacccctgtggctctgcagggtacagccctcacagctgctttcgtgggctgacactgagtacctacagcttttccagggacacagtataagctctcggtggatctgtcattctgggatctggaggatggtggctctcttctcacagctcccctaggcagtgctcctgtggggtctctaacatcacatttactctctgcactgccctagcagaggttttccatgagggctccacccttgcagcagacttctgtctggacatccaggtgtttccatacatcctctgaaatctaggcagaggctaaaatcttgccttcagcacacctgcaggcccaacaccatgtggaagccaccaaggcttggggattgcaccctctgaagctgtaccttggccccttttagccactgctggagctggagcagctgggatgcaggatgccatgtcctgaggctgcatggagcagcagggccctgagcccagcccacaaaacaatttttcccttctagacctcctggcctgtgatgggagggactgctgtgaaggtctctgaaatgccctggaggcattttcccctattgtcttggctattagccttcagggcttcttatgcaaatttctgcagctttgagttcctcctcagaaaatgggtttttcttttctaccacgtggtcagcctgcaaatttttcacttttatgctctgcttcccttttaaatataagttctagtttctggtcatttctttgtttttgcagatgagcataggcttttagaagcagccagtccacgtcttgaatgctttgttacttagaaatttcttccaccagataccctaaaccatctctctcaagttcaaagttccacagatctctagagcagggacacaatatgccagtctctttgctaaagcataagaagaatgtcatttactccagtttccagtaagttcctcatctccatctgagacctactcagcctggacttcactgttcatagcactatcagcattttggtcacaaccattccacaagtctctgggaagttccaaactttccctcaccttcctatcttcttctgagccctccaaactgttccaaactctgcccgttatctagttccaaagttgcttccacattttcagatatccttatagcagtgccccacttctctggtaccatttttctgtattagtttgttcttaacattgctataaagaactacctgtgactgggtaatttatgaagaaaagagttttagttgactcccggttccacaggctatacagaaggcatggctggtgaggcctcaggaaacttacaatgatggtggaaggtgaaagggaagcaggcacaccttcacatggtgacaagacagagagaaagaaggatgaagtgctacacccttttaagcaaccagatctcgagagaactcactcatgtcatgagaacagcgagggggaaatccacccccatgatctagtcacctttcaccaggtcctcccccgatgctgggaattacaattcaacatgagatttgggtgcagacagagagccaaaccacgtcggctggcttagaagtttgctgctgatctgagttcgagttctgtcatggtaggtagatggacgagaaggctgcaccttccttaatgcctaagggtcaagagttccatctttgggcaggaggaagcaaacatgtcactcctccagtattctctactcttctttctcccctgcctcccccagggccatgtcagactgcagagcagtgataggctctgtaaggtgatcttggatggttttaaatggcagaccttcaaatagtaataccagtgatgatgatgacgataatgatggacaggatgttgggatctgacacttggtgtcttctgcatgctggtttctgttttaagtgctttgtgtgttaacctgtttgatccttacagcaatcctatgagcaggactgctcttattgccattttacagatcaggaaatgaaggcaccaaaaggtgaagtaaccgtctcaagttcacacagtatggagcattcagccaggcagcttctgggactggctacagtgtttgggaagcacagctggcccagtgcctctgtttcctggtccctgaagtgggaaaggagccttccttaactctttccagactcagtgttcttaagtgggaatgatgagactggagaccagtgacaaaggctattatgcagtggtttgcccagcagtcaagggtattctttcccgccacatgctggctttgatcttgaacgtgcaaccaactcagggcctctgcttctcacatgcaaaatggagtggtgatagtgatccgtgctatggcattgctataaagatgacacaagttgatgcctgcaagtgcttgttgatggcgcagagcacactgcattgcttgtctggttattgttgacattaagccctgcatatgctgtgttaagtgcccaacacatgtcatctctatgagccttcattttggttgtctgttagatggaaatccaaaatgataatggtgtttcttgtgctcatgaatctgcagcttggctgggctcagctgggtggttctcccatgcagtcttgcatggcagtttagcatgatggtgacagagtagccagactactgacttggcagctcagggacccaggggtgtgtcccgagaaagacagcctctctggccttgcttccagagtccatattctatttatctgtgaggctctagggccagttcacattcaagggaacagcatttagggtctacttcataatggaaagaagcatgtaagaaatagagactgagaagtcccacaatctgctatctgctaactggagacttgagacctaggagagctggtggtgtaagttatagtctgtattaggtcattctcacactgctataaggacatacccaagactgtgtcatttataaaggaaagaggtttaattgactcacagtttgcagggccagggaggccttaggaaacttacaatcatggtggaaggggaagcaaacatgcccttcttcacatggcagcagcaaggagaagtgcagaatgaagcaggggagcatggggggagccccttataaagccatcagatcttgtgggaactgactatcatgagacagcatggaagtaaccgcctccatgattcaattacctcccaccggctccctcccatgacatggggatgatgagatttgggtggggacacagccaaaccatatcatagtccaagtccaaaggcctgaggaccaggagagctgatgctataatttatggttctactgcaggagactgatgtcccagcttgaacagggaggccaagtgagtgaattctttcttacccttccttttgttctattcaggcctttgactgattggacaggctccacccacattggggaaagtagtctgcttgactcagtttaccaattcaaatgctaatctcattcaggtacacggagaacaatgttaaccaaatatgtgggaaccctgtggcccagtcaagctgacaagaattaagcgtcccaccatggcaggcctgctgtgttctaggctctagggcaggtcccaggcacacagagatgagcaaggcaggcatagtccctgctcccaccgagcctcctgcctcatctgcctccatcagggaggaaggaactgcgtactggggcaggggcacccaagaagccttaatgtcggaggaactgggtactgggtcaggggcactgcctggggcactgagcctgcaccctgtggcggagcttgattgagaaaccgagcaaggctcattttgcccagagcttgggaggagggaggcataggcaggcccttggccatggaggacttcaaggctggcaaggagtctggacctgattccgaaggccatgggagccgttggggagcatggagcagcggctcagccttaggctgggctttacaggtcacacctcccgagttctcccttgccccctcgcaacagcatgaggcatgccaacactcaggagatgccacttccctaccctctcctcatggtgggtccaagggaggagacacagtcctgccctagcccctgtgccctgaagctgtgaagtcactgcttagtccatgtggcaagggcctggccttctctcacacccccgctcctcctgtgaccacagtcctcatgtgacccttcctttcctcagtgaaccggacggctgggcagcacccagtcctgctggggaagactcactccaggctgcctttcagtgacccaggccccatgggccttttgccattggccttgagtgccttcagctctgagttcctcagtgcctaagcagcacgggaagtgccttctctcctcccttgtcccacgagggcacctgagagggccactgtgtccttacgcccgatgcccatgagagatgctagctcctggggagctcctgagactgtgcaccttggattggaacctgggctcgtagctctgtgtcctacatgtatgcatcgctgcacatgcctggcctgcccaaggcccttgaggttgctgcattagctacaaggggctgcgaggctgagggtccactgctcctaggagccaggcagggctgtcatagattttcaggtggcttccaggagccaggctgtttgtcctgcatccccagggcatgccagcttcaggatctggaacttttaatgtcttcacaaacaaaacacaacatgtcattccagttttatctcatccaggactgttcatagacctttaacacacgatgatgtcactgccatccaattgtttccatcctttcggaagcgcccaaatcccctacaaatccagccctgctcagtgccagcccctgcaggggccccaccctccaggggcccccaacttcagggagagatgagtcactcatcctaagcgagagggacagttcggaggtgttagggatgtaccctggaggcacagggcaagggcagctcctcagcatagccagagggatctggtgctctgccaatctgcaggagggcagggtgggggcctaggcagtcaggcaccccagaggggcatggaggggccctgcctgcgggcaaggcacatggctttctaggatggaatgcctggagccctccagccaggccacgtggacaggaccttgtgctgtggtggtgagggtgcatccagcccctctcttctggctctaagtcccttcagattgggaccacctctgtctctctgtcgcttgcatcccggggcctctcacccgggcccttcctggcatccccctcctggctcaggcctgtgcggccctcccacccacgtgcctgtgagttgactgtgggtgttactgggtggctgccatcgtcatcgctggccaaaaagccatttgggttgtttccagagctgctgtcaggctggaacttggttcacccggatgcacagaacatcttccctgtctagaattcaagagcatgtgactcccgccccttaactgcataaccacagagggaaggtgactttggatgagtccagggcctgaatgagtccagagcacttgaacttacagatgggccggccaggctctttccagtcctgccacagccatcttcaaggctgttccagacccacagcgccacagggtggccaggcgggagattgcaggcccctcctccttcctttgcaggctgtgccaacactgggcttccctcctccttttgtttccagtgcttacggctcacttatcccatccatcaacttatcttcacacgtgcacatgtgccagagagatggttcttactgaggcctgccttctcctgtccccaaggaacatactgcctagttactgaatcagaacccatatatgaaaatttaatagcgtacaagaggtaaacaacaaaactcggtagcagtgccagaaaaagtactagaaagacgtgactgtgggtaggagttgcagggtgaatgccactcgaggcagcagcatgggacagcgtgttcttgggggctctgcagaacagctgggattctgtgatgcttggaagagcaggtgttgccaagtgaggcatggaacggggaccatcccagagatatagtggggacagtatatccacctggcacaagggtttggctgggaacgatcttgggttgtgcggtcagagaagagttgggcgcggtggctcatgcctgtaatcccaacacttttggaggccgaggcgggcagatcacttgaggtccggagttcaagaccagcctggccaacatggcaaaaccccgtctctactaaagacaaaaaaattagccaggcatggtggcgtgttcctgtaatcccagctacttgggaggctgaggcaggagaattgcttgaaccgggagggggaggttgcagtgagctgagatcacgatgcctctgcactccaacctgggtgacagagtgagactctgtctcagaaaaacaaataaacaaacaaacaaaagagttgggaagtatattcatttgcgtgggctgcatgacagtgctgcatttaaacaacagcaatgcactgcctcccagttctggaggcagaagtctcagatcttagtgttggcagagttagcttcttctgaggcctccctccttggcctgcggatggccctcatctccccacgtctgcacatggtcttcccctgtgtgtgtctgcgtcctaatctccttataaggacaccagtcctattggattaggacccactctactgacttcattttacctctttaaagaccctatctcccagtgcagtcccgttctcaggcatggggattggggcttcaatatcaacttggaaacagcgctcagcccatcacaggaaggtacagagtcaggctgcggaggcctggaaaggctgtgggcttcactcgcggggcatggacgccttgctgggagctgtctcagtacaggtgagagctgtaggacggtggtttgtgggcagaggatcttgtgtgtggagatgatgattatggagtgaggggaccaacaaggggcttcctggattaacagacttcaggaacatcgattccaggagctgggaagaggtcgcggtgctgggccacagcccttgttccatcagtgtcccaggagggcaggccagagcaggctgggggtgctgtgctggtgggtaccaggcaccccgaggagggtgggcatccatggaaacagggctggacaatacgattctcagtcattccgaatgcccctcatgggcgtggcctcaccgcgtccctgcaaccaccccgggaggtgggcggcatcactggcctagtttacagatatcagatcagagcattggcggtcccagtcatggcaactgggctggccctccttttgcttcctgggctttccctgccatgacagcttcctccctgcagtgtccctggcttccctggccctgggcattgtggcatcagtgctgggtgcccctgttccttggcgtgttactgacatttgacctacttcttggaccctccccagcagaccttgcgtatgacggtccaggtgatgacgacaatagtacggcgagtttttcatgcacacctgctagtgccagggtttaaacatgaggcccatcctcagcatctgctggatgctggccacctctgagtgagggcagtgggaccacgacgatgagtgggggaggggtagtagccctctgaaccagatgctgttctagtcctcattttacagcaaggaaactgaggcatagtgaggtaactgagacaaaacaaagcaaaatttcttggccagggtcatacggctgatataagatggagccaggattaaaacccagacagcccaggtcctctgtggatcctgcagagtgcccagtcgggtgggggaggtggatgcttcattagttggccaagatgagcagcgtggggcccttgggtggcacagcaagggggctgctcccaggtgagcaggaagagggtgcctgacccatgttggaggataagcaggagtcttccaggccatgggttggtgctgggaggggaaagaaagggcgtgtggggctgagatagctgccctggggcctgagaagtccgggggtgggtttcactccaacccccactttcaaaagatgctgtaaggctggcccggtggctcatgcctgtaatcccagcactttgggaggccgaggcgggcggatcacggggtcaggagatcgagaccatcctggctaacacggtgaaaccccatctctactaaaaaaatatgaaaaaattagccagacatggtggtgggtacctgtagtcccagctacttgggaggctgaggcagaatgttgtgaacctggaaggcagagcttgcagtgagcagagatcgcgccactgcactccagcctgggcgacagagcgagactccgtctcaaaaaaaaaaaaaaatgatgctgcgagaacttagatcctgctgatcctgtccccagtgccctgctctatcagcaacacaatggggcccctcttgccccagtttcctgccatataatatgggcccctaggaaccgggagtggcccaggaagcaggactgagcgcagctctaagagccggtgtcggaggcacacatagctggggtctcccacgtgcaggggcgccctgggatgtggaccagtaaccactgtttgacacctgcctcctcccctgagggcatcccccgctgggtgcctgtcgtgtgccaggcctcccagcagctctctagggaagcaacactcccattttatagagaggaaagcaaggctcagcagagttaagtcgtgtgcccaaggtttcagctagtggaagtttgccccaggtccagcgtcgggctggctggcttcaaaactgccccttcaggtgctcatttcctcctccctccacccctgttgtcctctcgggtccacctgtttgtcactgaacttttgttttcttgtaagttctgtagctgctaccggtcggatgagggaaaggtcacctggtggagtggatgggtaatgaggtgtgacgcgggaggccagcctttttctggctctgctggtaactcgtgtggccttgaactagttccttcccctttctggacttgtggaagcctgtggctgggacttgcccatctccacgtgccctcccgcttcatggtgtctgatttggaaaggcagagagggaagacgggagcatttccgtttcccaggggctgatattcgctctcaaaagaacacaacccaccatccaaccaaagaaagcctcattccacctcccatccaaaaataaggatggcagagaaataagcaacagtcgcctttttcagggaaccagaaatagcctcccgggctccccgctctgacttcccaagtcttcattctgtctctattctgggagaagagctgctggcgccaccactgcgagcttctcgtgatcgagagggaggaacccctgctgtcgctgtccctcaggcaggcagaaggggcttgtctgctggtactgagatggtgggggtgcacctgggcgccacctgccagtgaagacagctgggcctggttccttcccagcctcccactcagctggagcgttctcaggttgggtccagttcatacatcctaagagcagcaggttgggcctttgcaccggctgttccctgtgcctcgttggcgcctccccacccccccagtctttggaaggtgcccctcaccatgttgttcaaatcgcataccccacctctgccggcacccccattttgtggttaatgtttccctgccagctccggccagctatacatttcatttatctctctggattattgtctgggtcccttccactagaatgtaagctcctcgaggacagggatgcctctgttttatttattactatattgttagctcctggcatctagtagaggctcaacatgtttttctgttggtgaatggttattggaacagtagtactctacgtttcttatttactctcacttcatgggtgtgtcgggatgcttttggctaccagaaactgactcaagcggtgcagacatagcagcctgtcatgcccagcaacccgagcgggggcagctcgggatgcaaaacagtctgtgtccactgagagatggggtccttcccagcatgtgctctgtgggctcaagactgccttcagcaaaggctggtgcccaagcttggaatacgagctcatcctagcagtgtggctgggcgagtctcagttgagtccccaccccacgccagagcaggagtggtccaggcagccggtgtgtctgccgctcagagtgtggtcagcaagctccagcctgggacgaatgaacaagaatgaccgtgcagacctttcctggccacccaattcctgctcccacctaggctgctgtcttaacagagcctgggatttcagaagggtgggggtgtctggcctgatgctggatgtggcccattctttgaaaatgtcttgttcttgcatttcgtctggactccagacatctctggaggaagatgggctccccttgttccttctctgacttcacctcagacccagtggggatgaggaacaagactcaatgcgtgtgtagggaggactggaggagaccgtggttgtgaagcatttacttagcccagtgtcctgcagagggcaagcactctggatgacagctactgctactaggttttttttccccttaatgtattgatacaatttatgtatcatacatttacctttctattttttttttgagacagagtctcgctctgttaccaggctggagtgcagtgacgcgatcttggctcactgcaacctccgcctcccgggttcaaaggattctccttcctcagcctccccgagtcgctgggattacagacatgtgccaccacacccagctaattcttgtatttttagtagagacagggtttcaccatgttggccaggctggtctcaaactcctgacttcaggtgatcggcccacctcggcctcccaaagtgctgggattacagttgtgagccaccatgcccagccaaatttaccttttttaagtgtacatctagttctgtagttttgattatattcacaaaattgtgcggtcatcactactaattctagaacattttcatcacccccaaaggaatgtacccatttgcagtccctcccagttccttccttccccagctcctgtcaaccattaatctctttttttgtctccatggatgtgcgtgttctggacatttcagataaatggaatcttacagtatgtggtcttctgtgtctggcttcttccacttagcccagtgtttttatggttcttccatgttgtagcatgtctcaatactttgttccttttcatggctgaataatattccattgtatgggtaggtcacattttgtttattccttctgcagttgatggacttctggattgttgccccatttggactatgatgagtaatgctgctgtgaaccatttttaggattttatgcggacatatgtttccattctcttgggtataagaagtggaattgctggatcatatggtcactctgtttaactgtttgaaaaactgccagactgtttcccaagcttctgtaccatttctctattcccaccagcaatgtatgagggttggaattttttccataccctcagcaacacttgttatttttggtctcttttattatagtcatcctggtaggtgtaaagtggtgtctcattgtggttttgatttgcatttccccgatggctaataaggtgcttattggccatttatatgtcttgttttgagaactttctattcaaatcctttgcccatttttaaatagagatatctttttaattgttcagttgttgatagtgttttatatatttcggatactagacgcttctcatgatttgcaaatatttcccccattctgtgggttgtctttatgttttctttatagtgctctttgaagcaaaacattttaaattttgatgatgcccaattctatttttccttgggttgcttttgcttttagtgtcctgtctaagaagccattgcctaatgcacggtcatgaaggttcacatctatgttttcttttaaagttttgtagttctagctgttataatgagatcatgatcagttttgaattaattttgtatacgatgtgaagtagggttccatcttcattcttttgcatgtgaatatccagttgtccaagcaccatttgttgaaacgaatattctttccgccccttgaattgtcttggcacccttgtagaaaatcagttgagcatagatgcacaagtttatttccagattctctgttctattccattgatctgtatgtctgtccttaggctggtaccacattgcctcaattactgtagctttgtagtaagtttcgtattgaggaagtgtgagtcctccaactttgtttttctttttccagatattttagtggtcctgagtctcttgcattttcataggaattttaggaccagcttgtcatttcctgcaaagaaaaagctgtagttttgatggctatcatattgagtctatagatcaatttgggagtattgcccacttaacaatattaaatctcctattaatgagccttgtgtgtctttccatttattgaagtcttctttaatttctttcaatggtattttgcagttttcagtgtttaagtcttacacttattttttaaatttatttctttttgatgcttttataaatggaattgttttcttaatttcatgtttggattgttcattgctggggtatagaaatacagttgaggccaggcatggtagctcacacctgtaatcccagcactttgggaggctgaggcgggacaatcacttgagccaaggagtttgagacaagtctgggcaacatagtgagacccccatctctaccaattagttgggtatggtggtgcagttactcagaaggctgagcggggaagatcccttgagcctgggagtttgaggctacagtgagctgtgatcgtgccactgcactctagcttaggcaactgagtgagaccctgtctaaaatacacatacataattttctctttttttgatatggagtttcgctcttgttgcccaggctggaatgcaatggcgcgatcttggctcacgtcaacctccacctcctgcattcaagcgattctcctgcctcggcctcctgagtagctgggattacaggcgtgcaccaccacgcctggctaattttgtatttttagtagagacgggttttctccatgttgatcaggctggtcttgaactcccaacctcaggtgatccgcctgctttggcctcccaaagtgctgggattacaggcgtgagccaccatgccagacccataaatataatttttaaaaattaaaaaagtacagttgcttatcatatattgatcttgtatcctgcaaccttgctaaactcatttattagctctaatagttttggaggttttttaaatatgtgcattccttgggattttctatgtataagatcctattatctgcaagtagagatggtttcacttcttcccttccactctgtatgctgtttcatttttcttgcctaatggccgtggctagaacctccagtacagtgttaaatagaagtggcaagagcagacctccttatcttgttcctggtcttaggggaagtgtctagtctttcactggggagtctgggtttttctagaaggttgaagaagctcccttattttcctagtttgtggagtgttcttgccatgaaagggttttagattttttcaaatgctttttctgcatccattgagatgatcatgtggtttttgtcctctattgatatggtgtattgccttggttgattctgtgtgttgacactgctattgttatgaggtttgccacagagcagagtagcatgctgtcaggaaccccctgagccagggagctccatgggcactttttctgcgagggaggctgtagtcaacagcaggggcctgggagtcagatggtctgggtatgacctcctggctgtaccactggctcaccatggaactctatgcagggaaatgccacctctgtgccctagtttcctcatctgtaaaattctcaggggacaggagtgcttccttgtggggttcttatgagggtaaatgagttactgtgtaactacgttgaacagtttctggcatggaacacatgcagtgttttgagacattggctactggccactagtgacattatgtaaaagcttggatgggccagggtggggagggacagttgaggagggcattgaaatctgaaagccaagctgattcacctgctctaaaaactccggggggccacagggagtctggaagctcttccaggaggtggcctgtttgaccccagcagcctccaaatcttcctgtgggaggaggggccaagggtggagcccaggctggtgagcgcccgtccgaagcctgcctatggcagaaccctccagtttaaattcaggcctgagcaccatatcctttgggactgggttgcaggggcggtgtgtttgcagcgaggaggcttttgctcagactgcttcctcccttgacagccatggagggcctgccagccctcacagcattcccgccctgcctggggccttgtttggaaaatggctttcagctgagcaccagctcccctccctccccaccctgactttcctgacttcccctctcctgtgctgccaggtgagcctggctccttgtcctggctctgccgttgaccactgtatgaccttggggcctgtttctggacactgtcagggaccgcttgggattgaacaggcctctgtgcagagggcctgcaacactgtctgccaggggctcaggaaacactggctccagaccaccctcccagtgccccagagaaactgcaaccccccaaatctttctgtttggagtttagactgtgagggtaggagtcggggaacgggggaatgaggatgaggagggagataaaagcaattttatatgccctgtgtaattcttggcatttgtttttatgacataaatgaggctggatctaccttgatttaatgtcctgacctcctagccagccaagtagctagcagctcgagacagtctgctttgctctgtttacttttggtttggtttccaagcctgtgggtggcagaccgcccccgccccgctcacactcagcctttcctggcccctgtgccctgaagtacagggtggtcccacctttgtggtcttatcagggaagggggacaatgacaagaaacaataataacaaaccagtaatttcatcatcagcagagagattccaaatacattttgttatcccacaaaaaatcagtttacccctgctcggtgccaggcacgagtcaggatgaacagaacaggtcagcttttgagggttttaggaagttggactcactcttagaatccactgggtgggcctggagaggggcccaggaatgccaagctgtgaagggcgaggaggaattggcagggggaccaggcgcggcctgggctggagcatgcagcagagatgcagtgagcgtggtggggaggccacctctggagctccacacaatgccctcaattatgttaagtagtctgcaggtgaggggtcaggcagtgtccatgtggaaacagttgtgtcaccaccagctagttctttaatctctctgaccccagtttcctcctcatgggattattttgcaaactgtggaggtgatgccggcaaagccctcggtacagcgccagacgcatgctaagagctatattgtcactgcgattattattaagccagtgtatcacatggtgggaaagtctttattgaaccagaaaaaatggtcatggcttatgaagttaggattcaggttacaaaatttgtacagctctctgcgtgtaaatgtacgcgtgggtaaaagtccacagtggtggggtagtagttgtaatgtcttgtcaatatgtacattttttacttttctgtactcttcggattttacacagtgatcatacacgagttttgtaattacagaaatgttattagacaatgtaacggcagggctgtggttattgttcacacacacgagcacatgggactgcagaggttggggacggtcagatccaggagcgtgggggcactgaaggcccctggggtggggcgggctgtcacaggacgtgcacctggggcggctgcccaggagctgtgctgaccaggcctcccttctgccctagacgacaggatctgctcgccacccttcatggagctcacgagcctgtgcggggatgacaccatgcggctgctggagaagaacggcttgactttcccattcagtgcgtaccatcccagctccacctgagggcaggcgctgtagaccgcaggccagcataggggaggggctgggtttatagtgccctctggatttaagctcacccgaggatggatgagcacatggccctgggtcccacctccacccacaccatagaaacgggtcctggtaggggacacaggtcaacgtgctctcctgcctggcctgggggtgtctacccacacgtcaccctcagtgcagataccaggtgtccagagtctgtgtctcagctagagttcctttctagacgtgccaagtacctgccttgtgggtgaacggcctcactaatttctctctgcttttctctccccaacccatagtttgcaaaaccagagtggctcatggcaccaactctcacgaggtgagtggaagaagatctgactgttgtccctgacccccatcctttcagctcatcgtgtctcactgctaccctgccggattcctcactgccactgctcctgccctgctgttagtcctggctccttggtagatagcctccttcccttccctggactccagaggaatcgagcgggagtgctgtggcttcatgcactgtctgcaacctcacctcaatgcctgtcctgtccctaaggcaggaggatgtgctggggacccacctgtcctctgtggagcctgtcgtagctgtggcagccataacaaaccccaggcactgggtggcttcgccacatttattttctcacagccccggaggctaaaagtcccaggtcaaggtgccagcagggtcagtttctggtgagggctctcttcctaccttgcaaatggccaccttctcactgtgtcctcacacggcctcttgtgtgtgtgaatggggaggggcagaaagcaagagcaagctctctgatttcttctgataggggcactaatcccatcttgagggccctgccctcaagacctcccaaaggccccacctccagataccaccacagtggggcatgggcttcagcgtaggaattctggggcacacgttcagtccataggggagcttgtgcgagtcatgcctcagtccggcccgccctgcagggctggctatcctttgggccatcagtgtcatctcttcgagggcctgttttgtggcaggcaccgggctgggcccacatgagggctgttagctctgacaaggctctgtcactgccacaggggtctgccatgctgctgaattgagacgggccagggaggaaaagagggctgcttagaatcaaccctgtggaatgctttgaatcatgagtcacccacccgcccattcattcttttattcactctatgatgttcccggccaccttgaggaccatggagaccaggagacagatgcataggatgtgagtcctgtccctagagagagccaaggagcctgtgaggactccaggggctagaggagtggatggtcatgcaggggcttcgctggggccagggcccgtaccaccctcaggagccacacctggggccttgtctttgccctggacacagcactgcctggggtctccccagtgggcacatgttggggtatgctgggcaacaggcatctgaccggagtgggctctctggggaaggcttgtccttggaaagccccaccaacagaaatgctccccagagctcacgactaaaaggggaagatgcagcagcatgggcctttcctgggttatgtactgctctttatccctggcctgcacttccggggaagtatcagcagacagtgtcagcgtagcgcagcacatgctgtgatgggaaggagtgtggagacagcccgccgtcccgttgtcagttgtctgaaatcaggagccctcacgtagtcttcctgtgggtgttggccctcctgccgcagcctacctgggctctgtgcctggtgctggcagcaccctccaggatgtaccaggccagggagggagcaggaaggctcgagagcagcagcgttggtccccaggcccccctcagccccagtatctgcctgcccgccttccaccagcccctttaaccacccagtggttcctctgtgtgtgagttgcttgggtgttcccagatggaagcacgagcgtagttattaacgtgagtagatccgcctaactcagaacctggcagcccgggaggagggagccacttctgcgagtcactcaaggcctgagggccggggctgtggaatcccagagacctgggactgattctggtgccgtgtgttgccatttgtgcgactttggcaaattacccagccacccagagtatcacatttgtgactggagacgttagcggcttctgtgaaggatgaggggtcactgccagggttgcctgggtggactgttggatgagctgccggaaccagctgccctggtacttgcccggtacttgctgaaggggatgggggttctggatccaggtgcacccctctcaggatgcccctgatgggcctcgggactctcagccctcaagtatggggtcagcacgctcaggggaagctataaatcactcctcattctagccgcctggctccaggatgtttgtacaggtgcccctccctctactccccagccggctgtctgggtccactgccggcaaggtgtgccaccacgtcccatgtactcagagaccccagcggactctctgtgcagacggggcatgttagcattgcagggacgtgccctctggggtggacactgtccaccagatcggcagaggttgggggacaagcttctcacagattccaggggtacccggggaagccaagtacagcaggggcagaaaatagcactgtgcatggctggctttagatagggcagcaggtgcttctgatcgggagtcctcgtctgcatcccagcccgcgcactcccggcctctgaatctcccagcccgagactcaaccaaaaccaggaccatttctgctaaaccactctgtcttcattttatgttctcagaactcttttatttgggtttttgttttgtttttgagccagtgtgagggtactcatttgctccacagtggaatctttttttttttttaagctataacttagccaaaagctcaaagcatccctgaagccacccatgattttgcagaggaagacagtggcgcttaagcagggtgggggcccagcctcggctcacacagcaagtgctcagcaggcattccagcccctgcctgactccagagctgctcgtgtttttcctgtcctttattcttgtcagaaggctgaggagatgttcactgccccccaacgcccccagcacagacacacactttttgtttttcccatgtggcctggatttccacgtctgtcctgcccagctgagctccaggcacgtagggccggcgctccgtgacagctgacacaaggggtggcagctggggaggcagccagctctccggggcccattatccctgctcagcagccccagccgtctggtggctccttcctggggccctgcgggctgagggattagccatgaccctggcaccagcagctggatcggctaggcctagggcccacccctctgtccttagagcagaccctgtgcagagcccgtgctggccggggctgagagggttttggcagctgcccccctgcactccctaccccagcccctaccagatcctcctgtcagggacctttttccccagaggagtcggggaccaggagcacaaaggcctgttgtttgcggagtatcacatggctccgtgtgtaggggcgcggctgggtgctgtgcagacccagttccatcccgggctcactcactgtccagcagtcactgaacctctcagcgcctcatcgtcctcatctgtgaaaggttgtatgctcacctcagatgtgcattgtgagggagacactaggtaactggtgtacgtgctcagaacagggcccggcttgtcacaactgcttgacaagaggcagccgttgtcatcagacaggctttgacccaaggcctcctgactcctgcgcccgagtcatctgcttccttcctcctcccgggtctttgtggaggatcctttaggatgtcagagggttgagcagcacacaacctcagcggcccccttccctggaccacagtgcgacaagtggtgtcacgctctcagaagttgtgcagtgcacagccagctcgatctcacatggcaggcccggtgaagggaggatctccaaccccgtggcagaagggatgcatccccaggtgttcttcacaagtcccactccactcaccctggctcaaggctcctctaggggagtcctcatgccacaggaccagggatgggccttggtggaggtgctctggacaggtgacacacctgtgtgttggaggctgagaaggtggtggattctgacagagcttttgaccccttgtcttcccagatggctatcgtgttcaaccaggagggcctgaacgccatccagccaccctgcgtggtccagaatttcatcaaccacaacgccgtcctgtacaaggtgttcgtggttggcgagtcctacaccgtggtccagaggccctcactcaagaacttctccgcaggcacatcaggtaactgctcttctcaccatcttgggctgagcaagactcaggggcccagctgggatgtggcagcagctgtctgtccttcggcactgccccaaccaccctgtgttcttggtgggatggagaggtgctctaaaggtggaaacagttgtgtacggtggataaagaggtcttggggaactagtaaaatgtccctattccctgggtcattgtagggggccccacccacctgaaccaccgtagactccaggatgcatccagaagtgttctgtccccagcatgcttctgggggacccacacaataatgatattcatggaggaacacgctgggacaggtgtggccagcatggcgtggattggccttccagggaagccagggcaggtgctgcctgctgtctcccgctgagccatctttaccttgggtctcattttcccctggggagcctgagacagagttgcctgctgctacctgcatagctgccagggtaaatcagactgtgagaagcagcagctgccgggttacaggtcttcttaggtgcaggactcctaccgtgccagtgagcgtgttttgagtcagtggacggtggtctaggagtcccgtgggtgtcacatagggcgttctctgcatgatgctgttgtcgctgggcctgagaagcagcctcccagggagcagcctgtggaccccactgcgctgaggggccttccttccgccagctgctcaccgccctctccagcctcagccattttaaaaacggacactgagttaaagatttgctggcagtggagctgctcgaaaggatgttctagtggcttctgaaggcatctctaaggcacgttctggaaacctttggaacagtggcagtgtcttgggataagtagctttccaggaggaccctttggagaacactcactgccccgctgtggcttgttcaaatcagctgcacatttctttcagcaaggggaacccacatcatcagaagcgttcagacgccggctgttttacctccagctgagcaaacagatgtgtcctcttggcatccctcctccggggactgcctgtggccatccacatctcctggctggtgtgccgcccggcatggaggggctgcagtgctgcggttgccctctcagcccttcttcccctagatgcctcttctctttccatggacacatgcagagcgtggatactttggaaacgtgcaggtgttcattttcctccgagggcaggtggccttcctagctgggcgtgtggctcccagactcaaggctgtattttcagggtttgggacatcatggtcccagcccctgcccactgggtgggagccaaatgctggaagcatatttttatatgtggctatataccaccaagagatattcctccaagttatgggctggaagaggctgacattttttaaaatgctgtttattccctgatttaagaaaataataatgctttaagtctatggaaaatatattaaattaagaggagttatattttatatcaactcctttctgtttttacccaggtcactccatctctaaaagaaatttactgtcagatctcctttcttatccactgtggttgggtttttctgttttctcctttttccttctggttgcaaaatgctgggccagtttccgtctcgacgctgggaaccattaacagcagagtgtgggctcctatcctgtatctgtgaggacgaggactccttgcctgtgtgtcttcttgtgtggctatttctaggttgccagtttgccataaaatgcataccaggagaccagacgtggtggctcatgcctgtagtcccagttctttgaagagaccaaggtgggaagattgcttgaggccaggaatttgagaccagcctgggcaacatagtgaaactccatccctaccaaaaaaaaaaaaaaattaaaaaattacctgggcatggtggtgtgcacctgcagtcccagctactaaggaggctgaggcaggaggatcgcttgggcccaggagtttaaggttgcagtgagctgtggtcatgccactgcattccagcctgggtgacagtaagaccttgcctcttaaaaaaaaaaaaaaaagcagactaagcccaaatagtagagaaacacacagagctaaaaaggagaaatgtttattctgttcacgtgaactaagtaactgttagtgtgtctctccatccccaaagctgattctgtgtccccatctctagggcactgtgccagggagctaacgtgggtcctctggtttctacgtgtatgttctctttctggataagaagtgtaatgcaacagcagccttttaagctggaccagttggaaagggggtttgggactctggcctctttccggccctcaccccagctttccaatttcctttgcccaatgacatgtcccccaacttcccgtggccacgcagggatgggggttccttgagtgggatttttctggacctgggatagagacagggacatgagtcttcactcgacaactgccagtctcctttgcctgtcagctgcacttttgttttttacgtgttgacatctcaaatcaagtgtgccttatagccagtggcatccatgcagaggctttggctggagctgaagtcaggttgtggcttgtgccatccaccaggaacattttgtgttctctgcctgtggttcgcattcacagagagactgtttccctccctccaccctgtgccagggtagagattagcgggttcctttgctctccctttctatagagtgggtttatttcttgctcgtctttaccctgaggacgcagcgcaggctcccagctttatgcaggttccctccattattctctccagcttgagccttgtttctcttaggcatgcatgagtggtacctctcaccatgtagagcgggaggcagcaaacttttttttgcaaaaggccaaattataaacatttccagctccatcccaattatttaatgctgccgttgtagtgcaaaagcagctgtagatatgtaaatgagtggcacggctgtgttcaaatgaaactttatttacaagtgcaggtggccgggcttacagcctatagtctgctgagctcctctccagagcctcttaatagtcagtgatacagcatttatcaaacctaccatgtgcccagccctgcgtgagctgctggggatccagtcagggactaggcaggcacccagcttcctgccctcatgagcttgtattctggtgggagaaactgcacacaaggagagaaataagaaaagggtcaactgtggcctgagataaggggttctgaggggaagagaatatgtcctgggataccactgggtgaggggagccacttggaaagggcagctcaggatttccctctgcagagatgatactcatggcaactggaagatgacttgggtcaccatctgtagcattaggacacattctccccatccccttcgcctcccaagagagagagaggagatgaaggaaataaggctaaaagcagtgtggcccagctcgtggctgtacggctgagttgctgggatgtttgggggctaatcttatcatttattcttcttttaaacctattttttaaatccataagttgagaagaaaacacacacattcttcctttcattgccctccctccctgtagaacgttggtggtagttctccactggtgctattgggctagtccaggaacagactgcatggggcacccaaaatccagggtgctgtcgtgagtgagggcttgctgatacatgctgggagcaacgccctggtctggtgtgttagaggaaccgactctcttggagctggccaccaggtttctttccctgatgccttctcacttgcctcagctttccatcatctcttgggtgactggcagccacaggaggctgctcctactccctccgacccctgttcagaccgcacatagagaggaactgagcccagaccatctctcactgccctgccaaaagggtcttctggccagagctcccaggtcagaattagccagaagggccaggtgcggtggctcatgcctatatccccagcactttgggaggctgaggcgggcagatcacctgaggtcaggagttcaagaccagcctgaccaacatggcaaaaccccgtctctactgaaaatacaaaaaattagccaggcgtggtggcaggtgcctgtaatcccacctactcaggaggctgaggcaggagaatcacttgaacataggaggcggaggttgcagtgagccgagatcgggccacagcactccagcctgggcaacagagtgagactccatctcaaaaaaataaaaagaaaaacagaattagccaggaggagaaaagagccccttttgaaatgtcctggactccagctcttcctgccaggagaaactgttgtgttgcatgatctgtccaggtgagcagacactggccggcccctctgagtacccagctctggcccttcctggcacccactcagcacccacgtgttctccttgcggctcctgcagacttcccaacctccctgatctttgctgtgtctacctgcgcttggtggcccttcctccccctgggccttctccgccattcggcaactgctattcaggatctacagggaaataggtgggaaggtgccctgagctcagggggctgagccaggctgggctacaggatgagaaggtgggcagcgttcccctcccagctgctcgagctgttccagccgcaagcccacagggcttatgccatccccacagactccctcttcttggctgtcggtgccttgggagtagagatcctgggggccacatgacacatgtcctgcggggtgtttattttccccaggctcctccccaggaccatatttcatggcccccgtctggactggctctggtcagagcagcaggaggactgtcgggcacaccagggcagccaggggcctctgtgccccgctagcgggagggacgccgggtacatctcagcgcctgcctgcttggcttccgcccgaatcactccctcatgcataattgttgcggcgctgtgaagtcctggagctgatgggtcgttggcagccagatcaggtgccccattggcatggcccccagcacgcagcggccctcagccagtgccctcctgtcctcgcacataggcgcctgggtgccaggggtgtgcattgcatcctgggggtgggagccacaatgcctcaccctgcaaggactcaaggaggggctgctggggctggcggcccaggacggtcccgtgccagccttgggggaagtcgtgggatggtgacagacagccttttccagaactcggcctgaggctcatggttctgcaattcttgcatttgcgtgccaatgcttcccagtgcctacaagcgtgtttctgaccaaccgacctgacattttccccaagtgactttggcttactccccaaagacatttctcctgtgggatctacttgcactttcagtattctttggactggtctgcctctgcgggtccccagtgggcctgtacgggccgggtgttgtgggaggcaggcgggagccagacgtgtggggtgagggtatttcagactctctgtgccagcttccgttgccaaagagaaattgtgctgtgtgctttcttggacggatcctgtggaagcctacattctctgatttcctatttttttccctaagtcgctaagaaccaccagaaccctttgtattttaagtgctcacgtgccggtgccagcctgtccctatgtctctagcatgttccccaaaagagagtcccgtgggctgggagcactggcctaaataacaccaagaggctgctttgatgtgggccctctctggccgtgatattcaggtgtttagctgtcccaccgagcccttttcccctacttccctgtatagtgacagcacactttgggaacagggcctcagggaaaaccagatgtgatgctgtgagatggtagcagaggtcagctcattacatcggttacttttatgtgggaggagaaggtgaaccggagccctgatggggcacacatccgtgcccagggctggtgcccagcttgctggagcccagggctctgcagagccgggggccacgtgttgtgtgcctggggtgatgctgccccctggtgtcaggtggcggcagtgtggtccctgcattgaggttctaacgccggctccttcctgtcgctttttcagaccgtgagtccatcttcttcaacagccacaacgtgtcaaagccggagtcgtcatcggtcctgacggaggtgggtccctctgctgggatggcctggcctgaaactgccctcccgtgggcctaggtgtgggctgctgtggccatggggtccttggccaagctctccagcagggtagggtgggaaggacgtttgcctccatgccacaggccccaggaggttccagagccccctgttcctctgcttgcttcgagttttcatgctagcagccattgcagcccggcccagcacagggagaggtgaggggcacactgggcttgcagggacagaccactcactgcaagctgcccacacagaaggtgtgctgacccttctcccagcatgaggaattggaagaactgctctctaatctgccttgttcctgattttcaaaaaggctgtggaggcagcaccatctcagtcctttgtcctgcagtggtcctgaggctggcaggagtgttaccctgcccccagcactatgggtaacgggcgttctggccgttcagtgagtgttgctgtggccagtgtcagcccaggtgccctgcagtgcgggtcgcaatcaggtctcatggcatcagagaggctcagtgatctttgcacgttcacaaggctgttcacacggtgcaaggctggggtttgaccccagatctgtctgactccaaagttggatcttccaggaatttaggacttctgacctcaccagtgattcctgagcacctgaccccaaagaatttaggaaaggctaccctctgctgtttgcccgaagtccagagagccagcggctacttccctaaactcaagagccctctgccagggagcctgctgttctgaggatgcatgtgtgctgctcttctggggggctttgctggtctcttcctccctgtcctgggctggcctctccaacgaaccagcctccactccagtggcagtgctcgtgtccctcggggggctgccccagaacccagatggcctgtctgtctgtctgtcttttgtgtcagggtcctctgaggagccagcagtgtgctgaggattagacagagcacaggcgtgggcaggacctggagggaacatcgccatccctcaggatgttgacacatgtcccctgggaacatatcaggctttgggaacagatttcaacagagcctcagtgcctggctgagaatattatgagatgttctgtgcaagagacggctttcttctaagcttcagaatcctggggcttcttccgtgcatggctttgctctgggggcctcggcagcccatgcaatggaggggatttggcatttgcagactgagtgtcctctcaggggcaaggccagcagccgtgatggcagaaggacccatccagaagtcactgtcttggattatcacttgttgacctcagccttaatctcctcatctgtaaaacgggaaggggtcagcctagagacactgcagggcccttcccttcacctctgaggtctgcagtcacctcctccttccctcagcacatggctgctagtcaggaatctgccaggactgacgatttccaaaaatagaaaagagaaatgcggtcagcaccaccttttccactgggacatcagcccctcctggacgcccgcaggctggcctgacagagccagctctgttcccaggtgcggaaacacgcttgctgctcatccacctgcccctgcccacctggggctcctccagtcctgccttggcctccctgggagtctggtgcaggaagccctcctctggccttaaagcaccccctcccttcccagtgggatgcccctgcggatgggcctagccccaccgaacttggagggccccatacattttttgcttttcgaaattcagtctagggtattagttaagagcacagactctgacgggactgcctggggtccggcccaagctaaggcgagtcgcgtcgcctctctgagccttggtttcttcttcctgccccagaaggattccggagtccagggagttcctgggtgagaagcacccaccgcagttgccaggtgtgcagtatgggcacggtctcggcagccgggtgccgaggcccactggggacccatgaacgccttcccagttcctctgtcacctccttgctttccagaacgtcatcagatcacttgctttgagggccccaggcatcttgtcctaggatggctatttggttttggataaccagacaacttcggaaggatttctgagattctgcaaccaggccgagagcacttttgtaaatggcgtgccatggggcgtgtggcagtgcagcagccaagctcccttgctgctgggcctgtgctgtcagcctgaggcagcagctcctcccgtcgtcggcaccacaatctcacagcgagatgtttttattaccccatttactggggcaagaaaacaaggcccagaagggttctgttatggcttagggtacacagtggagagtgggcagctccaaggtatccaccagggtctctctgactcagtgagggccttgggctgcaggatgagtggctgagctgccccactaggcttagcctctggcccccactggcaagagtgacccaggaggctcagaaaagctaagtggctgggcgcggtggctcatacctttaatcccaacactttgggaggccaaggcgggcagatcgcttgagcccaggagtttgagaccagcctgggaaacgtagtgagatctttaatccctaccaaaacaaaatacaaaaattagcagggcgtagtgttgcttgcctgtagttgcggctactcaggaggctgaggtggtaggttcatttgagcccggaaggtcgaggctgcggtgagttgtgatctcgccattgcactgtagcctgggcaacagagcaaggccctgtctcaaaagaaaaaaaaaaaaagaaagaaaagtgctaagggatgagtgtctcttacagccaggccactcctgccccctagaaagtatttcttccagatacgacaccaaggccttgaggctgtgagcaggggggccctgtgtgtcctgcaaagccggggtgggagatgcgctggtgtaggcctcagagcgtgggtgatatccaggcgtgggtccctcagagcgtgggtgatatccgggtgtgggtccctcggagcgtgggcggcgcccggacttggagcgtgggtggtgcccgggcatgggtccctcggagcgtgggcggcgcccgggcgtgggtccctgctcagcgcttccctccctggaagttcccagtggttacttcagcctcctgtgcttgggtaagggccatttttcttggtgaccagggctctgtccccagccctgtcgatctgctttcacttttttttttttaattcaggtgcacctggcacagcggctcacacctgtaatcccagcattttgggaggccaaggagggaggattacttgaggccaggagtttgagaccagcctgggaaagatagtgagaccctgtccctacaaaaaacaaataaaattagccaggcatggtggcacacgcctgtagtcccagctaccccagaggctgaggcccaggagttcaaggctgcagtgagccgtgattgcaccactacactccagcctgggtgacagagtgaaacattgtctctaaataaaataaaattgaggtaaattcacatacataagattaaccattttaaagcgaataattcagtggcaattagtaccttcacagtgttgtccaatcaccacctctatctggttccaaaacattttcatcactgagaagaaaaccctgggcccaccggcactcactccccatttcccccacctcatgttattggcagccgctgagctcgttgctgtctctgtggcgttacctgtcctagatattccgtagaaatggaatcacacaatatatgagcttttgtgtctgggttcctgcactcagcatgatgtattcagggttcctccgctttgtggcatatgtcagaagttcattcctttttatggctgtacaatattccgtcgtatggatagaccagtttttgtagctgttcatctgtggatgcacgctggggtatgaataacaccacggtgagcgtgggtggacagcatccgtttgagtacacgttctcagctctggggtgtgtaccccggagcagaactgccaggtcagatggttattccatctccagcttttgaacccagcttcacttttgtctttcatggatcagccactcccttcccctttggcccctaagcccacaacccccaaaacttcactatttattgagcacctagtgtgagccctcccttggctgatttagaggagacgggatgcagttcctgccctagaattcagatgaatctcctcccagccgggcacatgctgtccacaccttatcaacataagtctgagatggaggcctgttgcttccttttacagaagagcaaacctgagacagagaggccaagtactgtttccgaagtccacagagctaggagttcactgtcaggtttggaacccacgtctctctgactccagaatccttcccagtgcagtgccccacttccttggaggccttggctgggggcaggctgagcccatgacagtgtgtgcctgtcccaggccagctgcgacaggcacaggacttgagtggcagaggggagtgccgggctgggagggagaacagagcagggtggcctgaccagcacatggaaaccttgaggaaagctgagcttggaccccaggaggcaggcaggagcagcagagcagcctctctggggagcccgcattgtttagggtgtgagttcatttggaaacagcattttttgggaaggaagactggcctgctgggccacagggccctcaccctcacctccttgggggtctctgtgatggcaggcaagtgggggtctgatcagaactcctcacttgtgcccggctctgcgccccagctgctcctagccatgtcccgcagctgctggcctcagcacctttgcctcccctgtgtcctccctggggccgctctccttctcccacccctcccaggggcccacatcctcctgcctccaagttccggcttcggtgctctgcaccatgtcttcccgggtccctgacacactctccatctccttcctccctgttaaaaggctttggttttagaggctaaaaaatatgggtccaaattctgccctgtgcttttgagctgtgtgactttagaccagccccaaccctctctgagctccggtttccctgtgtgtaatgtgcagtgctggcactggccttccaggctgtgatgagcccacaggaggtaatgagcctcacacacctcgtgcctggcggccctcagagggcaggacctggccagtggccgccccgtgctcaccacagtaggtctgtctggcttcctggcctgaagcatgccagggcctcgtggcagctggtgtggggggtctgtctgtgtggtgtggcttcgcagctcctcggcccatggcctgacttccttgtgtatgttggcagctggacaagatcgagggcgtgttcgagcggccgagcgacgaggtcatccgggagctctcccgggccctgcggcaggcactgggcgtgtcactcttcggcatcgacatcatcatcaacaaccagacagggcagcacgccgtcattgacatcaatgccttcccaggtgagtggcggccaggccacctccactgaccggcctccagagactgtcctcaggtgaccaggcaggtgaggcggggtgactgaggccagaaagccagctttctccctcaccacgaggtccggggaggtgcagccccgagaagcctcagcctcacctgcgcgatgggcttacggggtgtgcgaggagggagggagagctgcacgtccacctggggagcgccaggcacagtggccacagcacgcatgtccctcacctcctctctccacctgcgtcattggtggatcagcccctcccccaggccctcctcgatttaaggagcaggaaggaccttgaagggattacagccccctgcagtttacatgttgggaaactgaggccctagagaggaggaagctgttcaggccccacagcacattggtggcaggccagagactcccaggctcacgttgcctccaccaccctgaactgcagcgccgggcagaggcctggggaggagccctgggctatggagtctgttccctgctgccagctgggccctaggaacccactggcattgagccaggctctgccatgtgcccctcagctctcagtgaggggccctatggggaccgcaggagcagagccccagcacagggcatgaggaacgatggtgtgacatcacagctcgcggtcaccaggctgcgtgcctcgccctggggacaccaaggctcagtggcttgtttacctcccgcagcagctcagagacagagccgcgcttgatgccttggtgcctgccattccccagatgggggtcccccgttcctttctccatcctgacccttgtaaagcatctgctgtggaggtgaagccagccttgctagctgctgaggtgcaaaaacgttcaggaaatgcctcctgccttcagagactgtgcctggcaggtggggactcggggttgtttatcgtggaggtgaggcaggaccttggccccacacactggctgggcactttctgtgtgtgtcacctccgctcgtctgagagcatgcgcaggcgcagtcagcagcaccggccacagcaaggaagccaaggctcagaggagtgtgctggctcctgtcattcagctggtgtttacccagggctgctgtcgcccagggctgctgtgtgtcccagctggtccagatgctgatgcagcttgagctccactgccatgccctgcctggggagagctcacccctgtctggaggaggcggaggacagagcgggcggtcagcgggctcctctgtgaggtggtgacactggagcacaggggcaggtcccaggagaggcaccgtggagccctgtggctacagcaggtgcagctgcggggcaggaaggctggaggacagagtcaggggagctgcgtgtggtgaactgaggacgttggagctctccctgggagtcggggagcagccaccgtgagatctgtgcttgtgaactgaaagggcagacccgtgcgacgatcgtgtttttctccattgcctctgggtgcagtggggaggaaaccatgggtttagctggagctgggatttcatggggttttgctggcaggtatgagggaaccagggcgcaagggacattcaggataatgcaagggacgttcaggataaggaagtgtgggatctaaaccacggagcatgttttgagtggcagaatgaaaaggggacaacgtcagtggctggagggccaggggggcacagggaggcctgttagaagagaagttctggaaggagggaggagacaggagagggtgggaagctttgcacctgagcaaggccagtgcctcccaacacaaaatgtgtagatggtcgcgatctatgggtgcagataagggatggccttgtgagtcagtgtggggcactgtgagccagtgtggacagggagggttcttccagagaagccaagagaagggccacccagatggggtgggactatggctgagcctggcggagactggtgagggagcctggtactgaggagaggcccagggctctggcagggcagagctggttccccgggagatagctcagtgtgtccgccttaccatagagcacccttttggggccaagcagagcagcaggcctgttctcctgcaccccacaggaggcaccttgggccatgggtgtccagcagcacgtgggtgggagaggcctgggagagggcccctccagagaggggctggctctggagtaataaccgcaacagctgcaagcgctgatgacaccgtgagccaggcctgccccgacgcctcacttcgtcctcacgaggcgttgtgcaaagggccgctggaatctctgtgttgctgataagaatgtgaggctgggggttgagtggcttgtccaaagtcacgtggtggagctggatggggcccagactgtcagccccagcctttccacctctcagctccagccatgggttcgaatcttgcctctgcctttacagtctgtgatggcacaagccacctaacgtttaagtctcagtgttcactgcagtgggaaccagtttcccaccctgcagacagaggagatggcttttgcacagtgctggtatggagctggcaccctgccctgcaggttcatgcctcagtccgctccccgagctcctgtttatcctcaggcctccgtggaggcagccgtctctgcaccaccacagaaagcggcctccctgccctgggccactgggcgttgtctggggatgctggaggaggttgctggagaatggctccctgttccctggcgctgacctgatggtggagctcctccactgcatttctccctaggcacccaacagccatgcccgtgcccgggacacctaccctgccctccaggcctagcccagggccgacggacaccccgggtcctatggtgggggacctggcaccatgtggtattcaagacacacacaagaccaagggcgtccttcagatcccactctgcctcttaggagccaccttgagcctcagggtcctcacctgtgaaacgggctgcaggggtgcggtgggctgaggaccgtggcgctcacagcccagtggctgctacttcccgagtgctgtgaacgccatggacgtcatcactgccctccccgtggtggttaacggtcatgcctcctcatctgtaaactggggacagcattatgaagattaggcgagaggatgttgcgggacgctcgcacagtgccagctcgggaggcgccgcttgccggccagaatagccatctttatttccaccgcgggcacctgcatcccctctcagacttgggcttcctcaaaccacagcagttgtttgctgaataagtaagggcatgggcagattcagcagtctcatcttccaggcccctgggcactgtaagaggtggcacagggtgcccccgtctgaaccttcattcccaccctggtggggctgatggttgtaaatgttgtcccagaggacagcccagggtttttgaaaactcccgcccctccaagttggctcaggcaggcagggcgcttgccctgtgtgagtctcttttggagcagtttgctgggagccagcagaatcctcccctgagatccgaaacctgcttggtggctcccgagggctctgctgatgttcgcaactgtgttaggaagcacttgccccaggcaggtaccatggtttctgttctgttcccctctgttaaggggagcatgtgatgctgcgccctggagcttgtctcaggcctggatgttgctagtgatgcccagcatttccgttccttggctgtgatcctcagagaatgggacacagggggcctccctgcaggtattttgtggtgagaaggaagcagactcagttggggcggcagctgctttgtgaagcagacaccactcacatcccagcctctctcagtagtgccacagcagcctccacctgggcggcagccttctcttctcagtttgcagacagggaagctgaggctcagggtggaagcggtctccgggactcagcctgaggccagactcagctgggcctcaggagtatttattactccaagtgtgtggagctggctttggtgctgctacctccagccacgccaacatcccctgcacatgtactggcttttaccatgcaagtggatgggtgggtgagacagtggagctgtgcctgagaggaacagggacaagcaagtttcatcctcagctcaggttcttcagcttctcacaccctggcaacagctgaaggtcgaggagcacgcacctggttgggcgtccaagctttttgactcccctcagccccccttatctgctgagcctcacgttttctctgtaaatgggacgctgacagcacaccctgcctcatcccaggagcccatcggttctgcctcctcctcctcctccctgcatgatgcgtgcccctggctcacgccccttgtgctgtctctctcccacccccaggctacgagggcgtgagcgagttcttcacagacctcctgaaccacatcgccactgtcctgcagggccagagcacagccatggcagccacaggggacgtggccctgctgaggcacagcaagcttctggccgagccggcgggcggcctggtgggcgagcggacatgcagcgccagccccggctgctgcggcagcatgatgggccaggacgcgccctggaaggctgaggccgacgcgggcggcaccgccaagctgccgcaccagagactcggctgcaacgccggcgtgtcgcccagcttccagcagcattgtgtggcctccctggccaccaaggcctcctcccagtagccacggagccgggacccagaggggcagcgcagggcgcagagcacacccgctgggccagcagctcccaacggcgatgctactactaagaatccccagtgatctgattcttctgttttttaatttttaacctgattctctgatgtcatgatctaaatgaggggtagtgggggatggaagagagtaccaggtggtccaccgttggggagtggggccgtccgcctgctctctactgtgcagacctcctaactgagtttacacacgcttgtgtttgcaacactaggtctggatgggaggtgaggggtgtgcgtatggctgccatgccagtgtctgtgcacatccctgtctgttggtctccatggccactgtggaccgggacccttgggggaagcctgcccatgtcgggctgtgggaggctgatcggtgcatgtgagagtggcttcccttctgcctgactccccactccctgacctgccccttccttgtttttcctcctactggtctccaccaaggctttgttagcccccaccctgcctggtgtgcagctaacccctccctccccacagccagaggaggccacagacccctcaggggagttccgcgctggggtctgggctgtgctccctcactaaagggaaggaaaggaagctgggcgtcctctgggccccccaacacacgtcccatttagccctgcacagcggtctccttcccctaagccagcactgctgctccctggagcccgggaaggaggctgcctggctggaggcccgagccgatggcgcctgtgctgaggatttgtgctgtgatttgggcaaatcattccaggtctttgggcctccacccccttgtctctagtggacatttgagatcagagagcaccacagggctggctttgtgccctaacccctgggatgcagcctgcctttccataaagtcacctaggtgaggataggcgcgggagcctcggcatgacaccatggagatcggggccctcttcccagtgggttcactccttttcacacctgctgggtccctcctcacccagcaggcctggtccacctctcattgcaagccccaagcactgagccagcaggtgccagggagccacccgccccccatcgcttctgcacacctcagactcaccccatcaccttggcagcaaagcactggctctgccgtctgacccctgatccaggcagccccctctgcagagaaaagggttggggagaagcctctgcagtcctggaagatgtggggtgctgggtgagaggcatcagcccccacaagtatgtttttgtgtcttaagatagcagtttactttgaaaaagtgaaaaaggcttccgggctgtcctctgcccagtgagatggaggacgctagagaaagtgctgagtgtcccgagagaggcccccgagccagtgcatggaggtccttcggcctggctcagctgggctgcaggatgcccactttgaggagggaggcacagggcttgggcgaggggcagaggccatcagaactgcccggcttttttggaaactgaggacccaacaactaaccacgtttacacgacttgagttttgaaccccgattaatgtctgtacgtcacctttcctagttctgaccctgagccctggggaacaggaaagcgtggctggcctcttgcactgctttgtctccaaaataaactactgaaatcaaaccgcatttcacacgtgtttacacatgttgctcaagtttgttatgtcatactcccagtccttaaaagacgtttaataaaacagctttaccttttaaaaataaaatttcaatcccagtctgcctcaggtacgggtgggggtgtgcagcgtgactcctggctgtgttcctgtaccgtttgtggcctccggggtcttgcgcgtccagggcccagataccgagtaactgccatgtggtgtcgtggtggcgtccataggcctccgtggtggggcgggggcggggctgtgggtgtgcagggcagctgcattttccaagagtggagatggaggatggagatttgcttcgtaaaggcctgggagctacatgggaggtagggaggggccagccacacccagggctggggggccggtggactctgcccagtgaagccaggggagtgtcagcaatgaggggcctggacagcgacgcgggacccgcacctgggagcggcagagatggagcccagctcgctaaacgtaccctaagggtgcacgctgaccatctttgatccctggacagtgtccatagagttgtctccccttcggtcacattgtccctggccttggagtttctgcctcagggaaagacccactaaaaccacccgggctctggcggcctcctcttctccagagcatggtggcgctgcctcctgagcagagtcactgagagtgtctgggtccaaggaagggacccacttagcaaaggttgttgtgtggtgctgtgcaggcacggcgcctggagttggccccgccagcatcggggtggcttggggctctggttcctaagcttctgcttctgagttggtcagcacgttggctctgcgccctgcagtgcctgtcttgatggtggtccctggatgtgctgaagggctccaggagcaaggggccagaccacactttggctgagtccttgggtagtttcagagggtcacctgcacagtctgcattgagcaccctggggctgaggccgtgggtcaagttctgcctgacagtgctttgattatatggtgatgtgattctgcaaacataaccccccaactgagtgccagctgctgggtgtccccaccccaagagccaaggggaggccaccctggaactggtgctttgcccttggtgtcatggaggtgtctgggtccacacgtggtgggtgggctgggcctgcagtcacccagcatggccggcgggattggacccagctgcaacctggcaggttccatggggcttcctgtgcctgggcctgcctgtgtctcatgcctgtcaataaaggagaaagcaacctgggaaaaacattcctctctgtacccaggggactgccaagtgtgctttatagaaggctggaagaccgactgaagtaggaagctgtcacatgtttgagccaactgagcaaagcagctgttgcctgccagacagccaccccaagaccaagggagccagcctgtcgtttgtccttctagcctggaagaccagttcttggctcttgggcactcacattggccactggccacaactgctgaatggcttcactaatgtccctggggtctgtatctgccctctcttctattccctagaaactctggccgggcatggcggctcacgcctgtcatcccagcacttagggaggctgaggcaggtggatcacaaggtcaagagatcgacaccatcctggccaacatggtgaaaccccatctctactaaaaatacaaaaattagctggacatggtggtgggcgcctgtagtcccagctacttgggaggctgaggcaggagaattgcttgaactcgggaggcgtaggttgcagtgagccaagatcgcaccactgcactccagcctggcaacagagcaagactcctcaaaaaacaaacaaacaaacaaacaaactctgatcattcacccggtgggatccccggcagctccttctccttcccgagctgtggctcatgggccattggattcagagaccttgagctgggtgctggctgccctaaaggagcacgacccctccagcctggtgaccgggaggcagagaagtgcagctgtccttgacaaaggcccagcctctgctgcctcaggccagcctggccacaccccgatgccacagtcatctgccccgcccaggcataagcctgactcaggtgatacaggcgaggcttctcccatgggtcctccccttgtgagaaagggtctgtgctgtgtaccttctctctgcacagccattgtcagtgtggtttggagtgagtgagcctcccgcactgctcaggggagagctggtgagcatgactccatggcctcctgctggttggggtcttcttctgattctcacccgcaggagcacccagacccccccttttcagaaatgattacattttcccttcaagagtcatctgtgacctggtggtgtggagggactgtcccctcctgcagcctggccgacccccttcctccagggctgtgtggaatcacctctcagaagctcactctgaaaagccactcacagggatttcaccaggatgttgctgttcctgccgacacctgggctttgtgacaaatgctgtttgcttcaagctgttcacaagcaacttcaccagaatcccaagctggttcgtacttaatttgtgtacatacatatgcataatatacatgaccatgtatgagatacagacaccatggcttctgtccattggctcattcgcctggtcgcatgttcactccatgaggttaggacactgcgggtggctttgggatgggtggtttcagggacaaggtgtcgctatgatctctgtatttgctaactagtcttgttttgatttctaacggtctagtggagtacagttaatgttgtgtttatttctgtaactgtaggggtggagtataaacctaacttttggaaacatgaagaaataaacaatagcgccagccgtt

SEQ ID NO: 374 - DNA, 179012 bp, Homo sapiens; identical to SEQ ID NO: 373
  source 1..179012: mol_type = genomic DNA; note = NT_187601.1:c230487-51476 ITPK1 [organism=Homo sapiens] [GeneID=3705] [chromosome=14]

SEQ ID NO: 375 - DNA, 69288 bp, Homo sapiens
  source 1..69288: mol_type = genomic DNA; note = NC_000003.12:c126357408-126288121 KLF15 [organism=Homo sapiens] [GeneID=28999] [chromosome=3]
agtgctccgccgcagcgacccgcgggccggcgggcgatcgagccagcgcaggacccgcggctcggcccccggccgccgccggaccgagagtctagccgccgcccccagcccagcccgcccggccgcaggaccgccggggcctggccgccggtccggcgtgcgccaagttcaggtgggagaggcgcggcggggccggccggccgcgtggacgcggccccgggtgatcagagggctggccggcctcggggcgcgtggccgtgctcccgcgcagctctcggaggcaccgcgcgagtgctggaggaatgtcggaggagcgggatgggcccccgcggaggtgggcaggggtcggactggcccgggggaggtgaccccccccgccccggtcgcccaccagcactttgctgaggcccgcgccgccgcctcggtgcctggccgggcgattccgtggcgcgccttgcgggccggccctcccatatggtgggcaccggcgcggcctggtgagaggagggggagagcggacgcgctggccagcccggggttggggggcggaggggctggagacggaggggttactgtcggtcaccgcagcagtgtcgggggcaaggggggggcgtgggacgagggcatggtgcccagcgggcagcggtccaggactctagaaggggtctgagccggctctcttcatttcccacgcacgtttcccctcacccgccggcacccacggcggctccacgcgcgagtccttcgcggacagcctcccgcacagccacagcggctgccgcgcaccacgccccgcacacgcagtcacacgacaggaactcacaccccttcacgcacacccgcaccgttcacgcgtctcactccacgctgagtccccgtccgctcagaccgaacattaccaaagccatggcctgaccgagggatggcggcggcggggcagagaggccgtccccatcccatatggtggtccggttcactcttccctccccgccttggtgttactcatggaacccccctctcacggagggcacagaggggctgttttctcccacggccctcggaggtgacaaaatcaacaattgtttgagagcctcaaatctccttccccctgtccccccggaccaggtggcccctggggagaccctgccgccctacaggtgtgaggacgcccggactctgcgactttggggcctgcgggcggctcagggaccggagactcttattttgaaggacagcccccgccgccacccccgtgatttgcacgctgacccaatggcaagcccttggccggcgctgggcttgttatcaattacatgttgttcctgcagccgctgtgtccccgggaggataaacagcaggcctggccgggccaggggagggggcggagtccggcggccagccggggactgtgcccggaacagcgtgtcccctccccctgcacgcagcctgcgcctctggccgccccacgtgctgctgtgtttcaggggccgagccagctccagccctagagtgtcctctctttaatgccggtgccctgggacatcccagagccctttctgggttgtcagtgcctgggtgcttcccccttgggacgttcagcccagcattaagaccctgttggctgacctgggccacccattcctactctccgacctcccccgctctcccccgcaccttccattcactcattcagcaaattttgcccggtcctgttttagactctgggatatggccttggagtgaacagtcaggacagctgatattctgatgggaaggtagacagggaggaaagttcacaaacacatcaccaagatagtttcccacagtagaaactgcagggaagagtataatataggatgatgtaacagagtgggcctggaggcccccacaggggtgacttctgagccgagatctaactaagcagctcccacctgcagtgctgggggaagagccagggcagtggccccgggctgaggctgaagtgaagtgagcacacctggactagaagagaggcagttggtggtgaggtctgcagagagtcccaagggcccaggtgctgggctgctgcgaggagatagggccacctgtccttgggaagccattggagggtgtttccttccagcccccctactgtactttttagatcactttatctgtcaatatctgtttatatgtttaaaaggtaaggcctcctttaaccacaatatgatcatcacaattaaaaatattaacagtaattacttaatatcatgggatggccagttagtgatcacgtttcaggggagggctctaaggcctgctctgggtcccaggagggctggaggcccctgattccttaacatcacagtagaggggcagaggccgaacgtttgccgtgcctgcaggctgacaccaatggctggcactggctgagtgctgccggtgtgccagatcctgaggggggtgcttagtgagcgtcagctcacggaattctcacaacacctgaggaaccaggcactgttggaagcacccccatctcacagactgagacagacacagaaaggctgtgcacctgcctgaggtcacctggcagacaacttgcagactcagaaatggagcccctgcttggagggtgggaaagggttgggggaggcccagggtggagtgtgggctctgcccagccttgtgcccttcacagtgtctagcactttcattccttcccagcacctgatttggtgaataggtgcattttaaaacatattccaggtttaaatccttagctgagtatttaaaccaaaaagccaaatgtcctcctagtaaaactggcctggggcacagaccttgccttagtttcctggagctccgtgaagcttcctgggtaagttgggaactggggctaaaggtcctggggtccctgagcaggaagagacttagagatctttgaagcatggaacagatgaggaaactaaggtttgggaaggggagcaaggacttgctcaaggttgtagctgatgatggtattggccattgggcagtgccgggtgccaggccctgaaggggtcctggagacagaggggctgggtgtagaggtgatgctgggcagcagagaacctctgactttggtgcagagcattccccttccccaagcttgataaacacccagcctgccctggtcactgagcagggacaaaggttcacagaggtggccccgtcacagctggacactattgactctccttggcaccagacctagcatgtccttggcttcagaggatgcagctttcccttctcctctctatcaaagttctctgagcccctgctgggcaccagcggccagtccaggcactggggacgcagcagagacatggagtgcactgtctcagggggagacaggcattagctgaaccttcgcaaggcggtgagtgtcccagatggagagagcaatggcagagagtgcaggggactccacttccttattggtcaggatgggctgggggggtggttgtctcctttcccactagatgggtgtgaagtccaaggcagttaggcacatgcgggtgctctgggaccccagtggtctgcttccactccacggattatcaccagaggggcagggccttggccaccaggatgctcaagcatcagggtgcaggtgagagggttgcgttcaagcctgtgccactcacagggcagtcaaggctcagaggggtttgaggactggagagtggaggagctttaggtggggaaacagctgcgcaggcaggcactttttggtctttgactgttttgcctacatgctacacttgcccagttaaaatgcaggcggcctagttaaatttgaatctcaggtgaaataatttttaaatgtaagtgtgtcctatccaatattgggaacatacttatattaaaaatagtttattttttaaatctgaaattcgaatgtaactgttggcttgtatttttatttgcgtaatctggcaaccctctggaagcctcagcaacatgagggtcagagggcaaatggctgttctacccccattctgtgactcaacaggcgtgaagctgaggtcaggagtcctcagatgtacagtgactcctatgatgttgacggtgggctgattcagggctttggccctcctggggtccagagagcctcctcgcgcatgcccttctctcatactcacccatactcagttgttcacagacatatgtgctattttccaggataattctggaaaatctgtttgaaaccagaagtgcccctggttatgcaatgggcttggagaggtctcttttgcaaacaggtggtgcaatttcagaaaacactcttgcaggcacagctctcctgggggatggaagcaggatccaggcgtttggcaataggaggctgtgggcaggcagctgagggtggggtcagaggcctgcgaggtggcaggtgagcactgtccttctgaccaggcctcctgtgttcctttcctgcagccgccaccggcacggccaggccagcatggtggaccacttacttccagtggacgagaacttctcgtcgccaaaatgcccagttgggtatctgggtgataggctggttggccggcgggcatatcacatgctgccctcacccgtctctgaagatgacagcgatgcctccagcccctgctcctgttccagtcccgactctcaagccctctgctcctgctatggtggaggcctgggcaccgagagccaggacagcatcttggacttcctattgtcccaggccacgctgggcagtggcgggggcagcggcagtagcattggggccagcagtggccccgtggcctgggggccctggcgaagggcagcggcccctgtgaagggggagcatttctgcttgcccgagtttcctttgggtgatcctgatgacgtcccacggcccttccagcctaccctggaggagattgaagagtttctggaggagaacatggagcctggagtcaaggaggtccctgagggcaacagcaaggacttggatgcctgcagccagctctcagctgggccacacaagagccacctccatcctgggtccagcgggagagagcgctgttcccctccaccaggtggtgccagtgcaggaggtgcccagggcccaggtgggggccccacgcctgatggccccatcccagtgttgctgcagatccagcccgtgcctgtgaagcaggaatcgggcacagggcctgcctcccctgggcaagccccagagaatgtcaaggttgcccagctcctggtcaacatccaggggcagaccttcgcactcgtgccccaggtggtaccctcctccaacttgaacctgccctccaagtttgtgcgcattgcccctgtgcccattgccgccaagcctgttggatcgggacccctggggcctggccctgccggtctcctcatgggccagaagttccccaagaacccagccgcagaactcatcaaaatgcacaaatgtactttccctggctgcagcaagatgtacaccaaaagcagccacctcaaggcccacctgcgccggcacacgggtgagaagcccttcgcctgcacctggccaggctgcggctggaggtcagtatagcgagtgacaggcctgggcagtgagcacagccactcatgtctgcttacttgggtgtgcagcagggccattttccaccattaacagaaggtagatgagggaggggagggaggggcaggcgggtgcaggcccagagctggcacagttgcctggaggcttccttggtcctcctggttcctgaagccggaagccaactggtgtccagtttcctgatggccaggtaaggcttcactggcctgtgctgccagctgggtctccccatccagtctgacaagggtggggattgaggggctggcgaggaaggatgagtgcggtctaggggccaggcagcggctccctttgggcccacagccccacagggtaagtaccaccatcactcccaacttacatcacaggacactagggctccgactggccaggtacttgcccaaggtcactctgctttgtgaatgggatttgaacccagaggccggattcgagaggtcacatcctgaaaatgctgcttccccaaccagtgggactagcttcattcacagatgtctctggacacatgggctgggcctcgcctatgcttcctccctggggacgtggaagcatgtttgggaggctgcaaaggccaacccagagggaggctaggccagctggtggtgctgtcacaggtggcagaacccaggctgtctggtctgcatggcagtggggaaatcaggcctcaaatggtaactggtagtctcccaaccagggagcacccttccctgagcaccgggtgctgctcaacctccttgggagtggctgtccaccttttcctgaaatgtaggctgcttgcgaagagctcatgtgctccggggtgccagagccagccctctgcagttcctgatgcccatcccaaaggaatctctggcctgcctggggggcgctgtgtgctgttggcacattccaaatctttgctgctgtggctgctgctacgtgtgtgagacggggcacactcatctgtatccctgggggtgtatacaggcctgggcctcgccagcaggtgtgtggctgtgtgtgtgcacacccacatgtgtatgcatcttgctttctttgtgtctgtctgtgccgtgtgaccatatgtgtttgcacacatacatgtcttaggtgtttgtgcaccatgtgtggctgcctgtgtgtgcatgtgttatgtgtgggtgcaacacccggggagcagtttgcagcttttgttttcttgaccatactctggttctgagagctcttgagagttgtctggggcagaggttctggccagtgaggctgagctgtggtcagggagctgtgagtggaatgtatgttgtggcactggtgccacctttccattgagtgccaatctggccagagaagggaattttcctgaacagtgtctaggtttatggaggcccctcctgagtgaggacatcactctgtcctgtctcccaccccattcagacagaccggagaggcttctgtgagagcccaccctggggcctcacaaggtctccatcctggagtccccacctctctgagctttgtacctaggcctgccgagtgggtgcatggctgacaggttgcttgtgagaggaggacacagcagcaagtacactgcataggaggttagaggagccgagagaagggccaggagtgctcttgattgaagcaggaaacttgtgcagagaaggcgagggcacaggtatgtgggggctgtggtcttgagcctacgcctgggtcagccactaacttgtcatgtgcctttggggtggtccccctccaaacctcagtttcctgtctgcagagtggagggctagccctttgcagcccagggcaggcgtgcagggctccacagcggcctccttgttgtttgtacatcataaggatacaaactcatacacggcagtttctgaggaggaaccctgaaggcattctctccagcccccaagagggtggtgcctattgtgaagggaccccctactcccagggaccctgtatgcactctcctcttggtgagggcgggcaggggctgcagagaggcagggaaacctccctccaagcaccagtctggactccttagtcgggctcaggtttcagcgccgtctcctggccatagtcgaccgttggcaagtagctcctctagatgccgtgaggctgggtagggtgatggggagggcaggtgtggtcctcatccaaggccagccttcttcctggatatcttagggccagagagctgataggcccctcagcccaaagtgtatctcagtgaggcagatcttagttctctatacagtggcctcaggaggtaatgagttcctcatggcagggggtgtacatgagagagtggggacctgtggaggggattcagctctgacacatctgagccctggcactggtcgtgctgcccaggacccacttggcaagagaaggtgtagtggttgcctggcccagtgagatcacagtggcactgcccccaggagctgtccctgctgccagccatgccccgggcttcctgagggctcctccagcttcccccaaggtcccctggagtgggtctggccctggtggggtaactcatggcagaggcgctgttcggctgggagctgaggacaccggcctctagggagggctgcttttctgaggatgcggggagtcctcagctggctttcagggatcttgaaaccctggggatgtgcccagtctgcttgtgtctcttaatgtggtgatagtcttcaactgagagggagcccctgcagctccttacagcagtcaggagggaggatggaccccgctttggggcagctgggtctggacaggactggaagggtaacgatgatgatggtgagatggcgtatttactgaccactcactgtatgctgggcactattctaagtttctcagagctggaatcccctccgcccactattgtaacttgcatacttcctgccatggggagctcattaccttctgaggcctttaagtgtactttgctgtgcttcagtttctattcaagcttctcgttctggcccatagacccacacaatgtgcttacctgtctcttccccttactgagtgggatccagccacgctggcctccctgctgtggctcaggctcccgcgtgggcatccgccctctctgtgccctctgtctcaaatgacccctgcccttgaggctgtagtgacagcttaaggttttcgcattagctcatcaggtccttgtaactgcctggtaaagtgtaggcaccaatcttcattttacagagagggaaactgaggcacagactgctcacgtcacatgcccacagggacatagctagtgagcaaggatctgggttgcatgactaagccctagcagagccctgctctggccacctggtggtcctagctggtatcagagtcgccatgtgtgcctccagtctcccaccaagaggtcggcccaaaaggcattatgcttctgggctatgggaaaagagctaacgaccacaatcgagataataaccagggcctctaatgcatacttggcactgctctgagcaaaattcacacatattaatttacgtaattctcaaaattagtaggcatcagcatgttgtccctatttcacagaggagagaattaaagcacagaagagttaggtaaattctccagtcagccagccagtaagccccagagccaggagttcagctgaggctgtctgcccagaatcagggacctccctctgcaccccggtgttgggtgctaactctggtgttgggaacctccacctccatctgcagctcagcctggtctttggggtggcagctctacacactcacctactccccgtgggggagctctccactcccaggccgcgtctcttcttcctggtggcctagatgaatgggatgctctttctgcccaggctggctctggcctagtaccatgtcctgtgctcggagaacaagccagggcccctcaggcccctcatacctctgtgtaatggacagtgccctccctccactgctgaggtcgtcacctgcccaggtactcagcctccacttccttctgcttttggtcctaagagtactccctgtcccttctctggtgacatgattttggcaccctcaacagggctgagagcaggctttccctgttctgatccagccgtctgggaagtgctgcttgcctgccttcctagaagtttccttgcctcactgtcagacataggcatcctttgttccttgcagcagaacgtcctgttccagaatggccaagccattccatccagaaagaatcccttctgctgcagtgaatatgaatatgaataactgtcatcagcctgtagggtgggtacttttgtcgtccacagtggatgtggtgggggacagagaaggggagttccaggctcctcttgagcgtcagagccaagaggtggtaggtgcaggattcaaacttaggggtctggctcccagcctgctctcatgacccctctgcattgaggctttttctgacctccttccctctgtaggcagaggcccccagtatggttgggcaggttgtgaactgcacaactctagggagcaccatttccattgcagtttctgagactggactgtttgcggtgttgtctggcggatgagggttagtgtctcaaggaagggacgccttcatacagaagtgctgtatgcaccagccctgacattatagctgctctagagagacactggacccctgtgtaccctctgccctacagctcagcacaaatcatagtgctgccctgtctgcagcaggacccaccaggaaccaggcccaacactcaactccatgcaggtgataagagctcatcattcttgaataattgccacgtgctaagcagggctctaaaccgttactggttgccttgtacaatcctcacagtcctcaggaataggtcttttgttctccctttgtctgggtagagaaactgaggctcagggagcttggtgactttcctagtttgcctggttggtaagtggcagagcttactgcctacaagggctgcatcttacccaccgggttcccacatcccccactgtagtccccagggctctctgttggctgctgtttgggagaatgtggcatgcaggggtgaggcagggggtcttctgagggctcagttcccagggaagttcctctcaggtgccaggaccctgtggcagcagggagggaattcaggtgaggacagcatgttgtccagcttggttctatctcatctgcctgtccttcccagggtgtcaccatgaccagagatctgtgtggccccacgtcaccacctgtggcctttgagatgagtcttggaaggtgggcaggaatgccagagtcttcattggatgaatgaagaaattgaggcccagaaaggaccattcagggcacccagtggggtgggaactgtcaaggcaggagcctgagactctgtcccctgggctgtgtgacttggcctctttaaacccttgccatggtcttgccagtccaatggggctggctcatcctggttccctggccagtgagatgctgggtgaccccagggctgcagcctgggaggcgtggcactctgtgtctgcagctttctgcttacccctgccctgggccagctcctctgctcagaagctgtgtgcccagctgcagctgggggcaggtgtcctgcccaggagcacaggtgtcagctttgactgccagggcacatttatcccatttcctcactggcacagggccctgtgacacacacacccatccaggcctgtacaggaggctggggggctctgctgactgggagtccaggtcatctgccattgccagggcagggggctgtgtcaagacctctgctccagcctcaggggccctgtcttgtcagtgacctggaccaggccctcagcaccctgagcttcagtttcctcctctgacaggcagggcagttgggcttcacctagtctggagatgtgctgaaagcactgccctgtgcctggtgccaccaccactctgtgatgtgagtcggagttcctgtctcctcctgcaggccctcctgccaccccctgtgccttgtccagagcatgttctgctgggtccttctgctcttccacccacagggtcagggcgccagggcatcaccagcccttaccaattgctgggtgggaactgctgctctgggcaccgcctctcgctgggtggccctggtccacaaaggggtgttgggcctcgtgtccctgtgtgtgtgtgtgtgcgtgagtacatgggggcatgaatttgtgcctgtgtgtgtgtgtgtgtgagtatgtgtgggcacatattcgtccgtgtatgtttgtgtgcctgtatgtgtgggcatgtatttgtccgtgtgtgtgtgcgtgcatgctttgggactgctccttgacagtgtctgcccccctagggctgcttgctgtgcccactcttgcattgaaatccacctcctcagcacctaccatataccaggcattgggctggtcatgggaagaccaccgggaaccaagacaaacatgtcctttgtcatggagctgacagtctagtgggacagactgacagtcatcaaaaagttgaagataatttaaaatcaaaacaacagcaagaatgaggagagagaggtgtgtaatgccacaggagcctagaattggatgcagtcctggagggatttcctaaggaagtgacattcgagctgagctctaaggaatgggtaggagagagcaaggagggggagggaagaacattctagaaagagggaacagtatgtgcaaatggcctgtggcaagaaggaccaaggaaaggtcaatgcaggtggagcacagagcgggatagtgtgtcgtgggaggggtaggtggggtgggagggacctgctgccaagccaggggtggagagggcctcaaatccctgaggttggtggcaagcagtccaggccctcgatgcagcttgggctcttgactgtcacatgagtgcctgctcccaggccagcagggccaagaaagcgaaatgtcgggagccacctgaactcccagatacactttgcagggtcaatctttatttgggcctgccttagagggcccagcttccagcacagctggtttcaggagtgggtggactcaagtctgaggacctctctccctgtgctgcttcctcctcccaggcctccgtttcccctccggatgggcggtcctgtacaggccttcacagatgcccctgtggagttctggtccagtggggtagatgaggccagggtggtgagaggcagccagcatcagggcctgagcgactgagtgcacctgtggcctcagagacccctgcacactgggtgggctgtgggagggaagccctggtccctggtagcattggggtcctttcctgttgggagcttttaccagctgctctggcagttcccaacagagaatgcccactgtgccagcatgagcctttactgtagttctttccatcttggaggggtggcaggggcagcttggcacagtggctcacgcctttaatcccagcactttgggaagctgaagtagcctgatcgcttgagcccaggagtttgacaccagcctgggcaacatagggaggcctggtctctaaaaaaaaatacaaaaactatctgggtgtggtgggcacacctgtaatcctagctactctggaggctaaggaggattgattgagcccgggaggctgcagtgagctgtgatggcgccactgcactccagcctgtctcaaaaaaagaaaaaaaaatggtattttgagaactggtatagccttaccgacgtagatgggggaccctcccctaatcctgtagaggctgcaggtctgcgcagccaccctttgggtgagtgccaggtgcacgccttgcatcccggcaacttcgtggggtcggggcaggcaggggcaggcagggccaggcctcgctgaccgcgccatgtcccgcaggttctcgcgctctgacgagctgtcgcggcacaggcgctcgcactcaggtgtgaagccgtaccagtgtcctgtgtgcgagaagaagttcgcgcggagcgaccacctctccaagcacatcaaggtgcaccgcttcccgcggagcagccgctccgtgcgctccgtgaactgaaagcgccctgaaccccagcctgtccgtcaccccggatccccaccccatccccatttttttaagcaataatttatttgcctcctccagagggacatggcaatgttaccagcccaccttctgaagcctgggaggtgtgaacccagggcccgccaaccgctgcctttctcgggagtacttagagcctcgaacccgcgtccctgggggctgggccccaggcgcacggggctggaggcaggccttcgtgccttcgtgccttcgtgccttcccgcggtggccaggcctctgctgcagccgctggttgcaggcagagttttggggacctggcccttctcccactgggctcccccatcctgggccaaggccagaactttagtgctaggggaagatgaaatgtgcagttttgaaatgttgggtttccagagagagtcatgctggaggagaaggaagtaggccagaagtccagggctgcactgtggtgtgagggtggctttgtctaagatgcctgctcagcatgatcaccagagggtgtgggcaggtccctggagccgggggggggggggggggggggggggggcaggaccgggccgctgggccctcatgtgggagagaggtgaaaagcgtcccccactagggggctggcagtgcatgtgcttgagttaaatgtgcagggcagacagagccagaagggcctgtacccaggggctcgtcccctcctccggtttcccagacaaatccagacaccagcctttagggtggccttgggaggagagggccaggctgtcctgggtgtgagagaactagatagagcctcccaaccctgatttagaaatgcattccttattttgtctagaaattaataaatgaactagcttgttttgacaggtttatttcacatcctatgaatgtatgtaaataaactgtacataggtccatccacataaaatatcttttaataacatatcaacatttgtgtaaatttgaaatttaaaaaaatctatgaagctggtgtacatatgttacaattacgtatattttctttggtccttcataaaaatatatttactttgccaataaaaagaaaaagaactcacagcttttggcattcatgtgctgttttcctgctttgccgggatgtggaggtgactctggggccgagtctatgtctccaccttcgcagagttcagggaactctgttttgtatttggagggatagaaaggccccttggggtccagccccggtccagcagggtagggttcccatacagctcagctccaggccagctgctgagattctgctcatcccggctccctgacctggagctccgtaaacccaaatccagcccacattccgacagcacctgtgggaagctgcctcaggcctggccagtcctgcgaggctcacctactctgctatcggagaccctttcttgcacttcctacccccatccagtccaccaaacctattacacatgccctatatgtttgctgtgccttggcagagtatttacccccttaggaacgtggctgtgccatttcctactggcgtgggtaattgtgaaagtgttaggaatcctgagcaggcagaggtgagactcggagaggccagtatatgcagttacgtcctgtcctccatcgtccctaactccccaacatgcctggggtcttcgctgtgtggttgcacagttgaggttggacccatccacacgtcctgtgctggctggagcctgggggaagtgggggcccaagcacaaggaggggctatgagccccacagggaatggcaaggaaatggaggctgaccagggcctgcttcagtggctcagctggtatgaagcacacacacacagagagggctgccctggttcacccagtcatgtgcagtgggaagcaagaaccttctagaaggatcctttgctttataagaactggatgcaagtcgggtcaagtgtttctcggtgaaaaccttggagatctggaggctgggggtagggcacccatgggctcccagcagagagatgtctgaatgtgggggtctgtgtgaggtcgtgcatctcagagggcagaggccgttgttctcaccagccgcccagcacacagcacagctgataggaggatggacatcctatcctgactggccatggtcccgaggaggaggctgggcctagtgacctctgtcctttgcccctgaccggatgtaccctctgtgggcaaacacactctagggaagcaaggcattgatttccagccttgttaacatgggctttcttcatccataaacaagcagttcagccctagataagaggtacgtcagagggacagggaggattgttgtctggtcaggatgatgacatgggacgtggaataacctcgggagcatatgcaccttctgtgccaaggaccggccggacacgctgctcacctcccctgggtgtgtgtcccaacatcctgctgttgtcttgtggcagggagtgtgtgtaaggggtggtcttagtggtctcctcagtctgggcttccaggcttgcacctgaattgtgtgtacgtgcacacatatggtgcacctccccgggatgagtgtgcctcctggaggtcttggctgagtcgtggagagtacagcacagtgcagggaacagggataatggggccgcactgcctgttgatcctgggctccagctctttatgtgtgtcctagacctctctagatttcagctccttcgccctgcagagcagtgtgaaaggccccgggcaacagcgtggtggcacgtggtaagtgactctggatgcagagcccaggatgcagagcccagctgtgtggcacccccaggttcctgctgcagccccaatgtcagcattgccttggccctggtgggggttgagagtctgttacagtgcctggcctggctcctgcctcagagacccccatgccaccacctttctgaccgtctgtgatttctgtggctggaaggggagtgctgtgttgacctgcaagctgaaaaagcaggtggagatgggccctggactcaccacggtgaggaatagaggtggaagctggaaggctgcagagcaggaactccagccataatggtgccacccacccgcctgcccctaaggcacacagagaggaaggaagtaccatctactgatcactgtactaggtagagtatgagttaggctactataacaaagaaatccccaaactttgtggcttaaacaacatagcagtttattttcctctgcttagatggtctcagagggagcagcctgggctggcacagcagactgagtacagggcacccagcctccttcgctcttgttgctcctccaatgccccttggctccacaggactgggccagctgggagaagcaggcaaggggccatgtttctgccctgccctcctgggatttgcacactcacttccactcccattctgttggccggaactcagtaactcagcctcatccactgccagggaggctggaaaatgcagtcgtcatctgggcagcatgagcacagctggaatgtggggcacatgttgcaggagaaggcaaggaggtaggagcagagggcagccaggagtttccattgtaagcacattgttttgtcccagctgtgcccacagtgggtcccccttcccacgagctggcagcatggctaagtctggtggtgccaggtgagttcagctccccatggcctcgtccacattctcagaaagggcatcactgataagtgtgggatcagcagccagacttctggggcagcagattattaagaagggaaactctgtgggaacagaggagccaaaaggccctacgtaggagccaagatgccttggttgggaaaccaaggctgcaaatgacaatcttgactcctgcagacagcaaacccttgcaatgccatcactgtctgttcgtgaatagggtccagagtctatgtggggccgtgagagccgggaggtggagaggggacataggcagaaagcctcaggaccagggcttccaggaaaattgtcattttccttgtgttttattggttcaggctatccaaggcctggcaggggaacctgtgaggaatgaacatgtcaacctgcacagtgaaggcatgaggaggcgatctgaacccacaagagagggctgagagtgggggccatgtctgagtaggtcccacttcatttggtgatgaacagagatgaaaatggggcttgttcaaaagatgcagaatgaggcaaagagagcagcattcaaacactcctggaaagtgcacatctcgatgtgccctggggggccgggagggcacgagaaacgccctgctgttttcaataaggaagaaatagagagcccaggctgtagtgggagggcaccaggaccaggtaaaaagagagctggaagggatagcgggggattgcaagaaaacaaaagatgcagggcagagttaaaatccacatgggagaacgtcaggagtgggcatgaggacagggaactcccagcactgctgcagaagacaaatgatgacagctcgggctctggctcggctcccattctgtgaggtcctgctctgtgccccaaacagccgggcccgtcaggaagggacaccaaggaccccaaaggagcccctcctggaggtctggacctggagatgagtgaccagtcccccactgtcagcctcccttggccctgctgctccaccctgctctccaagccatcctggcgcacggacatatccacacccagcactgatagagatcgcagccggtccccaggctgttctcagaacccagccgggacgttccctgctgtttccatcctctgggttctgtgaatttggcctcaaccctgagctgagctgacactgaaagacagcaagagcagtgtctgtagcaggcggctccatcacgagagtgaggcgcaaggctacgacagagccagctgagggaggccagggaagggagtgcgcagcaggtgctgggagctggaaatacctgatgagaagagtgaaaatacatttctgcagaaatacgtctaaatcattgcaaatgtgtttaaaacctaagtgcaaatgtcaaatattgatagagaaagagaagaaatttgcgatgtgaaagtaataagacattactagtctggctgtaaatcccccatgatatgaacagacagggaaattgtgtgaaggattgaagtgtggctctcagggtctcctccttcccacagaagtctttgcattacgcatgaaatgaagaaaagacattgatgtcatttctgtagggttaattggtgagttgttgaacagctatccccagagggctctgtttaaatgcacgaacgtcaccttgacagaggaaagaaggacacctgtctgtttccacagcaaagtggcagtgctcttctctccctgaatccctggacaaggcgtggacggtcatgctgacgtggcactgctgggaggacagctggaccactgcccatcagaggacaccctggtgccacacaggagtcctggttcccaccttgggctggttggcaaagcccctccctgtcctctcccagccttcccaagctggtggccttactacaaatctgggctcacagctgggattccatccacatcctggcagaggatgccctgcacaaagctaccaaggtgcagtgggttcagtcttccggatgcccgagtctctttgccaatctctcacgctggcaaaatgctttccagatggtcatgaggagccacagcggctggagtgcactacactgggcatcctatttaaactgtacaccaacaccgccttctctacaaggcacccagggacttgctttttgcaccttctcccgccttgaaagcaccttcatcttcctcctggaacttcaaattccccatctgtttaaacaaacagaagaatttagagccagactccccataagggatgataataatagtaccttcctcatagggtcattgtgtggactaaatgagttaaaatatgcaacacacttagaatagcatctggcagagagcaacagctgtagttgttggtggcaattgtattattatccattgttacttgagtatatccttaatatccacccttcaccccaggaaacttaataagacatttcttctcaacgaatacagcactcttcccactagactttttttttaattatactttaagttttagggtacatgtgcacattgtgcaggttagttacatatgtatacatgtgccatgctggtgcgctgcacccactaactcatcatctagcattaggtatatctcccaatgctatccctcccccctccccccaccccacaacagtccccagagtgtgatattccccttcctgtgtccatgtgatctcattgttcaattcccacctatgagtgagaatatgcggtgtttggttttttgttcttgcgatagtttactgagaatgatgatttccaatttcatccatgtccctgcaaaggacacgaactcatcattttttatggctgcatagtattccatggtgtatatgtgccacattttcttaatccagtctatcattgttggacatttgggttggttccaagtctttgctattgtgaatagtgccacaataaacatacgtgtgcatgtgtctttatagcagcatgatttatactcatttgggtatatacccagtaatgggatggctgggtcaaatggtatttctagttctagatccctgaggaatcgccacactgacttccacaatggttgaactagtttacagtcccaccaacagtgtaaaagtgttcctatttctccacatcctctccagcacctgttgtttcttgactttttaatgattgccattctaactggtgtgagatggtatctcatagtggttttgatttgcatttctctgatggccagtgatgatgagcattttttcatgtgttttttggctgcataaatgtcttcttttgagaagtgtctgttcatgtccttcgcccactttttgatggggttgtttgtttttttcttgtaaatttgtttgagttcattgtagattctggatattagccctttgtcagatgagtaggttgcgaaaattttctcccattttgtaggttgcctgttcactctgatggtagtttcttttgctgtgcagaagctctttagtttaattagatcccatttgtcaattttggcttttgttgccattgctttttgtgttttggacatgaagtccttgcccatgcctatgttctgaatggtaatgcctaggttttcttctagggtttttatggttttaggtctaacgtttaaatctttaatccatcttgaattgatttttgtataaggtgtaaggaagggatccagtttcagctttctacatatggctagccagttttcccagcaccatttattaaatagggaatcctttccccattgcttgtttttctcaggtttgtcaaagatcagatagttgtagatatgcagtgttatttctgagggctctgttctgttccattgatctatatctctgttttggtaccagtaccatgctgttttggttactgtagccttgtagtatagtttgaagtcaggtagtgtgatgcctccagctttgttcttttggcttaggattgacttggcgatgcgggctcttttttggttccatatgaactttaaagtagttttttccaattctgtgaagaaagtcattggtagcttgatggggatggcattgaatctgtaaattaccttgggcagtatggccattttcacgatattgattcttcctgcccatgagcatggaatgttctttcatttgtttgtatcctcttttatttccttgagcagtggtttgtagttctccttgaagaggtccttcacatcccttgtaagttggattcctaggtattttattctctttgaagcaattgtgaatgggagttcactcatgatttggctctctgtttgtctgttgttggtgtataagaatgcttgtgatttttgtacattgattttgtatcctgagactttgctgaagttgcttatcagcttaaggagattttgggctgagacgatggggttttctagatatacaatcatgtcatctgcaaacagggacaatttgacttcctcttttcctaattgaataccctttatttccttctcctgcctcattgccctggccagaacttccaacactatgttgaataggagtggtgagagagggcatccctgtcttgtgccagttttcaatgggaatgcttccagtttttgcccattcagtatgatattggctgtgggtttgtcatagatagctcttattattttgaaatacatcccatcaatacctaatttattgagagtttttagcatgaagggttgttgaattttgtcaaaggctttttctgcatctattgagataatcatgtggtttttgtctttggctctgtttatatgctggattacatttattgatttgcatatgttgaaccagccttgcatcccagggatgaagcccacttgatcatggtggataagctttttgatgtgctgctggattcgttttgccagtattttattgaggatttttgcatcaatgttcatcaaggatattggtctaaaattctcttttttggttgtgtctctgcccggctttggtatcagaatgatgctggcctcataaaatgagttagggaggattccctctttttctattgattggaatagtttcagaaggaatggtaccagttcctccttgtacctctggtataattcagctgtgaatccatctggtcctggactctttttggttggtaaactattgattattgccacaatttcagctcctgttattggtctattcagagattcaacttcttcctggtttagtcttgggagagtgtatgtgtcgaggaatgtatccatttcttctagattttctagtttatttgcgtagaggtgtttgtagtattctctgatggtagtttgtatttctgtgggatcggtggtgatatcccctttatcattttttattgtgtctatttgattcttctctctttttttctttattagtcttgctagtggtctatcaattttgttgatcctttcaaaaaaccagctcctggattcattgattttttgaagggttttttgtgtctctatttccttcagttctgctctgattttagttatttcttgccttctgctagcttttgaatgtgtttgctcttgcttttctagttcttttaattgtgatgttagggtgtcaattttggatgtttcctgctttctcttgtgggcatttagtgctataaatttccctctacacactgctttgaatgcatcccagagattctggtatgttgtgtctttgttctcgttggtttcaaagaacatctttatttctgccttcatttcgttatgtacccagtagtcattcaggagcaggttgttcagtttccatgtagttgagcggctttgagtgagattcttaatcctgagttctagtttgatcgcactgtggtctgagagatagtttgttataatttctgttcttttacatttgctgaggagagctttgcttccaactatgtggtcaattttggaataggtgtggtgtggtgctgaaaaaaatgtatattgtgttgatttggggtggagagttctgtagatgtctattaggtccacttggtgcagagctgagttcaattcctgggtatccctgttgactttctgtctcgttgatctgtccaatgttgacagtggggtgttaaagtctcccattattaatgtgtgggagtctaagtctctttgtaggtcactcaggacttgctttatgaatctgggtgctcctgtattgggtgcatatatatttaggatagttagctcttcttgttgaattgatccctttaccattatgtaatggccttctttgtctcttttgatctttgttggtttaaagtctgttttatcagagactaggattgcaacccctgccgttttttgttttccatttgcttggtagatcttcctccatccttttattttgagcctatgtgtgtctctgcacgtgagatgggtttccttaatacagcacactgatgggtcttgactctttatccagtttgccagtctgtgtcttttaattggagaatttagtccatttacatttaaagttaatattgttatgtgtgaatttgatcctgtcattatgatgttagctggttattttgctcgttagttgatgcagtttcttcctagtctcgatggtctttacattttggcatgattttgcagcggctggtactggttgttcctttccatgtttagtgcttccttcaggagctcttttagggcaggcctagtggtgacaaaatctctcagcatttgcttgtctgtgaagtattttatttctccttcacttatgaagcttagtttggctggatatgaaattctgggttgaaaattcttttctttaagaatgttgaatattggcccccactctcttctggcttgtagggtttctgccgagagatctgctgttagtctgatgggcttccctttgagggtaacccgacctttctctctggctgcccttaacattttttccttcatttcaactttggtgaatctgacaattatgtgtcttggagttgctcttcttgaggagtatctttgtggcgttctctgtatttcctgaatctgaacgttggcctgccttgctagattggggaagttctcttggataatatcctgcagagtgttttccaacttggttccattctccccatcactttcaggtacaccaatcagatgtagatttggtcttttcacatagtcccatatttcttggaggctttgctcatttctttttattcttttttctctaaacttcccttcttgcttcatttcattcatttcatcttccattgctgataccctttcttccagttgatcgcatcggctcctgaggcttctgcattcttcacgtagttctcgagccttggttttcagctccatcagctcctttaagcacttctctgtattggttattctagttatacattcttctaaatttttttcaaagttttcaacttctttgcctttggtttgaatgtcctcctgtagctcagagtaatttgatcgtctgaagccttcttctctcagctcgtcaaagtcattctccatccagctttgttccgttgctggtgaggaactgcgttcctttggaggaggagaggcactctacgttttagagtttccagtttttctgttctgttttttccccatctttgtggttttatctacttttggtctttgatgatggtgatgtacagatgggttttcggtgtggatgtcctttctgtttgttagttttccttctaacagacaggaccctcagctgcaggtctgttggaataccctgcagtgtgaggtgtcagtgtgcccctgctggggggtgcctcccagttaggctgctcgggggtcaggggtccgggacccacttgagaaggcagtctgctggttctcagatctccagctgagtgctgggagaaccactgctctcttcaaagctgtcagacagggacacttaagtctgcagaggttactgctgtctttttgtttgtctgtgccctgcccccagcggtggcgcctacagagacaggcaggcctccttgagctgtggtgggctccacccagttcgagcttcctggctgctttgtttacctaagcaagcctgggcaatggcgggcgcccctcccccagcctcgctggcgccttgcagtttgatctcagactgctgtgctagcagtcagtgagattccgtgggcgtaggaccctccgagccaggtgtgggatataatctcatggttcacccgattttccaggtgcatccgtcacccctttctttgactcggaaagggaactccctgaccccttgcgcttcccaagtgaggcaatgcctcgccctgcttcggcttgcacacagtgcatgcacccactggcctgcgcccactgtctggcactccctagtgagataaacccggtacctcagatggaaatgcagaaatcacccgtcttctgcgtcgctcacgctgggagctgtagaccggagctgttcctattcggccatcttggctcctcccccccactagacattttattaaatcaaatgctttctagcatctgtgccttaacatattacttgcaagtaggtttttggagggtgaacacattcccttacaaaagggttgcagggctcagttgaagttgcatcttctcagggttcattcacaggtcattaaatactcaaccgtgggaagaactgaaagctgatgtgttcaagacacttctaattgcatatcaagcaataaaccagataaacccaatctgaaattgtagtggttttacaaggctgtgcacatttcctgggtttggtttgtattcccagagaggaagctaatcactggagtgctctgttcaataccagatgcctgcgacttatacctaggtctctgtcctcttatgccatcactcctaagacctccacagaagggcaggccctgcatccagaagaggggctcatgatgggggctggtgactctctagtttgtgaccagggagttgagtgtgaggggcatcttatgtgcctgatgttttccttccccactaccctgcctctgtgctgccctcagactcctgaggataggggcagattgcatcctcaagccccattcatgtcagttcacttccagcttctgctgcctgggtacccatgaggctcccccatcctctgctgcccttatgagagggattctggacaaatttgtcatatccagagagatgttctcattctttcagagacactggagacatagacattctcaggcttctggagacactggttattcacatgacaaaagagaaaagatagagcttttcctaacatcgtcacatcatgcacagaaaattcactccaggtaggttaaagaagcaaccataaacacacaatgctaaaagtacaagaaataatgagacacagggaagagcactgtattcatcaagaagaaatgtcttgttaagtctctcaaggcaaagggtgaataggacacacttatattcacaaatagcagcatgcacccagaagacccacaaaaacaaacacaacttattatttgcaaagtccttgccaatgtaatatgacaagaaaaaaaaaagactgaaaggataggaaaggaagggacaagatgacttttatcgcatatgatgtaattatctgtccggaagggccgaaaatgatcaattgaaaatctgccagaattaataaaactgttcaatcaatggccagacacaagataaacccacagaaatacatggactgattgcatgtcaatgtttcagtcagcaattactgtgtaattgacagcccacctcaaagctcagtgctctgaaacagtcctgatttagtactagagctatgatcctgtgggttggctgggagtctgctgacctgagttaatcttgctcctgtgtctgtggggaacgagggattctgctgtgactcaggctgggctggctggggctctgctccatgttgctcacatttcgccttgggccagcaggccagctggggtatagcccatggctgcaagatagcaaggcccaccttgcaagctcatttcagacctcggcttgcatcctgtctgctctgacccactgggcagaacaagtcatacggccaagcccagtgagaacatacagcagagggtgtggatgaatgaggggccatcactgagggcactaacacaatcaaaatcaactaaaaactgcaacagtaagtagagttcataacttttatgacaggaagaaaaatcacaagcaacatggcaggaaattggtaaaaaaaaaaaaaaagtgtaataatatgctgaaactttaatggaaaacataaagaagacctaactggaattgcttaccttttttttttttttttctgtatggggagactcagtattgtaaagatcccaatttctgtcatattgatctataattcattgcaattccagtacaaatccaaagaggattttaaaaaatgggacttgattccaaaatttatctggaggagaaaatgtataagatgcaacccaatatgacacgacaatggtggtagaggtggggagattgcctgacaaattactgaaacatcctatagaggtttaaattgtttggttttgttttattatttaatttattttattaattctatttgagacaggttcttgctctgctgcccaggctggagtgcagagatgggatcatagctcactgcagcttcaaactcccaggctcaagcgatttgccacacctcagcttcctgagtagctgggactccaggcacacaccaccacacccagctgaggttaaacatttttttaatgtggtgttataacagataaaggcaaagaagacatgaggcaacatacagattctagaaaataactcaagtacatatggctatttaatataagttatcaatacaaggttacttatatgataagagaggaaagatggaggttcttctcacaccatacacagaaaatccactccaagtgggtaaaagagccaaccacaaacacacaattataaaggtacaagaaatagcaagatgcaggtgccattatggaaaagatagacatgcttgacactaccatttaaactcctgtttaagaacagacaccctatgagtgaagttagaagataaatatgagacatggatagaaatatatgagtcaacaatccgaatatatctggaatgcacaaaactgttctacaaattagtgagtaaaacataaaaatcccaatagaaaaatgggcaatagatataaactagcaacttacagtaaaagacatgcaaatggcaagtaggcacatgagaagatatctaactttgtaaatatgcagaaaaatgaaataaaaaaacaatatatcctgtggaggttgactacattgcaaaaatgtaaaagattatatccaagcatgggggaaagagttactctcattactgttgattgtagtacaatttttttttggaggataatttggcaaacttcatcaaaacttaatcattcttttggccataataaaaaaatcaaaaaacagtagatgttggcttggatgtggtgaacagggaacacttctacgctgctggtgggaatgtaaactagtacagccactatggaaatcagtgtggagattccttaaagaactaaaagtggaacaaccatttgatccagcaatgccactactaggtatctacccagaggaaaagaagtcattatttgaaaaagatactggcccacgcatgtttatagcagcacaattcacaattgcaaattgtagaaccaacccaaaagcccatcagtcaacgagtggataaagaaactgtggtatatatatatatgatggaatactactcagccataaaaaggaatgaattaacagcatttgcagtgacctaaatgagattggagactattattctaagtgaagtaactcaggaatggaaaaccaaacatcatatgttctcactgatatgtgagagctaagctatgaggatacaaaggcataagaatgatacaatggactttggggacttggggggaagagtaagaggggggcaaggtataaaagattacagatatggtgcagggtatactggtcgggtgatgggtgcaccaaaatctcacaaatcaccactaaagaacttacacatgcaaccaaataccacctgtaccccaataacttatggaaaaagactgcaatctttctttgacctagcaaacccatcatattaaaaatccacatataaaagtatatatacaagtctgttcttttagcattatgacagcaaacatttgtgaacaatctaaacattttccaatgaagaatcgagtagataaattatggtaaccagaaactagctctttcatttggcaatgaaatggtcaaactcgcataaaatttacattatgtaaacatgacatgcaggcttcagtttctggaatcatcctatgtatgaagtctggaatgcaggtgtcagcatccttgacaacaatgcccccagcagcacaggagatggggaggctgggggaagactgcagacctcaacagcaaggcgggtcaaaatcctaagtgtcttctgctttgtcctgaaaatacacctggagtttgaccctgctcctcacccactgtggcccacagcacccatgatctcttgcctagactactgcagaatcatccacagacatcccaacctggcctcaccccttccagctccctgagggacagcagccagaagggcccagttaaagtcggtctgatcatgtcctgcctctgttcaggagcttcctgggggctccctgtttgcctcggaggaaaagtgaaaacctctatgaggtcccacaggagtctgccccacgcttcccacccagacctcactgcctgctatacttctcacttagctccagccccactccatcccagaagtgtcaagggcacaaaagacaaagaaagactaaggagctgttgcagagtggaggagaccatgagatgtgaccacagaatgcagtgaagaatcctgaacgatgtcctaggaccggcaaggcacctctgtggaaaaactggagaaagcccgttcaagcctggagttgagccagcagtcctgcacccatcttcatttcctagttttgatgaatgtaccctggctatgtgatgtgtcggggaggctagggaggggtattcaagaatgtttgcactatccgcaatgcttgtaaatctaaaatttgaaaattaaaaatttatttattaattatagttaaatcaactataagttattcaatcaatattaatcgacttaattaaaattattaaaataatttaaaattaaactctagttaataattaattgatttaaactaataacttaaaatttttgaggtaaatacaacaacagttaaaaacaaacaaaagccacctctgccagcactcctcagctctctccccagctttgcttctctccctagcccttcctgcctcctaggcacagcctaaagcacagattcgttcagggtgtgcgatctgtctttctgcactccaacgtgctccatgagggcaggttctgcctgttttataaacagtgctgtaaacccagcagctacaacctgtatcatcatattcatctataaattctagtttctgggcaccacaatttattttcccaattctccttcaatatatttttgttctcaaacatttgctgttataaattatgccataaagaacaggcttatactgcccaaggtaatttacagattcaatgccatccccatcaagctaccaatgactttcttcacagaattggaaaaaactactttaaagttcatatggaaccaaaaaagagcccgcattgccaagtcaatcctaagccaaaagaacaaagctggaggcatcacactacctgacttcaaactatactacaaggctacagtaaccaaaacagcatggtactggtaccaaaacagagatatagatcaatggaacagaacagagccctcagaaataatgccgcatatctacaactatctgatctttgacaaacctgagaaaaacaagcaatggggaaaggattccctatttaataaatggtgctgggaaaactggctagccatatgtagaaagctgaaactggatcccttccttacaccttatacaaaaatcaattcaagatggattaaagatttaaacgttaaacctaaaaccataaaaaccctggaagaaaacctaggcattaccattcaggacataggcgtgggcaaggacttcatgtccaaaacaccaaaagcaatggcaacaaaagacaaaattgacaaatgggatctaattaaactaaagagcttctgcacagcaaaagaaactaccatcagagtgaacaggcaacctacaaaatgggagaaaattttcgcaacctactcatctgacaaagggctaatatccagaatctacaatgaactcaaacaaatttacaagaaaaaaacaaacaaccccatcaaaaagtgggcgaaggacatgaacagacacttctcaaaagaagacatttatgcagccaaaaaacacatgaagaaatgctcatcatcactggccatcagagaaatgcaaatcaaaaccactatgagatatcatctcacaccagttagaatggcaatcattaaaaagtcaggaaacaacaggtgctggagaggatgcggagaaataggaacacttttacactgttggtgggactgtaaactagttcaaccattgtggaagtcagtgtggcgattcctcagggatctagaactagaaataccatttgacccagccatcccattactgggtatatacccaaatgagtataaatcatgctgctataaagacacatgcacacgtatgtttattgtggcactattcacaatagcaaagacttggaaccaacccaaatgtccaacaatgatagactggattaagaaaatgtggcacatatacaccatggaatactatgcagccataaaaaatgatgagttcatatcctttgtagggacatggatgaaattggaaaccatcattctcagtaaactatcgcaagtacaaaaaaccaaacaccgcatattctcactcataggtgggaattgaacaatgagatcacatggacacaggaaggggaatatcacactctggggactatggtggggtcgggggaggggggagggatagcattgggagatatacctaatgctagatgacacattagtgggtgcagcgcaccagcatggcacatgtatacatatgtaactaacctgcacaatgtgcacatgtaccctaaaacttagagtataataaaaaaaaaaaaaaagagcgaaaaaaaaaaaaattaaaagcaaaaagatcaatgaaaaaaaaaaaagttaacatcaccaatgaaggacagatggacatgatatgctttcagatgtgatagcctgagaaggacacaacatctcctatgcaacattccaaagaagaatgcataacttgaaagtgatcacgaaaggctatctaaaaaaccccaaacaggaaatgtttcattaaaaaaaagttgggggcgggtgtggcagtaatccattcttccaaaatgtcaatgtcagaaaaaaaagtcaatgtcagaaaataaaaagaaaggttgtagaagtattccctattgaaagtgggtaaagagacatggcacttaaatgctatacctgatgacagactggatcctgtaccacagaggaaaatgctataaagaacattactggatcaaatgacaatactgatgtatgaaaggtagataagaaaaaagtattctatcaatgttaaatatattgaagttggagaaatgcaaatcaaaaccacaatgagataccatttcatgccagtcagaatggcgattattaaaaagtcaagaaacaatagatgctggtgaggtggtggagaaacaggaacacttttacactgttggtgggagtgtaaattagttcaaccattgctgaagacagtgtggtgattcctcaaggatctagaatcagaaatatcatctgacccagcaatcccattactgggtatatacccaaaggattacaaatcactctactataaagacacatgcacacatatgtttattgcaggactatttacaatagcaaagacatggagccaacccaaatgcccatcaatgataaactggataaagaaaatgttgcacatatacaccatggaatactgtgcagccataaaaaggaatgagatcatgtcctttgcaggaacatggagaagctggaagccatcatcctcagcaaactaacacaggaacagaaaaccaaacatcacatatttgggtattcagacatgagattatcaggcgtgacttacagtttataatggtacccaaaatatgatgttctcactcataagtgggagttgaacagtgagaacacatggacacagggaggggaacaacacaccagtgcctgttggggggtggggggccaggggagggaacctagttgatgggttaataggtggagcaaaccatcatggcacacgtatagctatgcaacaaacctgcacgttctgcacatgtaccccagaacttaaagtaaaattaacatacatatttatatatatatgttatatagtagttatatatatatatgttatatatatatataacatatatatgttatatatatatataacatatatatgttatatatatatatatatatatatatatatataactactggggctaagtaagagaatatctacattcttaggaaatatgcactgatgtttggagtaaagggccatcatgtatgtgacaccttcaatttactaagaaaaaaattaagtatataattatgtgtatgtaacatgtatggagagagagaaccatggggtgaggtgggtggggaaagaaagaaaccaaaaagccaattgtgtgaaatgctaacaataagtctttctgggaaaagggtgtatgggtattctttacactctttttatatttgcaacttatctataaaatttaaattttttccaaataaaaagttttaaaaagtgtgcaaatgtcaatatgtataatcacagcaaataaaaattatttcattaaaaaaaaaaaaagaacaggcttgtacacatatcattatatatgaatttttaacagcaggcttgcagagtcagagaacaggcacaatttaaattttcataaattttaccaagttatcctccaaaaagcaattgtgctgagaatatcatttattcatttatcccatgtattgcctgtctttccccactggaatataggctttgggaaaataaggctttgcctggcttgatcagttgtgcaaacctagctcccagaacaaatatttatcaagcaaatggcgtgggcaggcaagagctacactgaaatggatgggataagatacagaggtttaaacctatgatttgaagttatgaaggtactatggtggaccttcacaattgagtggctcctcaaagctgtccacatatgaatccccagaacctgggaagatgttactttacaaggcagcagggacttccttcgtggatgtgattaagttaagggtctggagatggggggaggatcctgggttatctggtggatccagcgtaatcacaagggtccttatgcgaggggcagtaggaggaacgaggaccgaagaagaggtcagagacagagactggaggatgccaagctgtggctctgaggatggaagagggggcaaggagctggggaatgcaggtcacctctggaagctggggaagcacaggagacggagtttcccttagagcctccaggaggaaccagcgccaccgatggcaccttcattctgggacttctgatttccagaactgtaagaaaataaccaagtgttgttttaagttcccaagtttgtggtcattgttacagctgcagtaagaaatttatccaggtagaagaatgaaaacaaacatgtaaatcacatacatagaggtgggaaaaacaccaagtccctgaagcctcagcttttgtaactgggaagcaagagatacagtctaaaatcggtgaccagggacacaggttcttccacatttcagctacagtgatggacagaatgcaaggatgaaaatcaaaacagctccaagcagctgccagaacctggaggtggaggggctgtcacttgcctgcatttgctcttcggtgtagatgaattggtcatcatgtgggcatctgacttctgtaaaactctatgttaaaacctgcctgggtgctttggcaaggtgcaaggaccgcctgcagcagtgccaccccggagccgacacacatacggcacactcagggcccagcgacccacaattgcccacccagacatccagcggggacacccagcaattcaaggaataggatgtcgagtcaaagaaggaaggcaccaagtctgtggcctggctgtggactgtggacatgtccactagtggacactgcactcccaccatcccaccatgcacagggggcctccagggttctgtccatcttcacagaggtcatgaggggcatggggcagtgaatgaccactgacctggctgcgggccacacaacgtgtcctgctggtgctctggactgcatgcatgtgtggtccctatacctcctgtagcactgctgcagatggaaccaggcactcagtggtgctgggcagagctctgcctggagcaggagccacagcctttgcaggggctcagccccacctcctccccacagcaggcatggccactagagcatggctctggccctggggactcagtttcctcatttgtcaatgacatatttgacaagggctcttacccattgaagctttaggattctgagagttcaggggcgattcttcctctgtggccctggccccttgctgggaaagggtgtagagagacttggttctgccgtctccagggttgagagcactctgcagaagacatcaaactggagatcacatgtgtagtacacatgctacacctgtgcctgtgtagccagatgtgaggacagagacagagcctgggccaccagctgatacccttcctggctgtgtcacctgtgtggatcaagtccccgccagctccagcttcctcaccttccttgctatgaagcttaccatgccctcctgccacctttccgggactgaggatcaaatagaagaattccagagggttctgaccctgcagctgagggtgttgtgaagccagggaagctcaggaccacccttcccctgctaaatcaggcagctggctagaggcagcctgaagtgtagtttgatcagcatcctagattttactagtgatcctcctgctctgaactctgcttccagctgagttgggaaaggccaagtgaagtggccccagagggcagctctggcttcccccaagactgctgagagagaagggcccagcatccacagggcagtctggggacaccaggggacatcttcttaggctactgctggagggttcccgtacaatgctgcacgcatgtatgcaataccagtgtgctcgtgtgtgcatctgtatgtgcaatacttgtgtacatgtgtagccaggtgaactcaaacacatgtgcacaggaaagcactcttatctctgtatgtgtgtatgtgtgtgcattcagggctgtactgcatgtgcatttatacagatacacatgagtttgcacaggcccttgtgcaggtgcactggcattcacatatatgtacatgagaagcatatgacagccttgctgtcaatttcattcatggctacattttgttgggctggcatgttgtgttaaaagagtcagagccggcatttaaagccagaagattttacaaatccacatgttcagcctcttttgaaaaattgaggccctgttcctgcagggcagccaccaatcatagcagatatgttcaccctgtcctgcccctccaaagtggtcatgtgatctccagtttgtcagagtcttcagcactccctatcacctcacaccttacttgcttcacccatttatgttacctccttggcccctctaggaaggtgcgatccttggataaagcccaaagtatgcttaagcctggtctacactgatccccctgctccagcctggccagcttccccacccgccacctccactcatcttgaaccactttgcctgccagatcattctgtgcctccccaggcttctcctgatctgtgtccctggtctgctgtcgctccgtactccctctcatatggagtcctactcttcctccagttccccctcccctgcaccccaccccgagccagtgggcttgactgttgatcatgcctctggcaggccacaggaaaagattattgtcttgtaagctgggactagaaatgctcccaaggagagaaataactttgtttgaaaaaaagccttgatatgcccgtagtgttaaaggtgagggtttaattgtgatcagataaatcactaaaaacacaacaaaacaactcttaaaatgcaacaataagaaaatgaacaccttgattcaaaaatgttcaaaagatctgaacagacattttgccaaagaagatttagagatggcaaatatgcatatgaaaagatactcaacatcatatgtcatcagggaaaacagcaacgagctacctccacatgcctgttagaatagccaaacccaaaacactgacaatatcaaatgctggcaatgatgtggagcaactctcagtcattgctggtgggaaggccaaatggcacagctaccttggaagacaactcgtcaatttcttacaaaactaaacatattcttatatgatccagcaattttgctacttggtatttacccaaatgaattgaaaacttatgtccacacaaaaacctgcatgcagatattgatagcacctttactcataatgccaaaacttggaagcaaccaacatgtccttcagtaggtgaatggataaactgtggtacatcgagacgatggaatatcattcagcactaaaaagaaatgagctatcaagcataaaaagacatggaagaaatttaaatgcttgttactaagtgaatctgaaaaggctacatactggatgattccaactctgtgacaatctggaaaaagcaaaactatggagacaggaaacagatcagtggtttccagtggttatgggagagggagggatgaacaggcagaacacagaggatttttagggcagtgatgctattctgtgtcatactacaatggtggatacgtttgtcaaaacccacagaatgtacaccactaggagtgaaccctaatttaaactgtggactccaggtgataatgatatcagtgtctgttcatcagctaaaacagggaccactctggtgtgaaatctctactttctacttgattttgctgtgaacctaaaactgctcaaaaaataaagtctactaaataaaaaaaataagtaagtagagccatgtcttaaaagagagttgaattctaaaaccagctcagaaggtgaaatcccagttaactaaaattacttttgaagattttcttaaatcgtccctagagcacagtatgccacgtgtcggccaacactgacgttttatccccctgcacgtccatcacagatacatcacccttccccttaggtcagatgagtagttggcttgcattcagaggcagctaactttgtatcacaaatacctacccatcaacattaggatcaatgtaaaggaagctagaaactagtgctaccataacaggagtcaagaaatgaagtagcaaattttaatctcctacccccaggctaatccctgggcatatggaagggaatgaggggaagaattatcccacacaatttaaaccaatacatattttcctccctcatattttggaaattactatagttcaactcatgtaggttaaaggcatgtatgaggtgagtcctcagagtgaggttgtcgcaaagttgcatagcatgaaaacatgggaggagttggggggaaaggaccaagtgcaagaagagagtgggcagggtgagagcggacaggcagctgggtggaggcgtccaggaagaggagctgttttcccatgggtccaggttggtgtcgtgtagaacacagagagccagcatggaatcaggagctcagaaaacaaggtgaccggaaagatgttattgttagcagcagaatgtatgtgagtcaccaacgtatgttagtggcggcaaatctgtacgggtttgcagcaaccccagttctagtctcctcagaagaatccgaccgagggacagaagacatagtgagagacacccaggcaagtttttaagcaggagtgaaagtttattaagaaagttttagagcaggaatgaaaggaggtaaagtacacttggaagagggccaagtgggcaacttgagagatcaagtatgtggtttgaccattgacttgaaatttatatgttggcaggcttccagggggttgtgtctcttctcccctgagtcttcccttggggtaggctgtctgcatgcacagtgacctgcccgcactccggggtgcgcagtgtgtttactgaaattgtgcacatgctcacttgaggcattcttcccttcccagtcacatctccctggaaggtcataaagcagttcaactctgccattttgcctcttagtgtgtatgcttgagcccactcgcccaactcctgagatcttatcgcgaagttgctgatcaccagtttcaggttttttctatctattgggagaccgcctttccctggtgatggctgcaaccaattattattttggaaagacagtgtaacaaccacctgatcatcacctgatggtggcctgacattctggggtgtgaggccctctcctgccctgctcatgtctgactagctacctattgcttcttgggaaatgtatagacatctttggagggacatgaacaccacaaggcatagaagtagggatgtagaagcaatgcggcccagcccccagggcacaggcaggccctgttcaccctctcttatatttgggcttgtggtgctgcttgcagtgtttgacttaatgggtttgctgctacccagagaaggagaatggatggaacccagaggattcacagtggggctcccaggacttccacctctggtaaaatatacctccattgccctcaaggtcaaagtaacctggcctgcttagcttgcaaaggtctccatctcctggatgtttctgtggcttccaggagcacatgttctcatgccttcctgagggctcgctggtcctgctgagggggcactcagcccctgctgccccaggcagtgccagccacgggctctgaggaagagtcaggcaggccctgggctgcccccagccccactctgcctgtgcactcccttccccactccggcccatggactcccctcaccactccggcccgtgcattcccttccccactccggcctgtggactcccagccccactccagcctgtgcactcccttccctactctggcccatgcactcccagccccactctggcctgtgcactcccttccccactccccactctggacttccttccctactccagcccgtgtaccctcttccccactccggcccatgtactccctccccactgcagctcatgcactcccagtcccactccggcctgtggactcccttccccactccggcccatagactcccttccccactcaggcccatgcactcccttccccactggcccatggatgcccagcgctgctccagccggtggactcccttctccactccggcctgtgcactcccttccccactctggactatggactctcttccccactccagcccttgcactcccttccccattctggcccatgcactcccagccccactcccacccgtgcactcccagccccagtccggcccgtggactcccttccccactccgcccgtgcactcccagccccgctttccatattgctctggctttttcttgtgaagggccggatagtaaatgttttaggctttacaggccacacgtggtctctgccgcaattatttgtttgaattcttgtctcttacaaccctttaaaaatgcaaatacagttcccagcttgcacagagacagacagcagtgggatttgactctagagtgcggcttgccaacccctgttctagaatcttaaaaacctccttctcttatgtcggaatcagccatgacctagttgtcagagggtcccaagccttgacccctcttttccacataagaatattttccttcccagaaccgtagcattttctttgcctcataaaatgatggctttttattcagaagtggcacagtccagggaggtgcaggagaggaatttcaaaggataggtagaaagcccacctccttcttgaagtgatttggagtcatgcaggcctgagttcctgtcctggcccagcctctcactcaaaatgtgtctctctgagcctcagttttctgttaagatgcagccggagacagcagtgttgctgtgagctgtgagagtgtgtgctggccctcggagcctgccggccttctatccctcccctcccgctctcctcctgtcccccctgacttccctcttcactcttgtgtagggagcccaggatcccaatgtctgggaacttccctgctccatattgacaagatgtggccctaggtcccgcccctcccccatctggggcacagtggggtggaccatgcagcacaggctgggcccatcctaccacttagcttccaagacacagtgcgttactgttgaaaagtgcccccaccaagaagagatatgttctaactctaactgtactgggagttacagccctaactcccagtacttcagaatgtgaacttgttcggagctagagttgttgcagatgtaattatttaagatgaggttgcactggagtagggtgggtctctctaatgcaatatgactggtgtccttataaaaaggggacatttggacacagacacacacatgggggaaccccaagtggtcatgaaggtggagatcagggtgacagcctacaagataaggaactccaaagattggcagcaaatagcaggagccaggagggggacttggaacagacgctatctcagaagcagacatccctggccgcagtttcatcctggacttccttcccccagaactgtgagacaagagacatctgcggcccctagtgtgtagtgctctggcagccctagccaactctatgcaaggtctgtatctttctcaaggaaagcaagccataaaaagatggccttggggtcctggctgtctgtctttctttaccaaattagtggaattttctgtgatcagagagaacgatgctgatgcaatagacagacagaggggattactactatatgggggcatagagggccctcatgtctagccctccctggacttcgcctctgttctgccccaggtggagcccagtattcgtttgctgagctgtgctgtgtgcagctgtggggtgaatggctctgggccctgctggggtcactgtgggaagtgtagtcctcagttctagtagcaagagcctggggcacagaggtgtgggaggcaggagctactggttggatgggaggaacctgggaacacgtgtgggtccctgtgtgggagccctgagccctaagaacacaactggccatagggaggttgctctgtgttctgattctctgcttccccaagcggtcagtcaggctctgtcaagcatcatggccttgacttagctgtgcttggcccattcaaaggaagacacatgaatgacatttgcaaggaaggtggcaatggctcctcccacccctgtatgtgtggtccttggtgatgtgctgtgactctcctgtcaaggggggacccatatccccaccctttgaattttggactgacattttgtgagctattggaaccccgagagcaccccagcccccatgaggaatcctgggcaggccttgtgaggatgagtccctctgggtgaccgttggccaccgagcgagggagtgacacagcctgagaccagggctcagcaagcttttgtataaagagcaagataatagatattttaggctttgtgtggccacatgcagtttctgtctcacctcatcaactgctgttgcagcatgaagcagtcactggcaacacataactgtatgagcctggctgtgtgccaataaaactttatttacacaaacagatggtagacgggtttgcagtttgctgagttctgctcaagcctcagctgaagacatccctagatgactttagccacacaacgtgccccagtgtaaggaccatggctgagcccagaccagatggtcagaccacaggagtgagagcaaagaagatggtggttgttttaagcctaagttttgggtagttggtaagtagcaataagtagctcatacaaggcaggtctgtgtgtggaaccagtagggagggcaggagaaggtggggttgagccatgccagggactgaggatgacaagtgtgaaaaatgaccctctgcaggaagtccagggcaagtcagtattcccagacattgcttgggatggggatgccagggccagggcccagaaacactaggttacaggttgaatcatgtcccccaaaatttatatctcaaagtccaaatcaccagtgtctccaaatgtgacctcatttaaagatagggtcactgcagatgtaatagttaggatgtggtcatcctggagtcattctggagtaggatgggcccttgtatgagtcagctgaggctgcgtaacagaatgccccatatgagtggcttaaacaacagaggttcatttccccacagttccagaggctggaagttggaggtcaatgcgtcagcagggttggattctcccacggcctgtctctctctgccgtgcagctggccgccttttcgctgtgtccccatgttgtcattcctctgtgcacttgcatctctggggtctctttgtgtgtcccaaccccctcttcttacaagcaccccagtcaggttggattaagggctacttttaaaggcctcattttcactttatggcctgtttaaaggcctaattccaaatttggttccattctgaggttctgggggttaggacttagatatatgaattttgggagacagaactcagcccataacatccctgaattctatgtgatgaggatcttcataaaaggggagctgggagctgccatgcacaaggagaatgccacgtgaacatgagcgggaggtcagtaatgctgaagggctccaaccaccagcagaagctaggcgagggcccaggacagacagaccttcagggccttaaagggaacccgccagtctacacacaccttgatcgaggacttgcagcctccaaaactgtgaaaacgcaaatgtctgttgaagccctcaggctgtcgtactttgttacagcagccctggaaaactcacagatgctgtaatttaaattttaattagagagatgatacagtatttggtgccctgcatggatgaagcaggagggttcttgtgttagatgggaaaagcacttagcgcattgctgggtgccaggcgggccccctaagggagagtcagacataagaaacaggagggaagcttaccagtgaaatccatttatggaaacattgaatactcaggttctggctgggcgcggtggctcatgcttgtagtcccagcgctttggatgaccaaggtgggaggatcacttgagtccaggagtttgagactagcttgggcaacatagtgacgccccatgtctacaaaaaagacaaaaaattaacagggcatggtggcatgcacctatagtcccagctactcaggaggctgaagtgggaggatcccttgagcctggcaggttgaggctgcagtgagccttgcatcactctactccagtgtgggtgacaaagcaagaccctaactctaaaaaatcccaaaagactcaggttcttagatacaagggcttccacatgagctctgacagccacagcatctgctgcacactggagtctgatgccagattctgaaagaagggtgctcagaggggctatagcctctgagctatagctcaggggattgcagcctgcctggtcagccaaatcagccagggattggagagtaacttcccatcctaccaggaagagctggagcagagtgtgcataaatgtggatccaacaagagggctcaacccagtgatttacgattgatagccaactggtcagaccagtggcctccccacctttgagccagttgatagcagcagggctggggcagggccgccttcctggcccactcccgatctcttaggaggcaggaaggaagcttgacaaacactgggcagaggacggctcagggggtgaggggagctatacagtcatgtcattcttgccttgtccagtgcccttgaacctggctgacctccccagaagttagtgaaggttggaggatgtaagtcctcagcctgggaaggaaagtgccagaggagatggggtgttttccatctgaggggtagcttgtgagtgagctggctccagaggaactgggaggaattcactctgtagccaggtgcctagcctagggcagagaaggccaggttgtcccatctcaagcccaagcccctttcccacctccgggttggactgatgggagaggatagaaacctggaagggctgccatgaccctatgtgcagagggttcacccgaggtgaacacctccagccccctccaggattcaacttctacccgcttccagacagcagaagctttgcctccctcctgaaggacagtaggagcttggtttgggaagagaatagaggaggagagagtgccctgggacttctcagcccaaaaattcttggcctggactttagcttctggagtttggggagtttctttttgcctgtctctggatgaggatgagattccagagcagctgtggtggctggaagtggccaacgtgccttgaagggaccttggaagatgttgggcaggtgagctgcaggggcccagtggtgtagggagagttgggccttcaggaagaccctccccagccccagcctgggaccctgcactgccctcaccctgaggatgctggtgaagtacatggatgtgcctggcagaaaccagcctccagagtgggccgcggtggcgatggacaagtgggaagctgagcaggtgagagagagcagggtggagatggttcagggactagcccacagcggggcttgagagtgtgtggaagccccattgtgagctgcattgtgtcccccaaaattcatgtgttgaagtcctaacctccaatgcctaagaaaaggactctatttggagacagggtcttgcagaggtgattagggtaaaatgaggtcattgaggtgagccctaatccattaagacttcttaaaaaaggggattaggacacagacacacacagatggaagaccatgtgaggacacagggagaaggtggcatctacaaaccaaggagagaggctgcaggagaaacctaccctgcggcatcttgctcttggacttccagcctccagagccgtgaggaaataagcgtctgttgtttacacccacccccccttctctgattttgctatggtagcctaagcaaactaagactccctgctctgaggacactgtgaacttagtaggggctctttgtaggggctgtgatgtcgccacattgtgcacgggccatctgtgctatccaatgctggggtcacattcattcggtagcaggagtgaaacctccctgagtttctagctggggccatagcctgcagccaggcctgggcaaaagggctgcctggagcttgggccccaggtctcagtgatgtgtattttatacttctggtttgctatggtttaaatgtgagcctccaaaattcaggtgttgccaatgtgcagtgttaagaggtgaggcctttacaaggtgattaggccaggagggctcctgctgggaggggatctgtgcccccataaacaggcctgatggagggggtggtgtcaggcttgcccctctgccttctgcagtgtgagggtacagcacgaagccctcaccaggccaaatgccggtgccttggccttggccttccaacctgggagaaatgcatttctgttcttgatgaactgcccagtctttggtgttccatttttgcgggacaaacgggctcagggttatagtcccataccacgttgtataccttgttgctcaaatggctcctgccttggccattgagcactctctccgttggctcctgggcacccttatcactggggttttgttctctgagcacttcctgacgttctggtgctataagagtcaccaggatcatcttgtacattctctgcctggtgctacaagaggcaccaggatcatcttgtacattctctgcctagtcccagaaccagccatttccctaaggaacccatctccttttatttggggaacggtgttagacaccaaggtcaggatgagcagtgctccttgctagggagtgtcgtttcttgtaggccctctcaactaacaaggcacagaaacacatgtgtgcgccgattaataaacacctctggggacatttctgcatgtaaccatctgcacctatggtaagcagaaacgtgggttcccactgacacctccaactcgaatctgtcgccacatgggtcatcctgggctctgccccttgcttatctgtgactctcaccgcagcagggagaagcttgctcccactggctgccacccacttccttaattaatcactcagctccaggatgcacgcattgtggtatgagcagcgctgacctggagaagtggcttcgccggccagagcgcagggctgtgtacagtccttccactttcctctcagaggctccactcatgtccagagttactcagctaaccccatttccctgtcccttcagagaggttctttcatgcattgttttgttctagattccttatgtaagcagttcattgactcctgacgtcacggtgtccctcaggcctacgccttgcctagaccagtcagtggcgcccattactggcgttgtctcacctttgatgcctgctctccacacatctgaggaggatgtgagtcttatggtgccacatcctttctctctctcccctttccacatgccccagctgccaccgccctcaccctgggccagcgatcccctctccctgatcacaacctcagcttggcttccttctggcttcttccctggagcccagcctccctgccgagctgtcctgccgtgaggccagtgctgtccttctctgtctgcacacttctcagcatgtgaatgaagtcctccttccgcttggagaacccacggagagagctcaggctgctgtttttggggaaatggtcccagagcttcctcatcatgggggagaaagacttctttccacgtaggagtctcactccactccccgggagagagcccttaaaccgctgcaccgaaaatgcccctgtgaggccttcgcgctgagccctaataccagccacaccaagccatgacttccacagacagagaaccagggcaggcagaacccccgagcgccagggtcgcacttgaggatttcccctcagctctgtgtcagcactgcctgcggcagacaccgggacgtgcagctccctcagctggaatgaggtggtcgtcccctggcggccagcagggcttggggtagcctttgggggatttccttggctgaagagaactggctcaaacaaggccatatgtccttccagtgactgatggacaccagggagtgaggccggccctgcctccccatcttgggtcaattctgcaaggccgccagctttccagctccttgggggtggtcaaggcctgcatcagggttgtgctggactcaaccggtacctccaccgatattcgcttcctgcctgccctccagcagtgtgggttgccagggcagcgcgcttcctgtatgtctctgtccatctcagagtctgcttcagggagatcaataccctgcttagagcaacgagctggccaggaaggtgcccccgtcccagccaggccacggcgctcctccccacatggtaaggacccagcttggtagctgggacgctggctctctgcccagctcccacccagacccagcctgtgcttagcaccgggctgcgggcacagccaaacccccatggctggagacacggagtccagacaaggggggctaaggaggttctcaccagggtctggagttcgggtggcctggcctggggggaactaagtgaggagagctggtagcaggaaaggaaatcgctgggcctgggggctctggccagctggggacgcacagcccaggccgaggggatggctccccttagccagtggatagtcaccatgcagcagaggcccaacatgacctgttctggttcttaaagaccagctagaaatcctgacctttatgtgaaatatcccggtctttaatgctggttccacttctcaaacacaagcaaagaaacaaataaaacccaagtgtggctgagtctcccacacagcagtgagaggagagggaaggtgctgtagcgctggctgtgtcgggggtcattagcaccctcttttagactgcattctaacaattccccttaggaccttgcccatagccaccatcccgctcatttctctcctttgttcatggacacaagccctgttgcacagtctttgtcctctcctgtggtccagctcttcctggatccactgagtccccagtccgcctcccagagggagtccctgtgagcccgctggatggtggcccatttcaggccccatgctggaggctgggcagggctgatagtgccacactggacatggaggagcccggtgacccaggaagggtgctgggtggtcaagtcctttgggagtgggggaggggaaggagcgtctgccccagctgctcaggcggtgtgtggtggggcctgaaggctgacgggtactgcttggggtgctggatctgtgctgctcagaagggcctgtctcccttgggtatgtaaaggaggtgacatcaccagaagtgctctgtgagaggaagcagcatttactggaaagatagttggttaagagcagcctggagtatggggggcctgagggtgtggtaccagcagaactcaaggacgtggcaattggcagaggagaaacttgcctgaagcaaggcaaggagacagcttgggtggagtggagggagagtggagaaaggggcaccattgccagagatggaggctgcagctggggccataggcccaaggcctagcaagaagccatggaggaagagaccaaagggctgctttctaaccagctgagcagaagaccaggggaactcgctgtcattctgcagtgcagacaacctcccagtgggcctctcgctcccaaagcttcagcacacagggcttcatatgaataggccatacacacatgaacatgtgtttgtgcacttgtgcctatttgtgcacatgcatgcgtatatgtataacatgtgtgcacgtgcatgtgtgtatgtattcacgtgtgcatgtgtatgttaaagacaacagccatttcatgccaaagtcagaggccaaggttgccctgagaccacagacccacggatagctcacagaggcctttggacttcttcaaggcatggagtgaggttcaaccagccaacatctgggttacgcatttattttcttagagtaaataatcttaggggtggggaacagctgacacagtgtggtttttttctccatgtgatttcgaagtgatatccaccaggacttctgtccttaggcttcttttcttttccccagttgtcaaggggagtaaagactccagaactgtgtttagtccttcaaaggaaagtccacccctgggcggagagagaagtgctctgtgagaggtgctcagagcacctctgagtgcttctgataccaaaataaccagcttcccaggcctttttgtctcctcagtacgatgcatgagatgaaagttccttcggaaaactgagcatctgagaccccatggggatgaagttccatggagaagaagttgtagtgctgcctctgcctcaggggttagcctccaagtcagtgagtgaaggaaagaagcttgtgtggtcaaagtgatttgcaggagcctcttcagccacttgccaagcacaattcttctggacctgtccacacaactccattcagtaaatctcctgcacactcaaagcttgagaatcacaaagacagtctaaagaaaacatttctctcttcttccttcttctttcccttccagaccccaccctgaaaagggtttgtggtcagacatccagcttttcaaatctttcacctttaagatggctgtaatccctactgtgtggggcagatgttggctgcccaacccagcagctacttccaaaaacttccactcttgccttcctcccacaccagaggctagaaaagcagctcattcctttcccagtctcccttgcagtaagtgtgaccagatagcccagctctgagtaatgaaatgtgaaagggacttctgggaaggcatttgtttcattttgctttgttttaccttgataaaagagacagacaccagatgagaatggagagggctactcttttcctcctattttcctttgaacatggatgtgatgctggatttgtggcagccatttgaaaccctgagttgtcaagcatgagagcaaaatgtcaacaggctaaggaagtcagaacgtaatcatgaaaggagctgagttcttcacagcacccttacataatgggccaactgggagactcatctgcctctgtgattcttgtttatttgttagaataagttcagacatgagtgacagaaagcctaaactgatgatgttaaagaaaatataagtttatttcttatagaaatccaggccatagatgaaaacatggctccacaaatttcagggaccagattcaatatgtagctttcatcgtgtggcctaagatgttgctcaagccccagccatcacacgtggctccagccaccaagatggagaaaaggagagttgataagcaggacttctctctgtaacacactctggaagttgcaggcaccacttccatctaccagaacttagtcacttgaccacatttactacttgcgggactgagaaaggtagactctacttggacatccatgtgcccaactaacatttgatatgttaaggaatgactagtggtgactgttgcatgagtaaacattaaaaggtttacatatagttagtcacattgtctgttacttgcagccaatagctttcctagctcatactcggtgaatttcaaaagcatttctcagatttccgtttccaaccaacatgggaaagtggagacttaattattcttcctgcatgaagcaataacaaacctgggcaaaatacaagaaacaattacattcaaaactttagatgtcaagctgtgaaggacagtgattcctgaatgatgaaatcgaatgagggaaagccaacttattgcctcgagagcatttccaggtggaggtgctgggaggagaaacccagagaaacacaagaagagaaccctgaagatcttcagagagtttccctcaagtaatcagctgtaaacatgtcagtgcttgtatgtgagggaacgaactgaggttaggagaagaaccattagaaaagattagagggaacaatgcctggggctgatacagctcatataggtccatagagtgcctgtttccaccagccagtctaggaaacctcttaattcacacagcattagataccatactcaggtattgtctttcagatttattagagcagcatttatctaccaatggtcttgcatcgataacaaatccgaaagatgatacttgaaatgatcaaactgcttcccaataacttaactgagtaccagaacaaaatttaagaatatttatagaaatacaaagccagcacaaacatagtaaaattcacaatgtctggtacccagtaaaatatcttcaggcatacaaagaaacagaaaaatatgaccgttactaaagaaaaatcaaacaatcaaaagcaaatcagaactgacacagatgttagaattatcagacaaaggcattaaaacatttatagttgcattctatatgtataaaagctcaagtagagacctaatcaaacttctgcagataaaaactacaatgtctgagatgagaaattaatggcaaattacacgttgcagaaaaagagatgaatgaaattgaagatacagcaaaagaaataatataaggtgatacacagagataaaaaatataaaataaataaacagtacatcagaggaaacttcaagaaacctaataaatgtttaattaggattcccaaacaagagagagtttagttaaaaaaaaagatatataaagaaacaatggccaaaaaatgacaaactatgatataaacaattaatctacagatgcaagaatatcaacaaaccctaagcacaagaaacataaagaaaaagacaccaagatacatcatgatcaaattgcttaaaaccagtaattcaaaaaaaccttaaaatgagccatagaaaaaggcatattacatacagagggacaaagataaggataacagcatatttcttgttagaaacaatacaaatgagaaaacagtggaatatcatctaaatgctgaaggagtggaggatgggggaggattgttaacctagaattctatactcagcaaaaaacaaaggcaaagtaaagaaactttcaacaatagctgaaagaattaccaacagaaccactccaaaaaaatactaccagaagtccttcaggcagaaggaaaattatactagatgaaaatatgagtttataaaaaaggatgaagagccctgaaaatggtaactatgtgggaaatgttaatacttctttcttattatctgaatctttccaaaagctaattgatggaccaaaagtaataacaaggtattttggctaatgtaaaggctaatgtaaataaaggggcataatatcacttgaaggtgacctgtgataaatgatgtttactaaaaattctaaagcaaccattaaaataacagttatagatataagccaacaaaagagataaagtgaaataataaaaaaatgctcaattaaacaaaaataaatagacaggacaaatagagaacaagtagcaagatggcagatttaaacctagctatatcaataaatacattcaatgcaaatggtcatgacactccagataaaagacagagatttccagattggataagaaagcaagactcaagtgtatgctactataagaaatctatttcaaaaataaagtcacaaataagtaagaagtaggaggatgggaaaagatataccatgctaacacacatcaaaagaaatatgtagtagctattatatatcaatatcagacaaagtaaatttcagagcaaagaatattaccagaaataaaacaggtaatttcatattaccattattaatggagccaactcatcaagaaaaataacaatctaaaacatttgtgcacctaataacagaacctcaaaatacactagccagtaagtgatagaacttcaaggacaaatagataaatctacaatcataatctaatatttaaatactctgacctcaataattgataactgataaaagaaataaacagaaaatcagccacaatatagaagccttaaataacactatgaacaaacttgccctaatggacatttatagaacactcaattcaataacagtagatacatattcttttgtagtgcatgaagaacatttaccaagactgactacattctgggccataaaacagtcccaataaatattaaaggatccaaggtcacataaagtctattttcatattataacagaattaaattagaaatcaataactaaaagataacctggaaatcccccaagtatttgagaagtaagtagcacacttttaaataacccatgggcaaaggaagatattttttaaaattgtaaaggtttttgaactgaataaaatcaaaatgtgacatattaatacttgcagatgttattaaagcagtacttagagaaaatttatagcactgatgcttgtattggaaaagaggaatgatctcaaatcaatgtccttagttttcaccttaagaaactaggaaaaaaaaaagcaaattacgtttaaataaagcaggtctgggcacggtggctcactcctgtaatcccagcactttgggaggctgaggccggtagatcacctaaggtcaggagttcaacaccagcctggtcaacatagtgaaaccccgtctctactaaaaaaacaaaaattagccgggcatggtggcgggcgcctgtaatcccagctactcgggaggctgaggcaggagaattgcttgaaccccgggggcagaggttgccgtgaactgagaaggcgccattgcactccagcctgggcgacaacagggaaactctgtctcagaaaaaaaaaaaaaaaaaaagaaaaagaaaaaagaaagaaagcagaagtaataaagattagactggaaataagtgaaatagaaaacagagagggtgagagagtgtgcgtggcggcgtgtgagtcctgttttattattcctatagtgctctgtaagctcatttttctgcagctcttgtgtgttttcttgttttatttcttcaatgtctgcctctctgctctctcctaggtctgccagccagaagagcagatctgatttgagggcagctgggaagccgtccaatctggagagcctctacaattagcaaaacaaggtctggaattcctggacttcactccttgttagcgagaaagcgaaacacgtgatgttctgctttgctctcagtgtcaaaaccttgtgctcatgggccctggcggctacacagaaagccctgaggactgaaaccctgcatgggtacattttgatggggcaggaagaaaagttctggagtgtggagagcagaggtccagagcattcactgatttagccacagaagaaacagatgcggaaaccggggcacagcaggcgaagtgaaacttcccatgttccagcaaagcccagtccataacgtgaggctttgtgaggtttgtgtgtgcgaccttcaccccttcacctggaccctctctttgtcctcctttcgcacccagtgatgtgtggcctggatcacttccctgccctcaagtcttgccctggcctgacgttcagcggaccctccgtgcattaaggatggaggatggttccttgtgcttcctctaccaggtgcacttgtatctgctcggaattctggaagagcaaagacccactggccccactaatccatctattgatcctgccccggtcagcaggctgggtctagcctccacactgccgctgctcagggtctgtggaggaagtcgctgcagccattcagccaggtgggtctttcacaggggtgagggcagcacagagctcagaacctggggctctggttgcaggaggactgcaagtgatgagcccacagagcatggggacggggaaaggggaagccggaaagccgcacattgtgagcaaggggtcacaggggagatggggagccatgggaggatgcctgtccagttgtcactgcccacacctaccgtgcagtggaggaagacccccgacgctctgggcctgccttgggggcacccggtagtccccaggcaaggactgacctgtctccgctgggaggacgcgctgcacagggcagatggaagtgcctgcgagggccagcctgagctgtgaggtggtggggtccagttgttataggcacaggacgccacagcaagggaagggagggcagaggccaggaaaggaagccgctcaggggtcggatggcctcgttcctgcccaccacagcaattactcctgaaactggtaccaccctgctctaatgtcccctggccagggtggggacaacctgactcattgtagcctgaagtccccgggtccccagagcccccgttgctgatacacagcaggatgattcacccccctgtggagctcctggagcctcccctcatgacagccagcttctgaggcccatgctaccggtatgtcaccacacgtgggggcacgtacaccccatatgagtttgcctgggttgacacgacaaactagcaaagaccgggggctcaaacaacagacttctatcgtctctcagtcacggagcctggaagtctgagatcagggtgtctgcagggtgggcttctcctgaggcctctctccttggcttgcagatggccgccttctccctgtgacctcgcgtggtcatccctctgtgcatgtcagggtggtcatctccttttttttttttttttttttttttttgagatggagtgtcgctctgttgacaggctggagtgcagtggcgtgatctcggctcactgcaagctccgcctcccaggttcatgccattctcctgcctcagcctcctgagtagctgggactacaggcgcctgccaccatgcccggctaattttttgtatttttagtagagacggggtttcactgttttagccaggatggtctcgatctcctgacctcgtgatctgccctcctcggcctcccaaagtgctgggattacaggcgtgagccaccgtgcccggcagtcatctcctctttttatgagtacaacagtcataccagattagggctaaccaatgagttcattttaactaaaagctcctagatacgataaatgaattcagtaaactttcaggatacaaaatcaatgtacataaatcagtagcactgctatacgccaacaacagccaagctgagaatcaaatcaagaactcaattccttttacaacagctgcaaaataaataaataaacaaatacatacatacatacatacatacatacatacttaggaatatacttaaccaaggaagtgaaagatctctacaaggaaaactacaaaacactgatgaaagaaatcatagatgacacaaagaaatagaaatacatcccatggtcatggatgggtagaatcaatattgtgaaaatgactataatgccaaaagcaatctacagatttaatgcaattcccatcaaaataccatcataattcctcacagaagtagaaaaaacaatcctaaaatttatatagaaccaaaaaagagcctgcatagctgaagcaatactaagcagaaagaacaaatctggaggcatcacattacctgacttcaaactatatcacaaggctgtagttaccaaaacagcatggtactggtataaaaataggcatatagaccaatggaacagaatagagaacccagaaataaagccaaatatttacagccaactgatcttcaacaatgcatacaaaaacataaagtgaggaaaggacaccctgttcaacaaatggtgctgggacaattggcaagccacatgtagaatgaaactggatcctcatatctcaccttatacaaaaatcaagtcaagatggatcaaagccttaaatctaagaaccgaaaccataaagattctagaagatgacatcagaaaaactcttgtagacattggcttaggcaaagaatttatgactaaaaacacaaaagcaaatgcaacaaggacaaaataaataaatgagatataatggagctaaaaagcttctgcacagctgctaataataataataataataataatcagcagagtaaacagacaacccgcaaagtgggagaaaatctctacagtctatacatccaacaaaggactaatatccagaatctgcaaggaaatcaaacaaatcagaaaaaaaaaaaaacctaataatcccatcaagaagtgggctaaggacatgaatagaaaatttgcaaaagaagatatacaaacaaccaacaaacatatgaaaaaatgctgaacaacactaattatcaggaaaatgcaaatcaaaaccgtaatgagataccaccttactcctgcaaaaatgaccataattaaaaaataaaaaaataatagatgttggcattgatgtggtgaaaagggagcatttctacactgctggtaggaatgtaaactagtacaaccactacggaaaacagtatggagattccttaaagaactaaaagtagaactacaatttgatccagcaatcctgctactgggtacctacccagaggaaaagaagccattatatgaaaaagacacttgcacacgcatgtttatagcagtacaattcagaattgcaaaaatatggaaccaacctaaatgcccatcaaccaatgagtggataaagaaaatgtggtatataaacatggaataccattcagccataagacagaatgaaataatggcctttgcagcaacttaaatggagctggaggccatgaataatgaataagttaagtaactcagaaaaagaaaaccaaatatcatatgttctcacttataagggggagctaagctatgaggatgcgaaggcataagaataatacgatggactttggggacgtgtggggagaggtgggtgaggaaaaaaagactacatactgggtacggtgcacactgtttgggtgatgggttcaccaaaatctcagaaatcaccactaaagaacttatccatgcaaccaaaaaccacctgttccccaaaaatgactgaaataaaaaaagaatatactggattgtgaaaccataaatggattcaaatttatatgaaatttagtatatgatagaaagcaatattttacaatagtggggcaataataaattaattaaaaagtagtgttaggtcaacaggcttatcatttggagtaaaagttagatacattacatgatatcttacatcaaaataagttccagattcattacttaagcataaagatgaataaggctgttaaaatatggtgctagaaaaaaaaacaggtgactctttaagcaaatataaaacagggcaagtataacactgtagctagaaactataaaagaagacatttcaaggtttaactaacaaaattttaaaaattaagtttagaattaatcaccacacagaaagttactaaggcgcagtgacacatgcctgttgtcctagctacttgggaggctgaggtgggaggattgcttcagcccagagttcaagtccagcttgggcaacataacaagaccctgcatctaaaaaacaaaacaaacgaaaaaaagaaagttactaaagaaatgatcaactagaaaataaaaatgtttgtatcacaaagttaataccctaaagtatatacataattcttacaaactaagaagaaaggagatgaatatcccctcaaaataatgagcaataacaactgccaacttttcctatttgagaatggaagctgccttaatgaattaatttgtattcccttcagaacaaacttttgaagtagttactgtgttttctacactttggaggtaaggaatcagaagcttagggaatgtaaccaaactcccacattcactcggctggacttgcagattcaggccatagccctagacatgctaggtgctaatccctaggctgcaggcctctcttgaaaagacaaggcatctaaattgctaagaaatataacttggcagattaagaatgtatgttgcagtctggcgtggtggctcacgcctgtaattccagcactttgggaggccaaggcgggtggatcacgaggtcaggagataaagaccatcctggctaacatggtgaaaccccgtctgtattaaaaatacaaaaaattagccgggcatggtggtgggcgcctgtagtcccagctactcaggaggctgaggcaggagaatggcgtgaacctgggaggtggagcttgtagtgagcagagatcacgccactgtactccacctgggcgatagagcgagactccaaatataaatttagcacacattaaaaataacagtaagatttttcaagcccccctgaggctgagaaacatgaacaatgagtaacacccagcattagtgacactgtgggatgttaaagaaaatattatgcaatatttaaataataccttgttaaagcatggcaaggtaggctttattcaggaccattgtgatacgtacagggacaacagcaatgggactgtgcagtggggaagagagatcagcatcaactatgaatataccacagacaagtcggaatttacaaccaggagccagactagggtcagtggatgggaaatgactaagaagaagcatcagggtttagggggtccctggctaatccaacctaacagtgttcttgctgaagacaggtcagcataaccaacatcacctgggggatggtggtgggtgaagaatctgatcagacatgaaggacagggagttcttgccaaactgacttagctttgttcttgctaaatctggattttgcaaggaagtgcacagatgggtcaaggggaaggttcagaagcctgactaaagtttggccaagcatataatctttgtcaagggacagacagtctcacttgttggtagccatgtgaagctgatcacatctctgggtggaggggagggtgccaggggaggggaggaggcactgatctggccatggcactcgggatacgaatgtggatgcctttgtatcctcagtgccatactttgtatcctgagttggtttgggccttttgaccaaaccaacggggaaactaatcttagagcagcatatggtgacgggggtacagagacaggcttcgagcaaaggcctggatgtagttcccagcgttgccctcactagaagtgtaggcttgggccaaggaagctggaggttcttcatcttccaaagtggatagtaactgtatctgctcttaaagttgttgtaaggaccagtaggctgtagaagagcctaagctgtttgtgtcttctgtgattgtttgctttttaaaaacaatgatctgacagctgttattggaatatatatttatatatgtatgtagttctttatgagcatatatgtatgtgtatatgtatgtatatgcatgtgtgtacatatgtgtgtgcatgctcatgtgcatctatgtgtatctatatgcatgtgcgtataagtgcatgcatgtgcatgtatatgtgcacatgtgtatgtgtgtattatgtgtatatatgaatccatagacgtatgtatatatgcacatatatacatgtttgtgtgtatctatgcatgcatggacatgcacatgtgtgtatgtgtacgtatctgtgtgtgtgtgtgtgtgtgtgtgtgtgtgtgtgtgtgtgtatggaggggcagggccactggcaaaagacttggctttagaagtagagaggctctgacagggaggtttcttcctagcggcagggcaaagggagcagagatgcttggaagggaaagaaggaacccgattttctctggagagggccccaaagcctgtgcaaggctcgttcttgagctgctgacctcagcagcagagatggggcaaagttagagaggccaaatgcaaccaagggtcagcctgcaagcagagaaaagtgctcagttaaaaaattactcgagccaccctttggactgactgaaggccttgctcttcctcctgccccacaggctatcaactggtgtatggcttaattattgacgtttaaaagtgagttaactgctttcttacagatgaatcgcaattaataaatgtggaacgaatgagagacgaagacgatgagcaccagaggactgcagggagcacggctgaggcaacatcaccagaggatagtaaaattagcagacagagatctaagcacaaacagtgtctctgtgtagccttaaagcatctctttgaatatttaatggttacaaaggaaaaacagtgagttgatgggggagaaccctggcaggcaccaccctaaccaagagatcaaagttggcatgaccaggcacaaggcacactaacagcccacacccactgatctggcccaccgaaaatgcacatcacttctgtggcattgccacggaatttccaaaaaggcattacctcagtccaatgcagagaaggcgtcaggcagacctaggcggagagactgtccaagagcgacagacccatcctcttaaaaagccggccctgacacagaaaggagacagagaaaggtgacagccaaatgcacgtgggagctgggaacagaggagggcactgggaggggcctgcctgccgtccagctctcgagaccacggcgaggtgagtctcagctctcataatcgcactctgattcatggaatgccggcatgagaagaggctgggggtggggaggctgctttcgcaattcttctataagtctaaaattatctcagaatgggacactttcgaaagtgagttcatgaatagaaacaggcagtggcagtgtatgtgtcaccctctaagcatattccatggcccttgctaggatccgacttgtgctgatttaggaacaaatactgcaggtgagatggcaccaccatgagcactttctgcagggtcttctggacaggcatggaaggggctacctgagccctggggtgagaggcatttagagtccgacgttgacacatctcaaaccagacctctctcagacagcccaggccctgtggccaccaggtgtgtgcttacacaggccagaaatgcttcacccctacagacatgtctgggttctccacagctcctcccagaccccgaggaggctcctggaatgtaacctggccaaaacggagctccagataccacccacccacaagccagcttctcctctgtcttccctaggtcagaaaatggtcccaaaccaataactcatcatcttttctttttgagacagggcctcactctgtcatccactgctagagtgcagtggcacaatcatggctcattgtaccctcaacatacccagctcaagcgattctcccacttcagcctcccaagtagctgagactacaagtgtgcaccaccacacctggctaatttttttttttttttttttttagagatgcagtcttgctatgttgcccaggctggtcttgaactcctgggcttaagcgatcctctcacctcagcctccgaaagtgctgggactagaggcatgagccaccgcccctggcctaaacatcatctttgattctctgtttctttcatgctctcctgtttgctctgcctccaaaatctatccttagtccatcactttttccccctctgccccttcgtctcttctccaccaggcagacaactgagccttttaaacctccatcagatttgtcctctcctggcttggacccctgcaatgacttcttacctgggtccagcctcctctgcccctcctgccacctgcagaccttcgaaaggtcctctttgtctccttctgggagctgcacccctgccctgtcttcctgctaagcactggctgcttccctcccctcgtccagactcaaccccatggacacctcccccactgctgctcgctcgctctcccttctcatctcatcctccttcctctgcagtgcttattcctgcctggaatgctcttcactgatcctcgtgtttatcaaccccactcttctaatgcccatccgtgagagcagggccttctctttccctgttttgtatctcaaatctagaacagcatcttgcacacagtagatgttcaatagacactccttaagttaattacttagtgaattagccactttcccttctttaactgtagccctcccgtggggagcagcaggagctgggcaggcgagatggcccaggggttttctggagggaaagatagcaatagaaactgttggccctgtggctgagtctgtggggaatggagagtcacttggggtgacatagggtcacctggagcctgctaattcctcagaagtggtggaactcttcccacctgttaatgaatggcccggtgtgggaactgggaccccagccctgtgcttccctggagccagtctgtacctggcctcaggtaatcatgccacagggaatctgctccacatcctgggaagtggagaaagaagaaatcaaccaaacagcagggtgcaaaggagggggcttgccttggggactggaatgaatgctcctctgtggttttactgtttcagccacttccgtggacacttagggtgtggagggaatgaattaggcgagccgtgatggcagcaggccacagaaattaaagggatggcatttgttgagtgggtactcggggacttctgggctgaagtaagaggaggctaagcccggcaaggagcagggatcacaacagttccagggcacctggctggctggcccagccatgagatttgaaacctcgtctcctggtgctgccagatccatggagcctgagttctaggtctctgttcatccctaacattcctgggtgaccagctgatcagcaagccacaggcaggtggcagagtcctggtcacagatgcaaccggcccagggacatctgtgagcctggagaaagcacacatcaatggcaaaggccgggacgcagccacctgggagagtggcagccccggcctccttccctcctccagggagcattgctgctgtggtttaggaacactcgtttgcagtttacttattgaccagccaaagtcttgacagttttaaagaacactctttaatttatctcaatgtccaatttcagccctcccagttctggcgaaccttcctctgtcccgaccttggttattcattccatgtgggctcctctttcttcttagcctctccacctacattgttctggatgcttctcaagcttttctcctgctcagctggacctcttttgtgcggtgtcagtctgatgtttcgcagcttccaggcattattttcaggggtcttttgcaagtcttctatttttgccctcattaaaaaatatcgtgggctgctctggtcttaaggttgctgtgccctctttcatttccttgtaagtaggtttctgccatcctctgaaatttcaagtgggaagccacctggaggctaggtgaacagggcaagggcattgccccttcctgtgggagcccctccctaggtcacacgtgacttttcctccacttgctcagaagtctttccatttaactgcctttcctcttcagcggctgctgagggttcctggttgtgggagaatgtttcagacatggccctctgtcaccttctctgaaggcagtggcctgtaacaagatgaaagtggataaagataaaaaagattcaaaaaaatggtaaaagtacagaatgagaccttttgacaaggcttatatgaaaattttgaagtaactccgtcaaatggctacattaaatgtaaaagtggtatataatttaaaatggccaaataatatgtaaagtgacccagttctgttttcttccagattcagaagggaattgggccattccttctccaaagcagaacgtactgcagctgtgagagttctaggagaaaattcaggtggatgcttctgtaatcttggaatggaggctaagcctggcaacaatgctagaaaacagtgctgaagtttgacagatttagccacatacaatggcaaatgacaaactgtaaaaggaattcttgtgagacagaggaaggaaggaaggaaggaaggaaggaaggaaggaaggaaggtaggaaggaagaaaggaaggaaggaaggggcaccctaatagggcaaacagtagtataggtcagaaataactttgaaagaaccacagggtgctggtgggccaatcagggacagacagaccccctcttccaggggctgggctgggctggggtggggtccacaggtgcagccctggagctgggcttgcctgtctgcatccaagcatccctgtgctttccctgtgagctggcagtccccactatgagattctagcctgggaatgtgctatagggaagcttacagcagcagatcatagaaaagcaaaatagaaatgtgaaaggaaaataaaaacttgggacccctactccctccgccaaaagaaaaaaaaaatgctgaaagtggagtcatgcaagaagctgcctttccctttgttcctaagcagatagagacagataaaaggttaaagatctccactctgcattcaccttatcttgtgtgaagagtcgagttactgagcatgggacgaacacataactgaccattcccctacatgctccttttcttttgcaacatttggattcagtaatgtgaccataccctccctctgtcccctccagctggctttttcctttaaatactgaagccctcgaaatcatctttggagaaaggcacagacctgtctcccaagacgtgtccttaatcttggcaaagtaaacttctaagttgatcgaggcttgtctcagatattttcaggtttacagaaagaaattcaatttcagtcacaaacggaatgataaaataagttgttacgcatccatagaaagaagatattaacatggtaagccctgtatttattaacctatgcttacgataaataaaaacaggctgtatggtcaaaggtggaatacagctataaggagagaagaagtgagaaatgtatcgtcttttaaattcgtttcctttattactagtgaagttgaggatatgctcccatttaggggccggttactttgtcttctgtgaattgcctgttaaatccttacccatttcctactcttttcttattgattggaaagacatgtttatgcaacacagatattaaccattggcacattacttctattgtaaactattttctccctgcctggaatttgtcctttaatttgtttaaggaggcattcatttagttcttgcaatattcaaatctgtcagtcatttcctttacggtttccaggttttgtttgctgcttagtaaaagccttcttcaccataggattttaaaaatattcttccatatttggctttaaaacttttatagattttttaaatgtttagctctttaatacacctggagtttattcttgcaaatggtaagaagattctaacattggtttcaaaatggatagtgagttttccccaaagcctctgttgaccttccatctttccagcttggctttgaaaggtctcctgtatcaaatactaaatttccccataaacatgaatctgtttctggattttctgtgtgaattactgaagtctttttggaggttttcgaaatcatcttcaggattcctatatattttctctttcagatgaactttcaaatcagcttctcaagtgtcaacatcctgttgcgattttcattgatattgaactgaatttatagattttgtaagcagaaaaaaattattttaattttttgagaaaaaaagttttaaatggtttgttttcagactgtgtcaagatatccctacctccgaagttgtcaggtttgcggaccttggggtgaagcgtggggctgctggaggcgtccagccctgactgtgtgtccaggacaatgagccccgaagtgagcgggccgcgtcctgttggcgcagccaacttcacgccctctgtccagggaggactaagggacaagctgcagcaggcgcagaggacgctgttggtgtccgggaggccgctggtacagggcgttgggcgtggctcctttccaagtgccttgcactttccaggctgggctgcagaagcaggctcgggggcgactcgcgtggggactgaagcagccagccttggcacctgcccacagcaaataactgccttgacttgatctggtttttttgaagaaaggtttattcatacccattatgtgcgcatgtgtaaattcaaacccacggcttgccggagcctgggctttctcgaacatcagttgctcccatgctaccattttgcagtttgcccgtctccagtagatgatttctgaatattttaatcaactcattattaaccattcacacgtctaccttagcctcattttaagcaattgcacctgtgggtttcacaggcctgctgtatttttagtacatattaaataaagcatgtctgttggggcgtgctgtgcttgcccacctg

SEQ ID NO: 376 - DNA, 58125 bp, Homo sapiens
  source 1..58125: mol_type = genomic DNA; note = NC_000003.12:150408298-150466422 TSC22D2 [organism=Homo sapiens] [GeneID=9819] [chromosome=3]
agtcggcagcggcggcggcagcggggctgctgctcctcccagcatccctggcgcggccatttcagccccatcttggcccagcggagggagctgcagccgccgcttcagcagtttgaatttcagtttcttcggggtttaggaattgggcgcaccgaggaggagccggagaagccaccaccgctacctcacacagccggggcgcctccggtcccgtgccagcggtctgccgccgccgcccctctctgagagaagccgcgaggggaggccgagaccgccgtcgccgcccgcccgcaggggtggttccccctgtaaggggaggaccgagccggctttcccctcccccagagcgggtttccgcctgaggcagtcgacatgtccctggggctgagctccggctagagccggggagggagggccgcctgcccgcgccacagccccaccgcccgcccgcggaccttcagccagctccggcccgcggctcccggctgaattaggcatctccgactccggactcgccgctccttccctcagtcagagagcccagcgctgacgccggcaccggcctgaggagcccgagcggggcagcaccgcccctcacgccgccgccaccgcctcctcctcctcctcttcgccctcccactcccacccccagccaaggcctgctgaccgcgccgagcgccgagctggactgaccacggctgcccggagacgagagaggaagcagccggcccgcccctgggttcgcgctctcgccgcctctgagggaattgaattgaggcgccgcggctgcgagagctaaaaaggaaggaggagccgccgcgggactgagacgggggcagagccgaagagaccgacacagagaaggaaacgaggaggaggatgtctcaccgggcggccagcgcctggatcagcccgtgactcttaacagcggcgggcctcagaccccagcgcagactcggactttgtctttgggggcccgtgctctgccctccccggtttccgacaggacccagaggagccggcgtgcctctctgccctccagccttcttcaccatgtccaagatgccggccaagaagaagagctgcttccagatcaccagtgtcaccacggcccaggtggccactagcatcaccgaggacaccgagagcttggacgacccggacgagtcacgcacagaggacgtctcctccgagattttcgacgtctctcgggccacggattatggccctgaggaggtctgcgagcgcagctcttccgaagagacgcttaacaatgttggggatgcggagactcccgggaccgtctccccaaacctcctcctagatgggcagctggcagcggcggctgctgctcccgccaacggaggaggagtcgtttcggcccggagcgtgtctggggcgctcgccagtaccctggcggcggctgccacttcggcccccgcccccggagcacccggcggcccccagctcgcgggctcatccgccgggccagtgactgcagccccatctcagcctcccaccacatgtagttcccgttttcgcgtgatcaagctggaccacgggagcggagagccctatagacgcggccgatggacgtgtatggaatactatgagagggattcagacagcagcgtcctgactagatccggggattgcattagacacagcagtacttttgaccagactgcggagcgggacagcggcctgggcgccaccggagggtcggtggtggtagtagtggcctccatgcagggggcgcacgggcccgagtcgggaactgacagctccttgactgctgtgtcacagctacccccgtcggagaaaatgagccagcccactccggcccagccgcagagttttagcgttgggcagccacagccgccgccgccacccgtaggtggggctgtggctcaaagctcggctccgctgccgccgttcccgggagccgcgaccgggccgcagccaatgatggcagccgcgcagcccagccagccccagggagcggggcccgggggacagactctgccgccgacgaatgtaaccctggcgcagccggctatgtccctgcctccgcagccgggccctgcagtgggcgcccccgcggcgcagcagccccagcagttcgcgtatcctcagcctcagataccgcccggacatttgctgcccgtccagccctccggccagagtgagtacctgcagcagcacgtggccggcctgcagccgccaagccccgcgcagccctcgtccaccggcgccgcagcgagccccgccacggcggccacccttcccgtgggcaccggccagaatgcttcctcggtgggcgcgcagctcatgggcgcgtcttcccagcccagcgaagccatggccccccggacgggaccagcgcaaggcgggcaggtcgcgccttgtcagccgactggagtgcccccggctactgtgggaggcgtggtgcagccgtgcctcggtcctgccggggctgggcagccccagtccgtgcctccgccgcagatgggtggcagtggtccgctgtcagccgtacctggtggccctcacgccgtggtgcccggagttccaaacgtgcctgcagccgtgcccgctccaagcgtgcctagtgtgtctaccacttctgttactatgccaaatgtacccgcgcctctggcccagtcgcaacagctgagcagccatacgccagtcagcaggagcagcagcataatccagcatgttgggctgcccttagcgccaggcacacacagcgcaccaacaagtctaccacagtctgacctaagccagtttcaaactcagacccagcctttagtcgggcaagtcgacgatactagaagaaaatcagaacccctacctcaaccaccactttctctcattgctgaaaataagcctgttgtgaagccgcctgttgcagattccctggcaaacccccttcagttaacacctatgaacagtctggccacctctgtattcagcatagctattcctgttgatggtgatgaagacaggtatggaaatctctattttaaatatttgatagaaatgcttggccaacattgtagcttaggatgcaactttgggagattgttgtcaacggaggcccttagcatttttaaatacaaaatttagtttttggtaaaattgatttagattgctgatgctgatgtcaaagggtgtaatgagcgaattggtcttgtcaccgttgtttaaaagcactaaaatgggtagggatgcaacattgtttactcaaaaaaaggtgaatttaagcttaatgcttaccatttaatggtggtagctagtgtgttatgctcccatagaattgtccttttcttacatatcaatcacacttgaacacgtaaggcagagagatttgtcagtgtgagttttgaggctgagacataataatactacaagttttcctttctggaaaaccagaaggtcctctagtgaaaaaaaaaatctatgtaaggaatcttctccagtgtatctggaaaggctggagacataatggtgaaatgtcaaatccggctttgaagatcatacttagttcagccttttgattaaaggaggtacaaggtcacgagtcttcccagggacttctctaagatactatttttttgttgttaagcaaaaaatgtactggaaagatattcttactttccatcagtctatttattataggaaagggaggttgagatcgatcctttaactgtagtgaaagctatagttcttgaaattaagagtaattttataataaaagtgtaaatgttaataattggctccctgtatttagggatgctttttttaatggcctaaataagaattagtgtattgctacaccagtgccacaacagctgatgtttggttatggtttagtgaggatttttgtggttttgaggagatgtcacatgtaaatttgacatacatattgcaaaattttaaaagctgacttgttgcaatgttttaaaattatatttaaaaattatagaaaaagtttcaggaatttcacagttagacatttctttgctggggtttttgtttagcgagaggctaattttaggtgtttttaaaagatacaaactaatattatggatttccagaataattagtatgtggaagaatacaatgacatgtatgttaaagctttctcttcctatggtttcttctgagttccttcacatttcttaacctcccatttctaattagccttgtatttttgttatatacttctgttggtttgaaaaatactcactgactgaaattcattcatcttctctgctttttgtaatttaaagttcatctttttttgtaggtgacttgcttatggggagtctttcttcacttgagaacgcttagagaataccacgtgtccataagtgagctcagctagctagtcattgagaaattttgtgtgtgtgggactactaagtaaactgactccacaagccactcagaaaaatccctctacttttatagttgctcccattgtcacacacagggacacacctgtaacacagattgagtttattttttcacctttggtaataatcaacaggcatcttcacttttctagctgccacaagccaattttttcctgataagttggcaaataaccttttgctttcctctgttcctgtatactgcccatatctcttcaagaaatgatgactggtttcctgagctaccccgctttctatacacacacacacccctccacccgagaatgcagattacattttcccttctgtgcacacctctctcagtttacagcatccatacttagattcctcagaactttagtacgatgataaggcatgaagcagagacttctgttgatagatggaaactgaaatgtattctttagggtatgacatcaaaaatgcatttattttttcctcttactgtattaagagttggtaatctgaaaactctgatttccaaatttgtgaatggttgaactacagatactactgtatcagtgttcttaccaattgcaacagttaattcagtgcaggggttttgatgtatgtacagtcctattttaaacatgacacttccctcccttgccccaatcatttaaaatctacattgcttaccaatgttcatttctgatttttgttacagtctttcattggtttttaacttgacatgctagtttccaagatgtaatcttacacatttgactgttttgtcactggtccaacatacctggtgaaggaataaatccattaggtagaaatagttgggttttttgttttgtgttttttttttttaatagaaagctttggttaaaaaaaaaaaaaagaacagggtattttaaaattttgtgtttgaaattaaataacagttttccaggcatatgtttaaattactgagatgagtacttttgaggagactactatcttaactgaaaattttaattttaatgtgattttgggttgccgccttaaaatctgcatgttttcaaatttgaaataaaaccaactggagtgagaggtcttgactaattgtgatttaaactttgcaagtagtttgacaaatttcagatcctaaggaaatatttgtaaataagatatatgctttttttaaaaaaaaattaggactttagtaaacagtctatttctttgagaaaagaaaggaaaatgggaaattaacaaaaagattgaggtggtttaggttgatacattgaaaactcttatcttgagattttggttccattacctaatgcaaagttctatattggcttaattttgagatcatttataattaaagaaccgggccttatagtaatacatcttaatattatcacacctttaaaaggctgatggttgtatatgcaaaaagttctcaattagcattgcctattgactctacattattaattaccataaagtttatctttctggccattttcattagaaaggtttatggtcagttgttgagactcttcagattgattttgtgtaaactcgtggatgtgatggttgaaaatacagtccttaaatatgtagctacttttatagtgaactttacaaaacttgtttaaactacgtacacacttaacagtctcctgtaaatgagaggaggtgcaaaatattactggcccttttggaaaaggaacacagtacagatcactttccatagatagccaaccaatgtgaactctgtaggccgcattccaggaactcttatgaatggctgcaattgtgagctgtcatctgtggccaaaagactgttgaaaacctgattctaaggatcctttggtggcagatatttctatgtcttgttaatggttttatttgtgtggtttgctaatgatcactgataaaatattatacattgtgaatgttaagtggtgtgtcctggtatgtgccataaatacacattttgtttgtacatttatatatattttaaaccaaattctgctgctttttttacttgaagtttaagtgagaggattaagtaaatgtataccaggaggcagaactgtctcagtcttcgacctctgttgtatgaaagtctcactgaattgaagtctctaaagatggaaatttcttacttgaatctctgtttcttggaagctgacatttatctgttaaattgtgaaggtaattttgctcttgtaggtttacagttgatgtctgaatcacatactagatactatcctatgcctatctacacgtttaagagtgttcttactgaggagttagtagtaaaaatgtaaattcgtatatatgtgtcattattgtttagcataaaaactgatactgatgtattcatcagggattactgatggataccacatggattactaaaacatactttattcataaacgtggcttgaaataaaagaaatgacagatttccaaaaaggcttacgattttccaaactacccgaaattcctaaaccatgagctatatctgtaggagtgtggccttttatattcacagtgacacatactgtataaaattttatgtgcactaaatcatataggccaaacattggtaaatttttttagaaaacatgatggcttatatgtgtgtgaataatacagatttccagctgactattttagtaacacttgttttttctttttaggagatcacaacccctgaactaaatcacctttatgagaagtcattttatataggactggtggtaggggtatatatgtcctctacttcctgagaataaatataatgccaattcatttgttatttaagaatcctgggccaggagcggtagctcatgccttgtaatcctggcactttgagagaccaaggtcagaggattgcttgatgccaggagttggagaccagcctgggcaacatagcgaggctttgtctctacaaaacatttaaaaattagccaggtctggaggccaacacctatagtcttagctacttggggaggctgtaggaggaggattgcttgagcccaggagctggaggctacagtgagctatattataatattgcactgaagcctgggccacacagcaaggacctgtctgtaaaaagaaaaaaaataattctgatagcactaatttggaaatagtgaaatatggtactggatctatgaatctggtacttcctaattaggaatgggagtctatctttctctgcaccagaaaagatcagaagcagttatgaacaaatagcagccccaccaatcaagtagtagagaaacccaaataaatctgtttcctaataaaggaatggtagttaggaaagtataaaaggaatctgaccttcctttcctaaaatggcaggagttggggaaggggaagtgtagaatgatagcagataatcaaaatggaagaaagtacagtggagtggcatgaaatatagtctcaaaagaaataggaacacttgtgaatactgaggaatggtgttctaattctttctttgaagaattgttttagtccagtgtgtatttccttttctgaagattctgtttatttcttaattgcattactcgttaaatacttaaagtatgaggaaggagaggccttacaaaagcaggtctgtctggttaaacatagcctgaatgatattccgtaagtaattccttaaattggaaaagcagatttttggtaagaaatattaatcatatttaaggagtatgtgtagcaaaactcctaaattagaataaattatttaagtgtatggtttttctttatactaaaccagtgggcttgtgatttgaggctactgttttcgatggtattgtattgagtccacagagaatatgtatacctgaatcattggtataatgtctttcccacagcaattcttgaacatatcaaattactcgatatttgttatattcttaatctggcattgcttagggcaaaaactgggtgtccctcataaaaaggtaggaacagtagccagtttgcaccattcctatacattattccatgactttaggaagtatactttgaggtatactcttcagatttggtttaataatattaaaggtatattgatggattgtttcctgtatgaaagtattgcatgatttctgctcttaaatcaggtgaattaaatttcatctggattgcttatctcaaatttaaagcctcaaatcagacttaaataattagtatttagtatttagtttgattcctttgtacccaagctaatttttgtttaaaaagaaaaagtgcttccatccttttaagtagtacatttatttgtgatgttagtgaaagttctgcaggtaactgagttaattttattagtgtttgcctgggacatatacctattattagggtaggcaggacaaataagtaaagtctaaatgttaaattacttaaagcttcttttcccataagcctttcctaaaatttgtctaaagaatattgctttgtagaagatggagtttgtgattaatgtgtcaattattgtaaataatgatggcatagttttaaatgttagttttaggctgttcatcttattacacaagtatataatttaatctgaataaaggattcccaaaggtaagtgtaaagcctctagtttctaaagtagagttagtatttagtttttatcaagtggttttatatgttaaagcaaaacaaatctttgcttggcataccgtctacctagtctttgaagacaaaacaaaggagggaggagctgttttgatcaaataaaaccaatagcgtgtttaattatgtgttaacatatgtgaatgaccattacagagacagtagagtcagacatacccgggctaaaatctaactgctacatttgactttgagctagttggtgtagatgccttgtttcctcttatgaaaaatggggattgtacctacctgggagagttttaaggaattaaatgatgtgtgcaagtaatttgaacagtctgtaacataatatatgtggcaaacgtgtatcacagaaatgttaatatttcagtgtccaaactgctctcccagatcacccctttacatgttataaatcataccaagaatcttccattttaatatgaaagcgtaattgtatggtatggatgtagtcagaaaaaaggagatgatgttttagtctagacgagtcatgatgttgtaagaagtatagggaattgtgttccagtcctggctcttctatcatttagctggtttctttggtcaagtcatttcacttgtctgtttttcttttttgagactttgtcaaattttaagattccttctagccttatgtatatgagaccatacattcaagtgtgcttcatgagagaactgcaaacttaaactttcttctttttacccctttcctgccacttgactattgtgtggcaataaatgaagtttgtaaatactcattaagtaggttgattgcccaagaaaacatttaaaacagcttatcagtcattcagctttcatgatgctctgtgagtagtgagcactggaatacaaatatgagactatgctgccctcctagatctcaggcattttcatcatcatgaaaatgatgatcagatgtatactttgacatacattggaggtggtgatggagtaatataaggtgctaatgggaacaatttgagacatcagatcagattgggattgggagggtagtagactgacttctatttaaaaattattctctgcataggtatttatatagttcaaaactcaaaatatataaaagagtaaaatcgaaagcctctctgctacctctgtcctccagccaccctgtttgtccttagaagtaacccattattacttgtacattcttttgaggctaactcttgaactaaatcttaaaatggtcattcagattaagtcactaagaagagaaggggatagttttccaagcagaggtaaaaggcagtttgtataatgatgtgaaagagtgagaatctatcatttggaaaatggtattgttaatttgacaagaaccagagtgaaggactttaaatgtcatggtaagaaatttcgatttttatagtaagttgctgttaaaggtatttctggaagcttttattgttaaaataatatatatcttgaaacgatttcagtatccttttagtgattattgcattttaaattataatcttatgataaagctgtgttaagggaataccttcagagcgctgagtcccaaaaatcagaattcttacctaatgaaatgtgctaaatattttggtacccctggctctaagtttaagtattctgtttccctcaatattaccttgataatgtcagaacatttggtacatgttgagatactctaccaaaatttgatttataggtagcataatttggaaactaaccttatattaaacacaaagcaagcttacttgtgtcaggtcctatgtatatagactttcatttgatctttccaacaatttgtaagaaagtggtttcttcccttccccctttcttatggattaaggaaactgagactcttaaaatttgagtcacctaggtattgggtgacaaagcctagactcatattcagacctttaacctaaagccagtgcttttgaatattcccagagttagaagtttgttttattacttggcacacaataagttaggaagaaggaagaactaccatagccactgatttgttgtattgtaaccctttacctaaaggatttttttaatcatttaaattccccagataataatactggagatggtgcttgttgatgttcttcatattgtatgtccctggtttctatttagagatctctgaagtcgaattttggcatagattaagagaaagaggtgtttgttgagtgctcaagtaccttatgctttaagctttgacaatttttgtagcttagttttgaggtatggaatgtttgtttttttctccctgttgtacttagttaccctacaaagatagtgtcttgcaaaaacaggtagacatgccacatgctttgagtcattttctgatgtagtattttcacatacttggaaattaatgtgatggactattgagtatataaagtcagagagaaaagaatgtattttgttcagtgatgttaaagaatatttacaaataggaaaacagcatttttgtttaggtggctgaagtacagtgtaaaccacatctcagtcttcctagaattgcttcgttggctctatatttagaatggtagtttatattaatatcaaataaactgttaaaaagctggtttcaaattttatttcttgagtggaagagaatttgtgaccacagctgcataaaaagtcagtatttccttctaataaaatttttaatttcagttgcctcttcatgctttcaggtttcatggactgtaaccttgaaatgatcccattaacagccttttccttgggctcttaatctcctcaattttatgccattccaaaatagaagtctctctgatgatcaagcctttcaatctttacagatggctcttttcccttctacttccttgatcagtgatttcacagacttgactcctttaatctgttagtcagtgtttggagactaattattgttgctgtttgctacaaacccctcagtttatggataacatcccagttatagtatcccagaaacaaaatttcatagcttataagactatctaaatttttacccttaaaatctagactgtttaaagttttatgtagtacatagattgtgtaactgtgtactatagaaaaccatgtactgtggcttcttcactttgaatgtatgtagaaagagtgattgttaattgttagcttttgcaaattaagtgtattctaatatgtgctgaaaactttaggtccatttatacagtattttatttcacaggttctttccacatcccagtatttactactaactacaaatatgttcgtttttcacctttacatttgacttaagagatattgcactattctgtaaaactgctggaattttataacaagtcatatgacttcatttggaaccaatttacctggaatatgaatttgattcaaattaaatatttgtatttccaaagtcagaggatctaaaggtcttttaaagatgccaggtgtggtggctcatgcctgtaatcccagcactttgggaggccgaggcgggcagatcacctgaggtcaggagtttgaggccagcctggccaacgtggtgaaaccccatctctactaaaaataccaaaaattagctgcgcgtggtggtgggagcctgtaatccccgctactcgggaggctgaggcgggaggatcatttgaacccaggaggcagaggttgcagtgagccgcgattgtgccattgcactccagcctgagcgacaagagtgaaactctgtctccaaaaaataaataaataataaagttcttttaaagaatatcatccttataaatatattgtgagtactctttaatgaattttgaattgtagacttgcagaataacttccaagatactctttcttattcttttgtatatactaccttcctctttgagtcactccatttaaactggaggtctccaaacagacctttgaggatagcaaactagttcccatatgttcctgggcaagcctgtttttttataaaacaaaaacaacaaccaaaaaaaaaaccagattgaatgttcaattggttcagttagttttcatttgatttggcagactgacttctaagtacagcgaaaaaagtggcctgacaaatacatcttaagaggatgtaagccgttaaataaacagtaggtagaagcctcttaagcttttcttgttattagcaggtctaatcagtgcctttgattgccttagacctagttaggagaaaagtggaaaaaggattaaaagaatagaaaggagttgaagtagggcaagcaatgagaaatacacgtattagtctcctaattaatcaaacagttactttggtgattctctggcatcttggaagtcttttttttttattgtactaataattctgcacagactttaaggctcttaataggaccccagaattgccatgttgtatctaaacctcattttgtagattaaaataatgctattgatgattcactgtatgccaggaactttacatttagtctcagttctttagcctgcaaagctaggtagtaatgtaaccagttaacagataaagagacagacttttaaagaggtcaaactttaacactgctatgtgtttagtgtagtggtttaagagcataaactctggaactagattgccacctactagctcagtgatgtaaggcaagttacttctatctgacccagttttctcctctatgagatgggagtaataatggtgcctacctcttagggctgttgtcagaatttagttaatgagtgtaaagcacttagaatagtgtgtggtacctaataaacacattcttaactgctgctgttctgctacagcatgggctaagaattttaaaagttatgtggcaaagtttttttggcttccagatgtacaggttgaaggtgggggagactatggaagttgctgaggaggagggaacaggtttgtcaaaagtttaaatccccgtggaaccagtccctagatttgaggtgaatcatacttactgggagatagtccagaagagcccatcagttaagagtctatggtgaaagccctagggaatggtagaaatgaaagataattatgataaataggcttttacccctaaagtaacattgtaccaatgctagaatcagaaagctgccaaacaattgcagcgccattttttgccctagacgaggaaaaaacacatataaataaatggattttgaaggtggaaatgtgtcaagtccaacccaggaaagaattcttcattgttaatcaaacctttgctacttttaacagagcctaagaaaagtttttatattgtgaagatatagcttaacttagtttatatgaatacctaagaacagccttgttaaactgctaaacaagatagatatttgtaaaggcatttgatatagaagagtgttgattaggctatgaatttgtcacatttatatgcacgcacacaaaattggatgctacttagtatttagtttcatctgccttacctctttattttataactgtgatcctgaattattgttgaagtctgctggattttgtccagtttttaatttcttctaaagtgttgttttaagcaaacttatgtggttttaaaatctttttattattaaaagttacactgtattagaaatctaaaatcttccatcttcttttgaaaagtagtgattatactgtacgttctcaacctcatttccatttgattctcggatctcacaggaatccttcaactgctttctaccaagcgttccatttgaacacgttaaaggaatcaaagagcctctgggataggtatgaatacttacatatggaatgcatacatgcaaaactgtatgcatgaattgctttgcactgtactggtttctcattaaaactgatctttgttattttaggggggaaatcacatggtatctagcatgggacaaagcagcaaaataaaccaaaaggacaatctctattttatatagaaaataaacatacttttctgcatcctgtgtactttaagtatatctatatttttgaagggttcatactgtgttgaatttttcttatgaaatagtcacttccccagtgtattttaatgcaaatgcatattctataaaataaactatattttaatttttgtgctattttatgttttttttctgtaaaagccatagtgattcaaagcaaaatgttatttcaaattatgaaattggaggaggaacaagaccaaggtatcaaagtaatcattgtttaatttttggcaagaaactttaacttcaagtttgtttgctagaattcactaggtctgcattactgatttgtaagcccctaaaacagtttgctttcttacagaaatgttgtatagattttactgttaacttttaaaaatacagaatgaagtcttggagttcttttatggcaaaagatactttggtttatctttctgcttaacacacattttaagtagtgtatgctctgttcaatcgttttgctgaatatttattagcattccatcactttgtgtttaattaatagaagttgagttcaaacaatgtttttaaaattcacacaaagctcgttagattcttttaactctgcctggcaacgcatttgtgtcttctggcatagttttggataacactcatgaactcaactccatctctttcattagaaaagagtattgctaagtgcatgtacatgtcatattaagacatgatacacattgcctagaaatgctaaaacagtcttaattcttcggcttgatttgcttgtgtgtgtcactctagggaaattttctaacagtatctttttgatggtgtgttccagaaatctttttaaatagttacttttagaacaggaagttttaaaatttgtagtaccatgtttataaaataaatttttaaatagttctgtagccatttaaattaatacataaatgtaaattgtgagatgagataaacatgaaggtttaatctttcaaatagttttccaaatgtagccagaatgtgagtactttggggtatgctttatagtttctcttagaaaaaggaaaaatagcactctgtttagaaatgtaataagagtagctttcaaaagtatgatgatttatttcaaatagctaactttgagctgtcatgatgttgatgtgaatgatatatattatttttatcagtgtaggaaggtttgagctatatttttgataatttgaatatgatattgaaaggtttattttgtttcataataaaaccaccatagaagttgcctgtacatcatttgttgttacagctaaatactccttatatgttttctttttttagatacctgaaacttttaaggtatcagaaatgaggcaagttgcgtatctatggtttctcatgggttgaaaatatttattttctctcctccttggagcctgttgttcagagccaaagaagttagtggatatttgtctgtagtgtgttaatgccaaaatataataaaatcaaaatataatcagatcagccattcttcactgtaagttggcctcgttggtactaaggtgacaaggccaacccaatggaaactgactagtggctttcttttaacttttcaactagcttattaaattttccattgagaggagcaatcatggctaactttattagttttaatagtctacactttcagttggcaactatctacagaattactgataggtatatcagctaataaagtatcatgagaccgtttattccaaatgggttgaagatttgtgtgtgttaagctttaaaaaatattaaatataacttctgaccttgattgttctggaaatcaccaaatcacattgttcatttttactattataaatttaggattttttttttattttactactaatttggcaaataggtatttggcaggggtgattctcctattaaagagagacatagactgggcgcagtggctcccgcctgtaatcccagcactttgggaggctgaggcaagtggatcacctgaggtcagaagttcgagaccagcctggtcaacatggtgaaaccccatctctactaaaaatacaaaaattagctgggtatggtggcacatgccagctactcgggaggccaaggcaggagaattgcttaaacctgggaagcggaggttgcagtgagctgagattgcgctattgcactccaacctgggtgacaagagcgaaactccatctcaaaaagaaaaagatatttggaagtttaagggactgcaagtccctaacgttatcttctacattatctatttattttgaggcataaatttgtctcgctattactagataacagattttaggctcctatttatgaaatgttggaaatcattttcagtaggggcagcttttaagtgcccattttcagtagacctaccctaaatagctgaatatccctagtttgattttgtctaactagaaagacaagaatctccttttttcctcaggaatctttcagtttagcagaatatcttttaatcaaaatgtaagtaactaatatacctttctcatattgacttaaagttctctaatggcccctttgtttccttccatatttaaattagaattggcaaattaatagacttttcaccaagcagcctgcctctgcctatatttagatatttctccttccatttatatccagtgctttactcagttattgtactaaaattgaagctaccctcaagtcttcctttccctttttctgtaggtgccatcatggtttctgtcttctctgtttgccatttgcagagccctcagggaatcaatcagctgaaccatcttcaaatgtagggacagtagatactgataacgcaaaaataatccaaccctttctgcagtagcccaaactgttttgagttgactctttattaaaataaatactataacttacatagttagctttctgggagattatcttactatggaggagttaatttttcctgagatcctaagcctactggcatttgagaatagtaactttaaaatttgacttcctattttctaaagaacagttttccaaagttaatacttggcattgctttgttaaattggcagaattagtttagaaacctatcctgatgatcactggggagcggcaagcaggttctcattgggagtcctttgtttacaaaagctcagcgtaagggtttatagcaaacaattttaccctcttctaaataccaggtcactaaagtaaaggagtactaaggggaagaaacttcagctagactaaaggaagaaatcaggtagcttgtaaggctttaacctcatcgataagcacttgcagggcttttgtcttcattaagaaatgcataaatgtacttaaaacaagtgagagaacagttgctaggtgtacatccccttgagtctgcttgtctgtccttatgatagcaccagtatttagagagaagttaataaggaaagtagtagacatgggttattaacttaaaatgaaagtctagtaagtttatcctaaatttttttactagataattgatgatctctcaaattgttttctacagtgattattcacttattacctctaattttaaaattattggataaaaaaagtcttcttatttaaatagcctcaagtattttgtgtagggaacgccttccagtatttcctatcattgtttcctatgagatttttttttgaagctaggaataaattagaactaagctgtttatgtcataaataccattggtaccatatgagacaatttattttgttttgctcatctctaagaatcttgggtccatcattaacatccaccagtacttgttatcccaaatggtaaaactcaagttatgcaacttagctgatctagtttttgaatgcttggtgataggacttgtaaaatttttttattgaagtataatttgtatcggaaaagtgcaccattcataaatgtatagctcaaattgaacacacctgtgtgggcagcacccagatcaatacatagaatattataagcccctttcatgtcctcttcatgccccccatcagtcacttcccctcccaatcctaatttctaatgtgttatatatgtaggaccatacactatgtgttttgtgtctgacctctttcatccagtattgtatttgagattcatctgtatggttctgcatagttgtagatgtggactatataattttaaagaatcactcaagtagcttatttgttggagattggtattggttaaatgttctctcctagtgattatgcataagtatcttgaggatatgtacctgaaccattttgtgaccaaccccaatatattccttactaatttgtacctagtacttacataatttattatctgattatatttcaacctgttccactaaaagacatctagtagaggatagtacaagaagctaaaaattatagcatagctttttaatgattgtcaccttttattcttcctccctccctccctctttccttacttcatttcctccttcctttcttcttctcttcctctccttccttccttttattttactttttaatctgaaatattttagatttaaagttgcaaaaatagtgctgaggcttcttgtatgtcctttacctagcctcccttaatgttaacatgttgtacaaccttagtacaattatcaaagttaggaagttaacattgatagaatactattaactaaactacagatcttattttaattttaccaagttttccacttttgtaagtgtcctttttctgttccaggatccaattcaggattccacattgtgtttagtcattgtgtcttccattttaatttgtaacatagcactgttcctttattgaacatagggagtagcaagtctggtcttattggtgtggagagtcagttaactaagattgcctacaaatttccaccttttctgcagtgcttactacagttgctattctcacaggactctttcgtatcacatatataaatgttttcatcagtagtttagtttgtagttcttaagtgggggatggggcaggcccagggtaggaggggcaggtaatcactggtacttagaggatgaaagctttatatattccctctaaaactcatttttggatccctgatttagatggaaacctcagggcgtggttatgttcagatgacattaaatcaaggaagtgatagccattgtgaatgacagcatttataaatttaactgaaacaaatacagaaatcaagaaattggaagaatttatatgtaaattcagggaggttgaaacctaggttgactgggtatagtaaaaaaaaaaaaaaacatacttagatatgtgtgttaatggcattttgtagtattggttagcaagtgacagtgctgccacaaaaactaatgtgattttaggtgatgttgaaatgatggtgactaatctgttgtactccatttctacagaacagttgttctaaatacaaaactaactagaaaaccaaatttctttatactctatttgcatatccaggggtatttcaacaggcaggcctgagcgagcttactgaaaagtaaacagatcccttgggaaatggtcttgccatcactagaaataatacaactatcttcctgtctgttaaccagggatgctgattttaagtgaaatttaattttagttacatttaaaatgcctactctggagttttatttccccaacttttctaaatggaagtacaagcattggaattgaactcctttacttctgtttcgtcattattggctgtgattatcagtaaaccttaaagagctgtgtatttgcttaaggaatggaagggtagtaaactattctgcttttttagggaagaattccatgtcagaggcagtaaatgttgatctgaatagagaaaccaatggagcttccctcagaagaaaatgagtgacagtaagcttatttggaaatgagaattgccataggagtggtggtaaatgaagccccacaaataactaggcaccagttatcaccatgctgatgatttcagcagcatcttaaaaactagtgaattcttcctacccaggtgccaaggggaggtagagtaactcatggagaaaaataactacacattacagactgactggcagaatttaaggttaacttcatttagaaatcatggactatatatataaatgggcatcagtctaggtcatagtcataggactgtagggaaaaccaggtctccaagtttttaaaagccacatgcttggttatgaaattgatgctctcaaaatataattcaaattcttgttgatctggaaataagaatagtgtgtgggaaagaaagaaattgtatgtagagtgtagtgaaggtaggtcattgggattttaatggaagatgaaagaagccacttaaaactgtttgaaactcatgcctatggtgttctgtaaagctacttgggaagttcagtaaagtattagatgcctggtcatattataaagtagtctctttaacaatacgtgtttgtccccaattatagttacttgctatttaaggcattttcctgttaccatcttcagtggtcttagatcaccttttccaaccaaaagattctaaagccttaaaaatctcacttttttagagtaactcagaatgaagctgagggaaaataccaggaacgtttgcaattacctgactcagcaaaagtttgttctcctataattaaatactagaagaaacaataagatttagtaactgctttcagtgagcttggtcttaatatggaaaatggtaaatacattatcacatgattgaaagtaataactcatataaaatgtaagcacttcatatctctcaagtacagctggagggattggtcaaagcttcttcaggaggtggcttttgagttggaaactgaaaggtgggtagaatttggtcaagcagaattaaagaactgaggggaagggaacattccagttagaggaaatattgtgcaccactatggaagtactggccttatatgataaggataaagttaaatttggtaggtgtataacatttgaagacaggagaggagagcagttagattagagacagagattctagaaaggtactgaagcctgaattaggcaatggggatgagataggaattacaggattttacaactgattggtcatgataggggagcagtcaaacttgactccaaagtgccaaacctaattgactgagggaatgctggtactgttagaaagtattagtgaaagaattagtttgggaaggagaaagtagtgatgaggtttttgtttttagctgttttttggatgagttgataagctggtacaaagtcaaggtgaaaatatttggggtgcagctgaggctgcagacttgcaggttggtatagaaattaaagctagttgagatttaagaatgttttattagagttcaagctttaggaaaggccaagattgccaaggattagagtagggtaaagggtcaagccaggaccttaggcaataccacctgcatttagataacagaaggaagtctgaagaggatgattggttttagagattagaccattctgaggatattattttctaatcaaaaagaagagaaaggtctgaatctttaatttgaaataatttcaaatttacagaaaaattacaagaatagtacaaagaactcaatcttcttaccaagattcagtgtttgttaacattttgtcatatttgctttatcatcctaacatattattttaggaaccactaacaaggtgaaaccccatctctactaaaaatacaaaaattagccaggcgtggtggcaggcacctatagtcccagctactcgggaggctgaggcaagagaatagcgtgaactcaggaggcagagcttgcagtgagccgagatcgcgccactgcactccagcctgggtgacagagtgaggctctgtctcaaaaaaaaaaaaaaaaaaaaaaaaaaagagtagataggaaataccatatccatttaacttcagatacttcagcttatgtttcctaagaagattattctcttaccaacaatataattaccaaattcagggtatcttatattaatgtgctattatcaaatatgaatatacagtgcatattcagattttgtcagttattacaataatgtccttcataaccattttttaacctgttcgaagagccagtataggttcaccaattatacttaattaaacagttgtctttttcccttcctgtcttgtttgaatatgtaagtacttgtgttagtcacctaaaggattatttaaaatttaaatatttaataaaaaatgcagtattaatgtttttggataaaatactaggaaaaaaatgtacttgcttagctagtttgtactattgggagtattcgaaaggcaagggagtactgcctaaaatccagctgaaacgactactagagttggtgaagttttataaggggaggtcttttattgctcagagttgggtggtgggtggcaagagtaggagaacatttggatattaatgtgtcccttagaaattgaagtatattcatgtacttccctttctgtactgtgatttttatatgtatgtattaaattgggcttttaattattttgagttggaaaaaatagtgtaatttgaagacattttacatcaccacttgggtttgcaaattatgtattgctatcctgtatatactgttgtatcctcttagttttattctggtagttgtgttaggtggcttgtctgctgcgagatttttaaccacaaatctaaatctcattattcgaagtggtgtttcactggaccctaaacatctcttctcttagcttttctatggctagctgaagtgggacactaaacattctgacatctgttttcgacacattaccaggtttcagaattggcaaagagaaattatttcttaactgctcacccaccattatatatgctttccacccatatgtttaccaccttcctctttagtaaatttaatatgttatttaataaatttctaaacctaagtcaccccagcctattttgagatgttttgataattattttcaggtgaaattttagaaacagttttgaaaaaggtgggaatagctggtaaggtctctttattatttatttatttattcatttattcaattctttttttttcttttcaccaaatagattttaggtaaaccaaggctttgaatagaacagaaaagtgtatgtatgtttgtacatgtgaactaattcgccaaattcgatgtatttttttctaccgaatctaaaattctattgaagagctttttttaaaaaaaaaaaataataaataactgaacttgttcagacaagaaagaaatttaaggaacctggaattgttgaaccaggataaacatagaacatcttttagggtttcgtcattgttgttggttttccattctagtcctcagcaatttaaaattttaaattcacacctcttcagttgtatttaaatccgcagttgggcaaccttttgggaagaaagaaatattaatggaattattttagttttttatttttattaagatttggggtggtaggtagaggtagaagaaagagatgactgactctattctagcctgacattctttttgtttgtgtgcataaacatgctgatagtaatattccaagttactcaaatcagggaatatattaaatttttgtgattgatacagagcttttaaatgccttagcttaccaaaaattagctcctgtgtttaaactttagttggctacttctaaagtatttttcatatttgacagaaataaatttaaataagtgataataatttagaatgtttatccattagtaaatatcctcaagaaataacatttttatgccagtttatctcccagttgtttcaaagtttgaagattgttggttataaatactaaaagatttggaaggtgctattgtatttttcactttttaattgtgtgatatttggcccaaaaatagtggtgtcttcactaagttaaagtatgtatgcagacagcatggctgtcagtgtccccagctgtttatgtggccacatattgagaattttatttgtaatttcagtatcaatgctaatggtggtatccatagtagctacgtattttctaccaatagcaagatgttcagaatatatgtaacctttgtcgtagaagacagaaacatctttctgcatatctgcctggtgataaagaaggtatattttccctagtcctacacagtatcggaaggggaacaaggagggaaaagagttgcagtgtctggctgataacactcctgtttacagtgatgctaaccgttggtcttcagaaaatttctgcgtttatttgcagtagctgtttttattttggatagtacttagtccagaaaatgttgctaaatgtatttttctagagtagtcataactacttttgtttcaagaaataagaggtatcaactcttcaaaaagcataatatattatggtttctttacaagttctgtttctcctgagcacagtggctcatgcctgtaatcccagcactttggaaggccaaggtggacagattgcttgagctcaggagtttgagtccagcctgggcaacatggcaaaacctcatctctacaaaaaacacaaaaattagccgggtgtgatggtgcatgcctgtaatcccagctacttgggaggctgaggcacaagaattgcttgaacccacgaggtagaggttgcagggagccgagattgcaccactgcgctccagggccacagagcgagactctgtctcaaataaatgtataaataaatgttccatttcttttatgttagctattattaagctcagagtcaaaaaataggagggttttttgttttttttttttttgggacagagtcttgctctgtcacccaggctggaatgcagtggcacaatgttggctcactgcaacctctgccttctaggtttaagtgattctcttgcctcccgagtagctgggattacaggcaccaccaccacgccctgctaatttttgtatttttcataaagacagggtttcagcacgctggccaggctggtctcaaactcctggcttcaagtgatccaccctgccctgacctctcaaagttctgggattacacatgtgagccactgtgtccaacccaaatattcagctttctgttaacaaagcatgcagttccttattatacatatatttgagtattatgtaactggcttccacttcctttgattttccgtttttagagggagctctacctttaatttcaatatctttttcctttgccttctttctaagctgtttctactcctttgaaaggatcaagtgtataaatcatttgagagtaaacatgttaaaaataccaatagcctgtcttcttagagctgtttttcaaaggtgtattaatgaaattctttaagctgtgtatttggtgtttcttctaccaataggtgcatttgctataatgcataacataccaaacactttatatatgtgtatatacatgtacttatgcttatatatgtatgtgtatatatgtacatatgcttatatatgtatacatatatatatttagtttctggcatagctaattgtgtcttaaattatatcttggctcaaccacagatatatgaagtttcttgtcattgtgtgttatgtgtctttttatatgtgtctttttatttatttatttattttgagatggagtcttgctctgtcacccaagctggagtgcaatagcacgatctcggctcactgcaacctctgcctcccgggttcaagcaattctcctacctcagcctcccgagtagctgggattacgggcgcccaccaccatgcctgcctaatttttgtattttttagtagagatggggtttctccatgttggtcaggctgttcttgaactcctgacctcaggtgatccaccacctctgtgggatcccaaagtgctgtgattacaggcgtgagccactgcatccggcctttttatatgttaattttttggaacatactgtcttcctagcagttttattttatttaggtacatttgtactaatttttaaagtaaatttatctttgatattttaaagcttattttttcaatatatataacctatggaatgactctgtgtaatttattggaggacataaagggttgccctgtttcccccctttctccatttaaaactaagtatttctgaccaagcattggtttatcatggctaggatttctccaaacaatgtagtgaacttttttgaacagcaggttgaaaatctggctatattagtgggtagtcttatagaattttcagaatcttttaaggaaatgtggtttaaacctgaaaacaaaattttctatcaaactaagataagcacattcattaaaaaaccaagttcctttaggaactcttttagacctgtttgatttagcatatccattttcaagtaattacttggaaattataaatcatctaccttcttcccctttcactgtttttttattttaatatagtttcaccttctcacaaaaggaaatgataaataactgtagggaatatttgggatttggttttggtagcagtcttgccagagattcaagattatgattgataatattagtacagttttctcattaaatattcatttttaggaagaattctaattttaaattttgaagggtatctggttaatctgaacgctgttcatctgtaactactttagttacccaatttcatttcaggttgttaataaggatgtcctacatgttggaatttaatgacttaaactcttgaaatatgaccctgtacttggtaacaactaattttgaaaatatatgcttaggaaaattttgatatataacttttgtatcttttaaaacgtatacagctctaaagtcctgatttaaccatatatttgtgtaatgtatacacccttaaaatttttttttgtaagtttcgtagtaaaataactgcttcatatgactggtttaattgtatcttccaaaaagactttccaagcatttaccgtaacaaggctttttttgttggcaggccctttaacaaagggtcaagcagtcggccctttaacaaaaggtcaagcagtcggccctttaaatgaccttaaattaaagccttgcagacaagcagatttaccagcattatagataagtatttcaggaagtatttactttactaaatatgactgtatatttgtcctataaaaagtaaatcttcaaaagattttaaaaattacagtattttggttgataggagataagaatgttattaaaactttcttaaaacatttggtaatacattaatgaaatgaccacaactttaaacgaccacttatcctcataaatatggatttttgccttcaccaggtgattacattataaagctgtgctttcacagaagacaaaataaagttgtatgatttatattgaagtcaaatgtgttgtgagattacatttggaaagattatattggaaaaattctaatagtttttcagactacgtgagagacttaagtgaccatgtgtaatagaaaagttccactgaaagttaaaatctgtaacagcatgacccagcctgtacatttgggtcaagtatcttttgagatagctgcagagtttcctttacaatgctgtctttcagttttctatagctttatgcgtattgatcatcctcagtaagggcccttttctttcccccatcccttccacccctttatagtgttttatttaggggattaatttaggcaaaactatgcccacaaatctatgggtttcctttcctatgggttactggcaactaaaaatataaatgtacattcttatcagacagaaaatgttattaatgatattattcagtgattaacatagatgcccaattgaaagctttctggtaaaatttaataaatttaacaggatatttttaatgaagtgatttttgccattattaaatcttcctacctccagttttcttccgtgcccatatacaggtgagcaatagggaccactgctgcataggatacattgttattcggttacataaagcacataataaaatttaattcttgccattatgttgtctattttcaaaattgggggtagtagagacagatgaagatttagatatagaaatggaattctgtcttaagcacttaaatgatcggtatggattgttactgatccagccacccatgctataagtctagaaactcagccaggcatggtggctcatgcctgtaatcccagcattttgggaggccgaggtaggcagatcacgaggtcagagatcgagaccatcctggctaacacagtgaaaccccgtctctactaaaaatacaaaaaaaaaaaaattagccaggcgtggtggcacgtgcctgtaatcccacctactcgggaggctgaggcaggagaattgcttgaacccaggaggtggaggttgtagtgagctgagatcgcaccactgcactccagcctgggcggcagagcgggactccgtctcaaaataaataaataaataaataaaataaaataaaataagaaactcatatacatggatgtggaccaaacaatataactcaaatgcctttctacaggactacaaagctgtctgtatcaggttatggtgttaaatcataatttctggatcatgatcttaaacctttaattggttccatttctactttactctttactaacaagtatcctgatggcctgaaaatccatgttgaaatttgaagtttgaattttccagatcaaatatgaaatttattttcattttttaaagtacaaaatatcagttgtataatcatggtaaaacataaaattttgctataaaagatttttaaaggctatttgattaaaacatttatttacttaaactctttgctagaattttttttagaattcagcatcggaggaggaatgtgacataataatgatcgaaagccgaaagtttaaaagttgtgatgccctcacatggttggagggttattctagcttctaaggactgaatgttgtccacaagagtgtcatcaggtcataaattggtaagacttaatggcttagattttatgtattatacctgatgttattgtattgagatgaatatttatgaacaaaatgagcacattgtgtaagagtatagtattaaatataagttaaaacttggaattttaaatacttggagtatgtaagcctttcgaagtctcttgaggctgaaggccgtatctttgcagtggtgtttagtaaatacatcagtttaaaaaaagaaagtgaaatcctgtattatagtaagattattaaaatattgctattgcatctgctgtagatgcctacaatatagtgaagaacccaaatactttttaggtgttataccaggagatatttgagaaataatatattcatcttttctttaaaaaaaatccattttcttaataacatacagcttaattttattgctttggagattttatttcttaataaaagacatgtttcctctaaatgtctaaaataaagccaagaaaattttttcaattcttacattgagaatacctaagatgccaatatcatatgaaaatgatatattagaagtcattgcacattttttatattccccgaaaattaattttctctcagtattctgcttagaaaaaaactactttgttttgtgcagtttcttattttgctttgttttacacagctgtattttgtagggggaccattggaaggatagagtttagctcaggataagaccttatatcttttaatctcaagattatagtattttgcagatgaagaaaaggagtctggattatttgtccaaggtgatataattgtagaattcatattttcattaaagtgtggtatgcatatcctgcatgtcagtcaagaattatttgaaattatttattttccaaaaaagccagaaggcatgggttgatatcagctaaacaggccactatatatattccaactttatccttaaccagagatatgttattttatcctttgcccattctgccttttgaataatattctaaattgtttctgatatagtattccatgacttcattacattctgtaagcttaagtcccttaagccagtaattgcaatcaatagtagtctggaaggaaatacaacaaactaattaagttatctcttattccgtatacttttctattttctttattttctataatctacataactttgataatcaggaaaataacttctaatttctctagtataggatatccatatgtagtagtcagtggctggggttcaggagatcacgaaccatgtgagattttgggtagaatttttttatgttcacttttctgtgaaaggttcagagcatttgtcagatttttttttcagagcatttgtcagattttcatctgtcaaaaacagttaagaaacattgctagtgaatgttttgtgtcaaaaggacaatccttgttagacacctaagtatgagtcgtgaaagaaatttctaatgagaacattggtcatatgacttctactgatgtttattcaatgctgggttactataaatgcccattagactgatgggacaaatcagagccaagccacatttagtttaggaatttcgtactgtcagtctctgtgctcaaaggtcaattggatttttctgcagagtagtcgtgttttggctattgagtgtcaggcactgtgctgaatatttttggcacattatctcatttaattttcacaaagtcatatattaatagatattatcaatatcctcagtttacagagaagaaaattgaaagcttagggaagttaagtaacttgctcaagtcgcatagccattgagtggtggagctagaattcaaatcttattactgactggaacctgggtatcagtatgctggtatcctctgaaaatttgaaggataagataaaggagaattttacattgtatgaagatgtgaattcataaatttgatttatcttgaacttaagtagcaatgggtcatcctccattacaaaactatcttttattatttgccaaaaaataaatgttggaggttgcttactatctaaaagttaagtattaattgcattaaaaaataaattctttttcaggtttaatacttatgaatataagcaaatatatgtgtatttttttttttagaaaagtcttagtacttattagaatagtattattaaggaactcaccctttaatatttaggatttataaacagcaaacactaggaagcattaatttaaaaagcagctttgaactgcagatatttcttgggatagtgggatatattgcatgtaaaacccttattaaatgctatgtgagagttttccatttgcctttagttgcgaataattctgagaaacctccttttttgcccacttttaaagcatttatcaggcaaaattaattttttgggatacatgaagttttttggttttgttttcctttgtactttgtcatatcctttttgttggtttaattttactctccaatgagctccacatcttataaccttttccctgtttttaagtattaataataaaaggttgaatctgcaataatagtactgcttaaaaccataagaatttgtttgctcctgagtgatgttgaaatagtctgcagagctagtataaactgtttctttagcaccacgattaaaaatgcacaaacaacgtgataggtcatcagaatatgagaattctatctaaaagtctttttatatatatattaaaaaatatatatataatacatataaacatataaaatacatttgtaccccaacttctgtagtagtagtatgtttgccttttcaaaattcaaactgggaagtttggaaaatagaataagaataatcatacttaatccaagtttttaacacaattaccatcttagtgtttgcatattcccagacttggaatacatatatattaatagttgcaatcatggtagataagtagattttcaatagtttttaaactgtgtagttaaaactaaagctaatactgatatgtgatacgtttttaattttgaactgatatttgatattttgacatctgtgatagcattccctcctgtttttccttctaccttgctggttgttgcttctcagaccatttggcaggctttcccttctgtctgctcttttaaatattattggaggccgggcatggtggctcatgtctataatcccagcactttaggaggctgaggtgggcagatgacttgagcccaggagttcaagaccagcctggacaacatagggagaccccgtctctacataaataatttgctgggtgtggtggtgcacacctgtggtctcagctacttgggaggctgaggtggaaggattgcttgggcctgagaggtcaagggtgcagtgagccatgatcgcaccactccactccagcctgggcaacagagtgagactcagtctcaatcaatcaatcagtcaataaatagagtcatcagaatgctgtcttcttacattcttcatcgtggtaagagcttatagatggcttccatgcacatatcatctttatgctataggaagtcacctgtatgctctaaggtgctcaaacccattacttccagcctaggcatctctccttacattcaaacttacctgatctctcatagctggttaatcacaaagtactgccatatctgcctcctcagtgttttgccagcctatccatctcttgtcctcattcagtgtactatcctttcttatgtgaaaatgcaacaaccttctgactagtccttgtcgtttaagttttctaatgtggccaactgcacctactgttctttttacttggaacatttttttgtacctatcttttttttctccacccaactgtggcatttcctctactaattctttcctgatccaagagctatgtgcccccagaacaccctctaaaatcttgctctgtcttagcacttatcacacttaacatcttatatatctcctgcactaattgtaaactcacaaactctggaattatgtttatttgacgttgtatccccagggtctgagaaatgtttaagttcattacaacccctttggaatgtggcatcacaaaatttggtgtctgaaaataatgttagagattattgtatacaattagagacaagactcaaatgtaggaaccacattacctaactcctaagtcagtgtttcttgtgtatttcatgacatttagattttgaccactataaattattacggcaagttattaggtaacatagtaagtgtttaccatatgccagatactaatgcattatctcactgaatctcagtacccggtcctattattgtcctttggggaggctaaatattagcttgtctaaagtcatatctcggttttggtgcagtggctcaagcctgtaatcccagcactttgagagtccaaggcaggaggattgcttcaggccaggagtttaggagcagcttgagtaaccctgtctctacctgcaaaaaagaaaaattagctagacatgatggcacatgcctgtaatcccactgaggcagaaggatcacttgagcccaggagtttaaggcagcagagagctatgatggcgccattgcattccaacctggaagacagcaagactatgtgttataaaataaggtgagagatgggattcaaacctgggtataactccagaaccaatgcccttttatttaatatcacatctcagaatttatcttctgagttttgaattataaaactgagttagaagggaatttaatggtcatttattctaaccacctatcctatacttggatcatgtctacagtgttcctttcaagttgtcatccagcctctgaatacctccagtgatgtcttacttttgcatcctggtctctttttgtatttataaacctctcataaaccctttctgtaaaatagggaatcttaaaatgtgaagcagaaaaatcagatgattgccatcacttgaagcatatataagcagcactaaaaagtctgtggagacattgaactgggtacatcctctagatatttctgtattttcatagctgctataatcaagaatgtggtttccagttcatggccgtaagtcactggttttagtacatagtcataaagttctttttcaaaaatggataaggagacattgcttaataacttagagatcacaaggacgtttctctacttattgattctagtgatgatacaaggacttcatgggaaacctttatatgtgacctgatcctcaatgtaaaaagagtgaaataaatgtgaatgacttcagactcctggatctagtttacatataacttgcacttattcatgagtcatgcttaaaggcatggtagtttgaattgtcttttttatctgaccaaaagcatttaggatttttaattcaccctttagacttaattttgattcagtagagagtgagattagtcagctgagagaacacatagatacttatgaggcatgattatacaatcaagcttttcaccagatttacaaatggtttctccttaaatccatgattctaatgtaaaaaagtctctgtcaaggtttttatcttaagatcattaagtttttaacatccactttattatccatgaagtcttctatgatttagtcatcaccatgatcagtatatggagttaccaagtttcactggccatggcagcagtaacctggaaattcatagagcctagcccttttctgttactcaaacttgaacccgtttttctatttacatcagttgcctatattacatagaaactggcgcactttccttctttctcagtaggtaacaaccagatgcaaggaacatcaaaaacctacctttattggggagaaaaaaattctcgaggtctgcccatattttactgtgttccagcgatacccttaattagtttctaatagtttaaatagttggttaatttcttagatctttgtcctggcatgatgagctcaatataacatctgtttataccaaacttataaaatataattagataatatattgtaagttgtattctgtctttttcttcaagtaatatgtttactatcaattatatgcagagtagtgttgtaataagtagaccctggagatggacagtttctgcttttaaggtttaattcaagagaaaggaacatttgataaagacaaaaaaattatggacgaatcagagaagtggagcctgttggcaagaaaggaagaaggctaaggaaaatgtaggtggagcattccatctcaagtgacagtcttatctctggaatctaaatcgatttaacaaatttcaggtcatgatgtaagtgtagaattcatcataaaagatttcacacaaactattgtaaaattctgtcattcaccatgtctaaattattagaattattacctaaaagaattcaaggacatgaatctagactgaaatgataaaaacttagatgttaaactttttgtctctgaaaatgtgcctacttgagtgcagttttgcttgagtgaaaaaaacctaatgaccctttagattttatagtagtgctattttttactttatgtcagaatccctttgaataaggtaattctaaagcagtgattctcagctagggtaataatttgtttaaaagcaaacaacacgttataccacttttcttatttgcttttagtaatatttattgttgaattttcatataacactactaaaggaagacctgggatatttttaaatactctttttggaaatttttatttgaattaaattagttatatttcagtgggctttggaaaaatttcccacagtaagttaagattattttactctaaataatgaaacatcgagatcccaaagaagatccgtaagaatgttattaatgtccagtccacgggaatcctgtgtttaatatgccttgtacaggagaatcgcttgaacccaggaggcggaggttgcactgagcagagatcgcgccattgcactccagcctgggtgacaagagcaagactctgtctcaaaaataataataataataataataataataataataataataataagccttgtaaatgtaaatctcaagtcaaacaatttttattaacatatactttgtggctgcattaaatctttaacatttaattgaatacaaaaaatcaattaaggaataactaggattttattttgggtgaaacataaatataaaacctgtttcttaatactaatcataattgatttttattcatgtttcactgccttgggagattaactcttatttaattttcccaagatacactgggaaagtagaccttataaagtgtcaaagtccaaattgatccaaatgataaaaggaactaattgggttgttgtgtgtactgttgtaaacagtctcacataatccttatagccgtcctttaagatatgtacaactgtatcccattttatagttgaggaaactagtttcagtatgttaacttgctaggatcaccccactagtaagtggttggagtttggattaaaagtcagctagcctcacgcctgtaattccagcactttgggaggccgagacaggtggatgacaaggtcaggagttcgagaccagcctggccaacacagtgaaaccccatttctactaaaaatacaaaaagtagctgggcatggtggtgcacacctgtagtcccagctactcgggaggctgaggcaggagaatcgcttgaacctgggaggtggaggttgtggtgagctgagattgtgccactgcactccagcctgggcaacagatcgagactccatctcaaaaaaaaaaaaaaaaaaaaatcagctagtctaattctaaagtctatgcttttaagccattttattattctgtgtgaattcaactttttgcttagacaactgctgagtgagaaactgtcttacccctcagaatgtctgaccccagaatgaagtggagaagaaaaaatactttagacaagagataataaactgaaacgtagacaactttaattcttcagggcctgtatttagagtgttgcctttatatttgttgaaagtgaaaaatgtaatccttggctgggtacggtggcacacgcctataatcccaacattttgggaggccaaggcaggaggatcacttgagcccaggagtttgaaaccagcatgggcaacagagtgagatctgtctttacaaacaagtcaaaacatttttaaaaagaaagatgtaattctttgctcaaacccaagccactataattttaaaaaacattccaaatggaaaacattcattgatttattaaaaataaagactaggctttccccccacccccaatatgatatattctgttcatttcattaaggaatgatggccatgcttgtgctctccctttagtctaaatcagaatcaagcaactgtctctttaaaaaccccatgatattcttctgagtttagccctattttgaaacggtcccttgacaacctttatttattactgtacttggactttaggagacagattaggaaggagacttggtagcaaagaaaaattagttaataactttggagcaaattctagtcacgaaatcccagtgactagcctaatataattttactttgtcaaatatattgttcatagaattatgctttttctagaaagctattttaactaacatttctgcactttcaagaaataggcataaagaaaagaaataggcaaaatgaaaagatgagcaaaaattatgtgcttttcactggtatttggcttttggtatatacatataccaaaggggatagtctcatttttactttagtcaggcctcactgtagaaatgggattgagaagatatttaaacaaggcgtctaaacaagaatgactttaataaaaagaaataatatgttgaatgcttgagaaagaggaggcaaatgtgaggccattagatgaaaagaataagtagcattcctaagaatagtttcttcccaagcccatctttttccatgactctttacatgttagtgttctccagtgttttggccccacttgtcttttcattgtttatgcaagtttgttttctcctatggtttgagtcgcctactgcattcttacaactttcaaatctagacttctaggccagagattactctggagttctcaatacctatatccagcagccttctctctatatttctccaacaggattctacatttccatgtctccaaattcagtagtcccaagtgaaacttaaatttcttttctcgtctttatttgcagtgctttatttgcaccacctactccccaccccacttcatccccccaccaaatctagccacctttctgtgatacaccagccaactcctagttgctccaagaataaagccccaggcatccttagcattttctttgtcacagatagtctcttttccttatcatctcactgatctctcaagattctgtatgcttcaattgaaacttgaaatatgttctaatccctctcaccctgtttttcctctgaggtaccagtgtacatctaagtctaggtaactgtcagtcttacactatttttccagtcaccaagaaataatttaaagtagcaggtattatagtgtcgagtttttaatttgggcttacatcccttggtatgtattattcactcctcaataatgtgctgtcatcagattaggtagttgctgctatgtaaacagtaaaatgaaatctctttcaagagagcctgctctaaatgttaagtacttcaatatcaaggaaaatgccaccctcctcatacccctttctcctgtcctttcttaggtcttactcagaggaaggaaataatcttttcaacctgttaaactttgcctattgttagtctattaagaaataatgatttcatctaataagaaataatgctacgtaggatgactgcttcctgtaatcctagctactcaggaggccaaggtgggaggattgctttagcctaggagttagagaccaacctgggcaacagggtgaggccctgttgctaacaacaaattttaaaaatcagctgggaatggtggtgcacacctgtagttccagctgcttgggtgactgcgactgaagcaggaggattgcttgagcccaggagtttgaggctgcagtgaaccatgatcatgccactgcactccagcctgggcatcacaagaccccatctctataaaaacaacaactagctagcacacaaagtcaagtatcttaaataaatgtaattccatattattataacatttaagtattaacttgaaataggatattaattaaactttgtttggaatatttggactgtaatagtgaaattgctgtgcaaattttacttttgtatcagtcttcaatttctccagactaaattcttatctcttccattttgaatgttttaatagatttttagttcagctagttttaaaacgaagtttctttaaaatggctctacaagaaaaaagtaattttatcagaattttactaccaaatattaaaatgatccccccaaaatatcataacttggaaatgtgaaagagatctggaaaaagaagataatgttaattttaatcttgtatatatatatatatatataattaggggataaatttttaatgtaacatttttattgtgtaagtttacatgactttttgtattatagatctttaccacaaatttttaccatttgcttaccagatttactttgaataaacagaaatcgctgtactgggagctataaacataatttacatcacattctcagatggttataattcactctaaaccaagaaacaggatttttacaaatcacaaatatcacttatgttgatcattgttttgtttgttgaatatagtaccttatcttgcagaatgaaatagttgctagagaaaatagagttggcacctcttccctcctttctccctttcctattttctgtcattgcttttcctgtctgccatttgttcatgtctggagtttacactgtaaaagataactccttcatgagtcattttcattttggaacatgtttttcattgttcttcaaaatgtagtagaagtactcttgcttctatctctgtcctgcatctgcctgccttcccaaacagccactttcttaatgtgtgtatatccttctttatgtgtatataagcaaatcaatgtatattatcttctttaatgtaaattataatgtattgtgcacacatctgtacctttacttttaaagatctccagaatacattgttcccatctcagtactagaaaagtatctttgtggttttttaatagatgcatactatttaattgaatggatggctacaccatgattcatttaaccagaagcattgctgttataaacagtgttgtaatgagtagccttgttaacattatttgctatgtatataaaatatctagaggataaattccaagatgaatgattgctggctcagagagtgaataattaaggggaggtcgggagaggagagaaaaggagagaaatctgttttggaaaatagtattacattatagttttaatttgtatttttattttatgattcagatgttgagtattttttcatgtctttcttgttaatgttcagtgtgaattctccccatttttctattgggcatctggtcttaacagattttaggaaaatttattagagactttttaactttaaaaaaaaattagacatgcagttacatagtcctttcccaccaaagtattaaagaaattctaattaaatgtgtttatttaaagttcttagtacagatgataagactgactctagacaaagggggtctaaggtaggagatggacttcatatagattgcatgctctttaatctacgctttactggctagccatttgactgaaattaacaagataaatataaaatatgctgagggcattggtgaacaaggtttttgtagaagatgctgacaataaatatcaatatataaatatttaactgagtttttaatagttccttggtaaaggcattcatcacaccattgcgggactggctacttgagaaaaagtaacacttaagttttgtaagtagaaattttacctgcttgctcaggatgaataatagctttaaaataacttattttgtgttactgctaataataatctctatggggcattttgggtttttttttaatcatgaaattaaacattatttgttttacattggtagaactgatggtcaataattagaataacataacattttgagttcttagtttaatttattattaacttcacccaagttttattcttaaccatagaggtttgcattcagccagaggttgtctatatgaattttatttatttaggcccttttgaaaggaaaattgttatttgttcttaaattaagctgtaaatattttttagtctcctcttacagaagagtggtggatttttaaaattatatttaacctcacaagtttactgaactgtagattgattagatttattcctttgtaatcagtgactcgcattttcttaattttctttctaaaaaaataaaacatgcatttgttagagaataggcaaaatgttacccaggttagaattaatgcattttagtagtaatgatgttattacagtgcttattttgggagatgggagtgggtggaataaaagttatagatgatttactggaaacagtgtatgattccttaggactgcccccaaagaaaggtatagcttccttctacttgtgagtttctgaagaatcagttttagttggtttgggcaagggggtgtgagcatgaagtatgccaaatttaccaacttaaaggagtttgtattacaaaagatttgattgtgtaatttggagagttcctgtagtgcatttatagttgtgattgtaactcaatgcaaagttagaggagtctttgagtaaagcaaggcatttattttatttatttattttttgcagtattttaattaaagatacataaaatttttaaggcatcttcagctttctaacaaaccagaagaacattttcgttcttagcaattaggtaaactgtatcagctataaaaagatcactaagcaagtgccttttctaagaggttccctcccttattctcagagctgaacctcttctaggaatttgccagataagataaatggcatattctgagcatggtttaatctttggatccatgcttatggtttcacaacttaacatttggtacttagttaaagcactcttaataatacacataattctggatttatttcaggtcattagagattattttttcacagtcttagtattatggaagaaaatatgtgtgttttgacattaggtccaggtttgaatcctgttcctagtattgtgtctttgagcaagttacttgacctcactttcctcaactgtaaaatgagaatgttgctcaggcttattgtaaggactcattaagataaaggtgtgcctgccctaaaatagacaaccattaagtgttcttttcctctatcttgttgatttgttaattagcatttatatctagggaaagacaaagtagtcaaaatatgtccattttgaaaaagagaagtagttctcttattttttttagagacagatctggctctgtcacccaggctggagtgcagtaatgaaccctgagctcctgggctcaagcagtcttcccacacagcctcctgagtaactaggaccgtgggcttgctttcttttctcttttctttcttttctttcatgggttctcactatgttgcccaggctgaatttttttattttaaataagtagtcaccatgtctctgtccacattactacagataaagaaaaaagttggtttctcatagttttttaaaaatagagatcaaggctgggcgtggtggctcacgcctgtaatcccagcactttgggaggcgaaggcaggcagatcatctgaggtcgggagttcgagaccagcctgaccaacatagagaaaccccgtctccactaaaaatacaaaattagcagggcatggtggcacatacctgtaatcccagctactcgggaggccgaggcaggagactcgcttgaacccgggaggaagaagttgcggtgagctgagatcgcgccatttcaccccagcctgggcaacgagagtgaaactctgtctcaaaaaaaaaaaagagagagagattaaattagattacctttttctttagtgattttaacttgtgacagagttggaaattcttcatccatcctcttgctttctcagtaatgttgcaagtaatctcatggtaagagtaaggaaacctaggaggaaaagctgtggtggagagccagttaggatcaattaaaagatgaacagcatggaaagccaacctgccttactgtagcattgatactctgagttatactttttctgtgagtgtaagtataattagctttaaacactgaattcaagctcatttagttattttggagcagcaattccagtaaataaatattttcttgtaggtctttcttactttccacagctctatatttctgttcattctctccatatccacaatttttaatgcatctgtaaatgctaataaatgtttgatttttattctaagaatgattcatagtaaatagaaagtttatttttaaaaattatcttttgactttatttagcatttccagtttaccataatagtttaaaaaagaaaattctgaactcatttttccctcatgcttctgtagcagtaattgtaacacttgatttaaaattgacttatttcagtttgagtatgtatctatacatacacactaatctgaaatatttatactaccaccattgtagggtaccgggtatatatactttgtgctggaagtaaagacaggaagccttttcttagggagcttaagtttggaaactggttaaaccatcaaaatataatgtgctgaatataataattaaaaagaaaacaaggtatatagtattataacattaggtgaaggaaggaaattattgattctgcttcagttgatctttctcattttaaaagagtcaaatctcactatgataactttgaacataatagaaaacatcttgataccctcattgaaacagtatttttaaaccatattctgggatcttgaaataaaatagtctcttatttgcttaagactaccatattggtatctccatcgtaaatatggctaaagcagtggttctcatactttagtttctatctgaatcgcctagagagtttgttaaaatagattacggggccccgccccaagagtaaatctggggtgggtccaaatatttacatttctaacaaggtcttggtgggtccaaatatttacatttctgacaagtttccaggtgatgctgatgattctggttcagggactacactttgagaactgatttatctgaactcaaaaaattttaatgccttcctcatatgaaccattaattgtttcaaatctatcatatctaattactatcagtatgcattgagttactatgtgctaagcactgaattcacttattcacaaagatgaagaagttatggaacctttctcaaagagctcaatctaataggatcaacagtggtagtattacaatactcaaagtaatcactgtctgtattgagtgctcagtgtgccaagtactatgcattatgtaaactcatttaatcctcacaattggcatataatccttattttaaatgaaaaaactgaggtctagaaaggttaaataatttcccagaattcatatagtgagtatatggaggagccagaatttgctattctgcctttttgcactataaaaagtttgcgaagattggtagaccccagaaaggatggagtaattggctctaccttagaaaatcaaacagcatcacagaagagatggcactggagcatcttaagggacaggtctaagatagccagatgaattggaactgtgagcatttccagctgagggagcagtttctgcaaagccaaggaaacccgagagaacatatgttccacagactacaaatagttgtataagaccataacacaataggcagatggagtataagaggaaaacagactgtataaggcagaggtcaaagtcataaagaattttatatgccaggctaaaaagttttaaaaatagaattaggcttcttaatttttcctcctataactttcatttgtaagccagcagttctcaaagcatagtcagacagtagattccacatcatctgggaacttgttagaaatgcagattcctggttccatgcctactgaatcagaaactctgagtgggggagcccagcaacctgagttttaacaagacctccagatgattctggtgcatgctaaagtttgagacccctgcagtaggttatagaattcttgaataatagccttcaagatagttaaaggtcactatagtggtagtaattatatttgacactgatttattctattagagtacaacacctaacagttgaaatattaacaccatttaagggatacatcttcatcatgatctatttataccttgcaaacctgtttcttctgttgtcataaaagagatcttaggacaagagtttgttaggtcagcattcaaagaatagcatgctaactattcttccttagctatgggaatcattctaaaactcgctgactgattttaattatcaaaaaaaaaccccagtaatttttgttttttttactgcttgttaatacataaaactgatgttgtagttagtatttaaggtgtgctatttaaaccaaatgtgttgaaggaatcaaatgatttaagtcatgacatgacttaaaagtaattcaatctttccttgtcatgtcaataaaaatatagaaagtataatctgggattcccaagcaaactaatttaaatgcctgtcaccgtcttttttgccaaaatgtgttcagtatttgtggtgaatatgtctgcatggtatctggcactgaagtatatactaaagcgttatggttgacttagtggttctgtagtttatagttacatatagtcatactttgcacagctcactaaaagcatttaaagcccagcacatataaagtatttgttaatgatccataaatcctttctagatattagatatacaaaacctcttttcatcttagaaatagtagcagcaagaagtgaaggtagtatgctgtaattaatgtggttaatgctcaaataaacaaacgtagtttcccatgtaatgattcaagatttcaaggatttagaagtggaaagtccattgaggcattgacatcaaccccttgttttacagatggggaaactcagatccagggaagttaaataggtgatttgctgatgtcccataggaagtgaatagcaggatatcacaggacaggatatttctgagcctcaatctgatacaacattatgggtccacaccatctaaagtaaagtagtttccaggtattttagcactaaaatcttaggtggagtatactttatgaagaatatttagtaacatataaaaaattatcttttcgtattgatacaataagctacagtatcagatttttctttacaagagtaatttttaaaaacctaataactgtttttagaaataaaattcattaaaaaacaataaaagggtataaattccagctattcttactacttaatacatggtagaatataaaccaccaaagaggacaattagccttctgtgttattatcatacaattgctaaggtgatatttgaacttggaatgtgcttacaggctggataacttttcagttattcccaagaagaactgatctaaaccacacataccttataggtgatttttgccagcaagtaacctacagtcaaatacatgtaggtctgccagaatgttgtttctttttgttttttttttttttgtttttttttgagatggagttttgctcttgttgcccaggctggattgcaatggcgtgatctcggctcactgcagcctctgcctcctgggttcaagtgattctcttgcctcagcctcctgagtagctgattacaggcacccgccccaagcctggctaattttttttgtatttttagtagagatgggttttcaccacgttggccaggctgatctggaactcctgacctcaagtgatccaccttccttggcctcccaaagtgctgggattacaagcgtgagccaccacgcccggctgaatgttgagtttcttgttaaccaatcctacccaaagactttctgaaccatttttagaagccattaagttttttttaaaaaactagatgttaaagtataaaacttataccagaaaagtcttactaagaggagggactagaaaaaaaaaagtcaagccatcatctgaattttactacaataagtaattattggaatttctacatgaaaggcaattagaatgtatagttggttaatgtagaaatttaagagatacggagaagacactgcccatttaaaatgtatccttttaaaaccactgaacagagaaattcttaatacaattgagagttagttttaaagtagcatacatgtattacaggcaaattagaaatgttggcactacaaaggacctgtagaaatcatctatttactgagactttcattttagaaatgagagctttgagtactgaaattgtcagaacagaataagctattttaaattactgtatatttggttttaagtgaaacacaaatgtcttttacattcttttaagagttggaagggaggttaaattttttagaataataacatattctaattttttccagtgcatctgggggaggtgttgtagccattgacaacaaaatagaacaagcaatggtaagtaaaagtttacagttctcccatttcatagattgttggttgtatggaacacttagcttttgtcagttttagaaaacaaataagttatttaaaccaaagatgaccaaatcatgttttttgataatgagatttagttgaagatgctagaacgttgagaacttttagtctagaaatactatttaagtagatatttcttccatttgaatatctcacatttcatgcattatcattgataagggccattggtgagggggcatacatatttaaagacaatatgttccccagatatttcagcattgaaaatactttagagtgaaaaagagtattaaagcaaaaacagctggaggtctgattgaagtagactgtaagtaagctataagtaggccaggcacagtggattgtgtctgtaatcccagcacctgagctgaggtgggaggatcacttgaggccaggagtttgagaccaacttgggcaacatagcaagaccccgtctctacaaaaaaagttggtatttttgtttgttttgagatagtctcgctctgtcacccaggctgaagtacagtggcatgattttgggtcactgcaacctccacctcccaggttcaagtgattctcctgcctcagtctcctgagtagttgggagcacaggcacacaccaccacatctggctaatttttgtattcttagtagagacggggtttcaccatgttggccaaggtggtctcaaactcctgacctcaggtgatctacacgcctcagcctcccaaagtgctgggattaccggtgtgagaccttacaggactgttagtctcaaactatttttttaaaaataccaaaattttaaagtccaaaattacagatcactttaaagcagtactatgactagtttaacatcaaacagctttccgttggaatattgttcctttgttctctttatctaccattttaagcatgtgattttaaactttttttttttttaattctaagcttagttgacaatttaagaagctagtattttttggaaatcgtcccaaactttgaaaagaaaattctgggcttactgctctggttgggaactggattttttccaacccatcttccataggctcggtcaagataaagcagaaacattaaaagcaagagcaggaaaactagtataaaaacttagcaccaagtaggccagaaccagatagcaccacctttatcttttcactcttttgacattcctaattttgtttttcacaggatctggtgaaaagccatttgatgtatgcagtaagagaagaagtggaagttttaaaggaacaaataaaagaattagttgaaagaaactctttacttgaacgagaaaatgcactgttaaaatctctttcaagcaatgatcaattatcccaactcccaacccaacaggccaatcctggtagcacttctcaacagcaagcagtgatagcacagcctccgcagccaacgcaacctccacagcagccgaatgtctcctcagcataaagctttcttaagcctcattaagaaaaaaactgaaagcaatctatccttgtgtgccactggtgttctttccactttatacgaaagcaagtagccatgctttggttgtgtgtttggccttttcagtattagacaatcattctacaagagcttttcctctctctgagatgtcatgcagcgctgttgatgtccagttctatgtcatcagtacacaaggagaataatagatggggtttattaaagcgagcaaagtctgcattttacctggtgcgcatgagtggggtctttaagagttttggtggctctcccatgtttcctattacccatggatttaccctgagccttcctatcacattataaataacagttcatctaaagagccacttttctttctgattcagtaacatttgcctacataagttttcatttatttgtgttttatttattacagggctgctattttcataatgtacatgaacaatgtcacagaacttttttaatttttttgaataattataagtatcagtaaaggaagtgaaagacaggattgcatttaatagataaaacgtttaggcaataattgaacaaaagaatcctggcatatttctaacactaatggcaatttacttatggtatttattttcagtagtaaagacccagcttgaatgtaaattttgtatagtgtaagtatgaagaacatagtgcaactgtacaggtagtcaccagttattgtgatatgataaataattgggctattttgatgaagaaaactttgttcatttgtttctactttctaagagaaattgccacgattcctctgcttttcaacatttcgtatgacttttttttcgggtgggaataaaaagctgtgaaattgttcaacctactttgtaaccaaagaagcaaagctgtgtaatggagtttggtttttttttgttgtttttttttttttgtctttttttttttttataatgcacattctttatgtatttttatttagtgttttctcagtcacaattttctttactgtctagcatgatctgcatgacctataatctttgaaccactttcgtacctcatgtttttatccagcactcttattgtaatatgtactagtctgtgaacaatgtcaaataaaagagaacgaacaggtagtttggtggagctgagctagtgtacaatacactagttgtaaaaaaaaaaaaaaaaaaaagtgagccatcttttgttcatttaaaatggtgttttgaatttcgtatgcagaaaacgttttgttacattgcagattttaatgtatttaataaatgcaacatgcagattaagtgcagtgtatactgagtatttaaattaaaatgtacatttcataaatacagtttcaaaagaaagcatcattttgtgtatactaacacattaagtgtatgtcagaaattgatgtataaatatatattttaacattttctgaaattaaactgcagttttgttgaaatatttggctctatatgtgttcaaaatttgactagatttgtattttcacagttcaaaatactccttaaagacctgttaataatgacttactgatagttcttaaattttcaaagtaaaacaatttaaagaatgcaaaaatagtgagcaatatttgtactcaatattcatattatgttagtgatacttaagtaggaaatccttgtctaccaaaacttttacttgaattcagaaaggtgcctgtagaaattaacatgcactgcatctgtagccagctagctaatcagagttaatgagaaccagtagttagttctccgtgttaaaagacttatttgaagtaaaaatttaatcagattagccacaaacaaacaaggcataaaattgggatgtacatgagattgccaaatattttctattctagttgtgctgcaagacattgaacaaaatgttaatgaataacattataaatcaaggaactaagtacataggcttgagtaagcaaccctaaggatgtgtagtaagattccaagtagagctgctacaggtgagatacttaatggaatgtgaaacttcactgttggactgttaaccgaaaaggtttgctggctgtgcccctccagtgctaactgtgacatgtgatatttaatacaggtggagaaaaactagtcttagaaatgggatttttgtgaaaatagattccattttgattctggggctggaaaaacacttcataaacaaagtaatagtctccaaggaaatgaataataaggtttaaaatggtaacagcagttattactacttttatattaagaaaaacagtagaaaaggagagaaaatatgggtagttcacagaagagataaatggcagtttctaaaggttcaacctctagtaacctaagaaatgcaaattaatgtttttggcgaattgtaataagtgtcctaagtagcaggacttaacatagaaagaaagacaggctttcctgtgtacttttagaaagtaatttggcagtatgtatctagagccttaaataataagctttccagtgtaacgacaggagaagatactcaactcatggtccattgttcaaaaatgcagaattattgtggtgtctgccctctgctttcccatcatcccctcccctcaaaatccaaactatccctactgtcaacccttcccccagctgattgtttaggatcttaagtaacttccaattcagctttggagatttagtctcctgctccaaatagttgtaaatattaactgattgagatcccaatttggaggcacagtcttacaggaatgccatctatctaattctgtcagtgtaatgcccatagagcaaggtcccacataagcttttctgttttaatttagccggtaaatcataagtagaaatttttctgatacggtaattgtctacaattcaaacctaactttccccaaataaaatttagtttgttccgatgtgatctcacagcttgccacaccaaaaacaaatagtaggggttaggaggcattaaataaacagtttccttaactcctgattgtccaaaatagctgaatttttccaattctatttataatatcctatgctaattagaagtattgagataacgttttataatcaagcctccagtgactggggatcacagctgccattattcacaagaattttcacaggtgaatgattatatttctccaagttgcaaactccagtaattcatggacctttttttaaaaaaaaaaaaagtcttaatagaaccagaatatctctgttcttgaaaatttatctttgcagaaccagaaatagctaattgtctggaaacaatttttaagatttgaagtcacatttttaaaagaagctttatggctcagtggcaagcactttgtgacatttctttaataatcctatgaaaaggacaaaacccagccctcaaaattgacaatttgaggacataataagccaactgataatgcagtgaggaatacttgttactatgtacagtcagggatggttttgtcagggtaggtttcctcaaaaacatgacacctgagtcttgaaggtcataagagccagagggaagggtgttccaagcacaagaaaagagaactcaatggcttaaaagtataaacaaggctcctagggcagccacagaattgcattggagacaggcaggcagtgacttccccactgacctagtattttggcatctattcagaaagcaagaatgatttattgaatggttttaagcaatgggatactatgctcaaattatgctggatgtgcacaattccagtggcagatgggaggtaggttagagtagctgaaactggaagctgagaaataatttaggagggatgacaatccggaaaataaatgaaagggcaaaattacataggcaattttgtgaaggtcatgaaggaagtttgtcttgggtctttctgtaccattttcctctccacaatgaacatcccattcccagtgtcaggtatcaggtgcctattttctttttttcttttttctttttttttttttttgagacagagtcttgctgtgctcaggctggagtgcagtggcaagatctcggctcactgcaacctccgcctcccaggttcaagcgattctcctgcctcagcctcctgagtagctgggattacaggcgtgtgccaccatgccaggctaatttttgtatttttagtagagacagggtttcaccatgttggccaggttggtcttgaactcctgacctcaagtcatctcccccgcccgcctgggcctcccaaagtgttgggattacaggcgtgagccaccgcacccagctgcctattttcttgtccctccaaaaaaagattaaagagtcccaactcatacttgaaagtttgactcggtcttttccttccaacagttataaatctgtgaaatgaaagtctttgtttccttaaagggatttcaagaatttaacaaaagggttggggaatggaacctttgctgtcactatgcctgtctctcaattctaccctaaaggtaaactaaatggaatccttttatggtgactaggattaggatgttgattccaaagcctttccctaaaatctattccttgctccctggaaaggataatacaggttctggcccccactgtaggtactgacagcccaaggcagaataggttttgctaggctttagccttttattctttgacataggtcagtcctgcaggcttcttttttctaagtctcctgcctatccaaaaccagaccttttctcccacctccttctgcttcaagcctcttaataatccatatttctattttctagcaatagtaatagtttattatttagtgatgtatacttgcaccccatttactccttttcaatatttcaggatacatctttgtcctgtatttctgtaccagttcacagaatttctacagcaagatccctttaaatgtatggctttccttcataggttgcaaggattactttatacaagtgctactgtaactatatcttttgtggagtacaattggtatgacatgctgtgttcatagatgaaaatgctaagtgaggcactctgaagcaagttaaagttcacagacattcttgcttgcccaccacccccccgaaccccgccatggaatcatcaaataagaaaaataagacagattttcagattggtgatggcaaagtaagacgctggtattttgcactggcgcagtccatttagttgttgaatttgttcagcatacctggatggtgagtgagttagctttatttttcattctcagcagggaaactgatagactaggcagtttggggaattttcccattgtctactgtcatgggtccatagtatttaagtttacagactacaacattgtccacagaagccatatttatccccttggagggaagggaaaggtgtgctaacttagatcataaaaacaactgaattttaaaacaaggcaaatgccacagttcaacttctccataaaaaagttaagttcatctctccattcttttgcatgcctacaatatttccatataacaactgtaaaatactcttgcctgctgcaatccaaatgttatccggatcacagttcttgctgtcatttcacaggcatgcaatgtatctatagataggtcatatcatacctgaggaagatcagagacagcaagggaacattttccccacacttgagatggaaataataacaggtcagtggctaataaaaagaaacatgtatgactttgtaaaaccctaaaagtgatgttttcaagaaatttaggtttcttttttttattttataaaaaaaatgttgacatgcaatttaattctatttcaatttaggtgctgcaacctgtactggatgtttggggatagaaagatgaatgggacatgatttgtgtgctccaatgagctcagtccagtgtaagtgtaaaagttaaagtgccatattgtttattcagagtatatgttatagtttgtgaaccttatatcatttgttaaatgaaaggtttttataaatcaacagtaatattgccatcccatgtaaaaatcctttgatattgccaggaaacaactttaaatcaccagaaagctttaacatcaaataatacttttagaaggaggggaaaagccttccacctcgacatcgagcctatgaagtattccctaaaaaagaggaactaatctgagaaaagtttacacatttttaatactctaagttgtagataatgaaattgatttaaatcaaagttaactagaataggattcatgtgtcatgaattatattgtctattgtctcataagcaacaagtgacacttattatcttggctgacaaaatcagctaccatttaatgaaccaagttaagaataactcaggtgactgataccaaaaataaatctctaatacagctgagaatccagaaacacaaataatatgttgagtaagtaataaaagtgacatttcaaattagtaaggaaaaaatggattattcaacaaatagtatgggatagcataacaatttagaagaaatataaagttagatctttcacaaaaattaattctagctagactagcagttagtcttctactttttggttactcccttttagaaattggaagctatgaagctatataccctgtccatttgaaaatgcacataagcaaagaactttacaaataggttataaagagaagctcaatctcagcaaaataagggaagtgcacattaaaacacaagaaaccatctcagatccaactaatatttagcgtgcatacaaatcaaaagctggaaagggtgtggaaaaacaggaatacattgctagtgagcatacaaattggcacagcctcttttaaagacaattgtgtatcacccattaaattttaaaagtcacataccctgtgacctaacaattccaacttttaatgtcctaaagaaacatacatgtgttcacaagatagcctgtacaatgatgtcaattgcacctttgcttgtacagtagacccccttatctgcattttcactttttgaggtttcagtcatccaaggtcaaccacaatacaaaaatattaaatggaaaattccagaaacgaacataagttttaaacttcaaacctttctgcatagtataataaaaatctctcactatccctctccatcctgcctgggacaggaatcatccctttgtccagtgtatccacaatgtatacactcattatatacccattttataatgcccattagtcatttctattatcagatcataaaaaaacatagtacatagagggtttggtattattcatggtttcaggcattcagtgagggtcttggaaaatatcctccatgatgggggagctactgtaatactatgaaattggaaaaaccaaaatactcatcaagaggatggactatggtacacatgatgaagtattaagtatcaatgaaaaagagagagtcctacatgtccggcatggaaggatctccaggagacaatgttaaaagtttgggggaaaaattgaaagacaatacctgtaatacatatgatactagtgatgttaaatcacatcacacacacacacacacacacacacacacacacacaaatactgtatagtgtacttctacaagtacatatttgtgtattatatagagagaaggtctggaaggatactaaccaaactgtcaacagtagtttggtagcgtgcattagctttaactgtaatgtttgatgtttttgaatatgcatttatgtattgtttgtgtaatgacaaattaataaattagaaataaaataaaa

SEQ ID NO: 377 - DNA, 2376 bp, Homo sapiens
  source 1..2376: mol_type = genomic DNA; note = NC_000004.12:9781634-9784009 DRD5 [organism=Homo sapiens] [GeneID=1816] [chromosome=4]
agtgccagcctggcgcccgcgactgcctgccccagcccctcagtggcggcttgctctcttctctcgctccgaaccagacacagccgctgccgctgccgtccggcgcgctacagactcccgagaacagccctggctgtcagcgagcaccagccgcttcctgtccccatcgcggagactggaggggcgcaccacggccatggagccagaggcgcttcaggaggcaagagaagtccccgcgcgctccgcagcccggcgcagctcatggtgagcgccctctggggctcgagggtcccttggctgagggggcgcatcctcggggtgcccgatggggctgcctgggggtcgcagggctgaagttgggaccgcgcacagaccgcccctgcagtccagcccgaaatgctgccgccaggcagcaacggcaccgcgtacccggggcagttcgctctataccagcagctggcgcaggggaacgccgtggggggctcggcgggggcaccgccactggggccctcacaggtggtcaccgcctgcctgctgaccctactcatcatctggaccctgctgggcaacgtgctggtgtgcgcagccatcgtgcggagccgccacctgcgcgccaacatgaccaacgtcttcatcgtgtctctggccgtgtcagaccttttcgtggcgctgctggtcatgccctggaaggcagtcgccgaggtggccggttactggccctttggagcgttctgcgacgtctgggtggccttcgacatcatgtgctccactgcctccatcctgaacctgtgcgtcatcagcgtggaccgctactgggccatctccaggcccttccgctacaagcgcaagatgactcagcgcatggccttggtcatggtcggcctggcatggaccttgtccatcctcatctccttcattccggtccagctcaactggcacagggaccaggcggcctcttggggcgggctggacctgccaaacaacctggccaactggacgccctgggaggaggacttttgggagcccgacgtgaatgcagagaactgtgactccagcctgaatcgaacctacgccatctcttcctcgctcatcagcttctacatccccgttgccatcatgatcgtgacctacacgcgcatctaccgcatcgcccaggtgcagatccgcaggatttcctccctggagagggccgcagagcacgcgcagagctgccggagcagcgcagcctgcgcgcccgacaccagcctgcgcgcttccatcaagaaggagaccaaggttctcaagaccctgtcggtgatcatgggggtcttcgtgtgttgctggctgcccttcttcatccttaactgcatggtccctttctgcagtggacaccccgaaggccctccggccggcttcccctgcgtcagtgagaccaccttcgacgtcttcgtctggttcggctgggctaactcctcactcaaccccgtcatctatgccttcaacgccgactttcagaaggtgtttgcccagctgctggggtgcagccacttctgctcccgcacgccggtggagacggtgaacatcagcaatgagctcatctcctacaaccaagacatcgtcttccacaaggaaatcgcagctgcctacatccacatgatgcccaacgccgttacccccggcaaccgggaggtggacaacgacgaggaggagggtcctttcgatcgcatgttccagatctatcagacgtccccagatggtgaccctgttgctgagtctgtctgggagctggactgcgagggggagatttctttagacaaaataacacctttcaccccgaatggattccattaaactgcattaagaaaccccctcatggatctgcataaccgcacagacattgacaagcacgcacacacacgcaaatacatgcctttccagtgctgctccctttatcatgtgtttctgtgtagtagctcgtgtgcttagaaacctcaccccattgattggtagttcgaagaattggcagaagcagttgcaataaactcagtcaaatgtacccagcctaccagagatggaccaacgatcctatgagagaagagagtatggtgctgggtccttaaaaaaaaaaatgatacttggtccttaaaaaatatgctctcccctccctttttaaacaaatggcttgttcagtcacttgtttgtgtttgaattgatttttaaacagcaggttgtgtgtgtgtgcagtgatgtggtgggagcacagctttcctgggtctggattcccgtggctttgtgcttatgtcatttcttctctctgtgctggtgggggcctctttaccatagcttaagaagtatccctgatttattctggtgtctaataaacacagattatttgta

SEQ ID NO: 378 - DNA, 155674 bp, Homo sapiens
  source 1..155674: mol_type = genomic DNA; note = NC_000016.10:c3880727-3725054 CREBBP [organism=Homo sapiens] [GeneID=1387] [chromosome=16]
tttcttttttttttaattgaggaatcaacagccgccatcttgtcgcggacccgaccggggcttcgagcgcgatctactcggccccgccggtcccgggccccacaaccgcccgcgcaccccgctccgcccggccggcccgctccgcccggccctcggcgcccgccccggcggccccgctcgcctctcggctcggcctcccggagcccggcggcggcggcggcggcagcggcggcggcggcggcggaacggggggtgggggggccgcggcggcggcggcgaccccgctcggcgcattgtttttcctcacggcggcggcggcggcgggccgcgggccgggagcggagcccggagccccctcgtcgtcgggccgcgagcgaattcattaagtggggcgcggggggggagcgaggcggcggcggcggcggcaccatgttctcggggactgcctgagccgcccggccgggcgccgtcgctgccagccgggcccgggggggcggccgggccgccggggcgcccccaccgcggagtgtcgcgctcgggaggcgggcaggggatgagggggccgcggccggcggcggcggcggcggccgggggcgggcggtgagcgctgcggggcgctgttgctgtggctgagatttggccgccgcctcccccacccggcctgcgccctccctctccctcggcgcccgcccgcccgctcgcggcccgcgctcgctcctctccctcgcagccggcagggcccccgacccccgtccgggccctcgccggcccggccgcccgtgcccggggctgttttcgcgagcaggtgaaaatggctgagaacttgctggacggaccgcccaaccccaaaagagccaaactcagctcgcccggtttctcggcgaatgacagcacaggtgaggagggggtccggggcggcgggggcccggggcgcgctgtcacccccacctgaaagagagcgtccgggggtcgtggtcgcggataccgatcgagccgggagctcggagcaggccccgcagcccgttcccctcgccccgcgcgggagggtggaagttcgtcgcaggactgtcactgggcccgagttggtcagcacacgcccggtgcactcggcctccccgcacccgatcagccctcctcgcggggaccctagtggcactccaggagggaagaagtaaagtgcagcgtgtgggtttgtttggtaatgtcctacgcatccatccgcggccgtgtccacacgcgtggccgtccagaggaatgacagcggagggtacctttgatgcttagagaaagcaagatcgcggccaaaggtagggcagtgtgttttctggattggcgacacattgaccaggctgcattcagaggacactcacagcagccgccagcttgcgagttagaaccgaagtttcttggaatgagtgagttccttggaaagatgcttagtgcttattttcaaaactccttgttttgtgtgtgtgtgtgtgtgtgtgtgtgtgcgcgcgtgtgtgtttttagtcaactagtcattccatttttcaaaacccaaacttcgttagcaagatgtcatgaaagttgctgtggtgtgtttcatttccatgtataacttcaaaagaaagttaaacagcaggtttaagttcatttgggctgcaatctccatttgagtttgtgttgctttcacagtgtagatgtacaaagaattaaggaatgtaggaattccaatttttcaaaaaaatggagcaggatactgaataaatcatctttttgtttgtttcctttcattaaacggcttccctggaaactttcttaagttatcatagctgcttaagagaagtatttagttttctattaattcagtaattctgggtcccactgcgctggttcatggtaacatgaactagttgtatttcctcttttagagctctctcctttgccgcaaaaacttgtgtgccgctgcgaacaattccatctccagcgcagcttgcatttctccagtagtcttgcagtggtagcatctgaaaatcagtttctaatgaatgagtccaaattgaattacatcgctgccttcagatttgcactagacacagctgttcaacttgtggaaatagttctgtgaccgaccactagcatattaaaaaaaactgctattgctgttgaaacaaaacctgaattttgtggcttaagtttgaatacaattcctggaatcaagttatgataagcgacgtttaatattaatgtagaagtgaaaagcgatttttaaagatcaatcataaggagattcttatctagttaaaatttgttaaacagtggggaggagtaaatgatgctcatggtatataaaaatcactaatgcttttctttttagctgataaaagttgagtttgacgttaatcttataaaatgaacttattgaagtgagaaatttggaaacagtagtttaaatgccgttgtactgcaaaacagatctccgttgcttcattaatcttgctgtgtttgagtagtcttcagttctgtgagacgtaggtcatacgtggcgagttcagctttgaagcttgtcttctgaaactggtaacctggatggctttgtagctttgctgttgttgaatgaatttgttgtagattttgtcttaaaaagggggacaattagtaacacaagacttaacaaaaaggcatgtccttatatgtacatccagctgtttccaagatggagcccaaaggttagctttttccatagtagtgtccattattggatgatcagatgcttaataagttgatcagaaaggattttccacacttaaccaccttttcccccttcctttacaattttgatccttgtaaggcacaggggctctttcgtgggaccaaaagtcagctttaaatggctccgatttaatccaaagtagaaagtcaacatcatacttaagttgggtcatgtgttacacattcatcaccatcacactattgtgaaagggtctgttagtatgggggaccaaggaagggctcattatcaagcacattaaacaaggggctgctgggcgccatggctcatgcctgtaatcccagcactttgggaggcggaggctggtggatcaacttcaggtcaggagttcaagaccagcctggccaacatggggaaaccccatctgtactcaaaatacaaaaacatagccaggcatggtgacatgcacctgtaattccagctacttgagaggctgaggcatgacaattgcttgaactcgggaggcagaggttgcagtgagccaagatcgcgccactgcactccagcctgggtaatggagtgagacgctgtctccaaaagaaacgagggacactttgtctgttgtaactgctccactaagaaattgagtaatgagatggacagagatcttagggatgtattttaaacaaataaatggcttgagtttttacattaaatacattcaaaaactgaaggcatttggttaggtgggacagacctgagaataacattcttgaggaactcaatcttattttagtgacgggatgtgtctctgaggctcccaggggaaaattgggcctagtggagcagggtgtgtgcccggtgcatgtgatcaaatttgagggaggggacctctgtctaggagctgaggggttgaaaggaggaggagcccttggcagcctgagaaacaggatctacttggactgcagtgcatgtctgtagagactggcctgtggggccaccagtgtcacttagatgtgtctgtgaagggtggcagtgagctgagagaaaaatgcacccgacattggggagctgctcagccagggtgctgctcatctgggggcatggatgttgcaaacagcactcccgaaggtcatgcagcacctcagagtgatgaatgtcactgccactgatgacaaacaagttgccgaagcctgggaagcttatgcagagatgatgcagaaatacggaatgtgctgcgaatgagggtagcaagagagaaacggtacctttcaccccactgaagcagcagccctggagaggcacagaatttgatggcctcagatgttaaagtagcattttcttgtattatgtagaagcctttacactttctcatacatgaggtcttcctttacttggcacccttacaataagtggggactttatattaccggtatatagttagttgggtgttttggaaacttctttatttaatatgtccaagttaaaatagcatattgtgtctttcaacatcagagattcatgatttaacagtataagacaaatatccaggcaagcagtagacttttgttttttgttttctgggttgtttttttttttttttttttttttttttggtcagctttattgcaaaatttgcacacaacagactgtttataaagttttttgaaattgcaggccagggtggtggctcatgcctataatcccagtgcttagggagactgagacaggaggattgcttgaggccagcagttggagaccagcctggacaacatagtgagaccccatctaaacaaaaaatttttttaattagttgggtgtaatagtacaatcctgtaatcccagctattcaggaggctgtggcaggaggatcgcttgagcccaggaggtcgaggctgcagtgagctgtgatcatgccactgcactctggcctgggtgacagagtgagaccctgtctctgggggaaaaaggaaaagaaaaactacattctgaagattgaacatagctgtgtttcatcctgtgctgtataagtggctctaagcagttgtgattacattttatgacgtgaatccttttaaatgcaatagggaagcttatttaaagaaagctggtggcgaatatggttgtcaaccaaatggtctgttatgtatgtctggtactttatgtatcagagtgcttttctccacgtcacctcagtttgatccttacagcgtcctgtgaggaagggaagatgctgttactgctattttctaggtgaggaactggacttgagaggtgatacagggtcaaaaccagatccaaactagattgttaaagtccgtagctctatatatttattttctaagtctctatctgtaaacaatgcatttacttgaatcgacccaggaacctgccaagcttagtgagtttcagtagcggccttcccgcacatgaatgagatcactaagggggaggtttgtaaccacctgtggtgggggcagccaggagtgtattcttcctcctgggttagggcgtcccccttttccctctggttctggtgttatcctcagcgtgacgtgtgtgggctcgtgttcctgtttacctcagggagaatgagaaacggttatgttaccccatcagtgagttctggctaagtaggaataaaagttgtcatagagacttttaggactaggacatttcatgaccgtgcttcgtttttgaataactgagaggggtgagagcggtggccccattcaaaggtcgtcagggatgaaggtaggcaaggacaagtcatgtgcagggcgccttagagggccttcagaagatggaaagtcgctcctggctgaacattcagatttgattctgtaaacagaattgaacataacttacaaagagactgagtcctgcagttggaagttgatgcttagattagtcgcctgtgttttcacagcttctaagtagtgtgttgtaattgtgtggcaaagtatgtgattacctggggggtccataattgctgacttgtgtttttacttgatgtatttgaaaacagttaggaaaatgattttgccaaagtgtgtcttaccttagttaagatgaaatgtaccttattgtgagtttctgaagattgcaaaagcttgtcagtttagtttttggggtcccattagtgagggcacccctctttaccttactcaaaccagctcttcacatgtattccaagaaactagagggcatgctaagaggtatttctcaacaaatggtttgtgctcagatgctgttgcttgtagctgaggaatttgactgcagactttcccagagccttggtgtcctgattgggcactgtgagagaggggctacagttggaccactctcaatcctgtttgacgctagaactctttttagcctattatgggtccgcagacttcctctgcaaagggccagagagcacgcatttggctttctgagccatatggtctcttgttgcaactactcaaggctgccatttcagcaagaaagtagccataggcgagtgggcctggctgtgttccagtaaaactctagttgtaaagactggcatctgaggacttcgcccatgggctgcaatttggtgactgatataacgtgggacttcattctctgagcacccgttggggagcactggcctaccacggctgcacagacagctttaaggaaaacagcagcagggcaagttttctgagctgcatgatgtggagcccgggagagcccaggtgagcagcaggctagcttgggtctcctgtcttggagcacttcagagcttagcagggccctctctctctgtcttttttgttcctctgtaacagttatatggatgacttgatttaaaatcagacgaatttatcagaaagcctggtgaccggttgcatttttctttgttcttttgctttttgttgaccccagtggcccacatggcatttctcgtccgtctttgtcatctcaggctctaggcttgctccccttcctgtgacaccagaaggtgagcgtcagtaagaactccagagcctttccacggccctcttcccagcacttccctccccaggggcagtgcctgacacatagtaggccctcaggaaatatttgagggaattagtgaaagaattatatagtatttgtcccttaaagttcttatcattttcttgttaaggttttactttcaagcagattgccacctatcttctaattgggtctgttatttgcttccgagttccgtacccatgggctcccacccggccaccaaaccagctggccttaggagtgctgaggccagagcatgtttggggcaagttacatcagctctctgagctcagagtttcctcatctgtaacatggagataataacaattcccatctcagggtggttatgagggtagcctgagatgatgtgtgtctggcatatccgcccaatgggaactgacactagcgttaaccagggacgttgtcgtaccttgtaagtcctaggacttactgggagtgctagtctgattggagcaagacctgtttctcagcagttctggaaaggacagaagccatgtgtgctcgtatccacagaaaccagtgtgcaggcacgcgtgtgatagtgtagcacctcagcagatacatagccgggaattctgtcatctataccattgactctgtctccattttttattgtatttttaaaaataggaacgtgatggccatgaaagcttaaaattacgaaaacttaaatggtgtgtgttctgaattattttttcttttaaatcaaatcaggatgtacactgaaaattattgataattttgaagcatatttcatggactgtttaagcagcagacaagtatgtgattctgtttgtttactgtgtataatttatcttgaggtacctgttaagcattagcagtgtacacaggattctgatagatgcctgtgagtacttagaaccatcttgagaagatgaaacctcgaggcaaaacttaaggaaagggtacagaaatgcagtcaagtgcaaaaactctggaaccagaaagggtgatctgaataaggcttcatttactccctcccctgtttcctgagtgtccccgtgtgcagaagtccagggccgcatgccccagtgggaggcaggccctgggatggttgaggagccttgggctcctgtgacagctcttctgctgagccagcacagagccaggagttggggaagcctgcctgttttccatgcattcctggttgttgggaaaagcaccctgaccatgacagtttgtttcctggggtatcgttgtaggcccatggcttgctcacatctgagtcctcttctggttgtcccgtctctcctaggctctgaagctcctggccgtgccgtctgctttttagcacatgcgctcagcgttccctttagtcctctctgaggtcttttccttgcagtgcatccctccggatacactccttgctttaactggaaaaggatgctgctcttctcagtcaggctcaaacttggctttcggcaaaattctcctattgcatgagtctttgatgcagaagtgtaagccttgggagcagtgcctgtgggggcttttgcctgttctcctttccctggggccgtgctctgctgacaggggtgctacaataggccacgagcagagtccccggggcgtcctggagtggtcaggtctttgccatttgagctgtgacttgaagagatttgagcaagggcacacaaatcaaattgggcaaggctgtgtgaaaggcatggaagtaaacaaaagtggcccctctctttttaaagttttttttattaagttcctagacaatataggcggtgactgtggctgtatttaaaatactgcctttagggtgttttctggttctaaatttaggaagcaaggctatttttgagctctgtctctaaaagttgaattccttttaaaacttacccttaagaaagatttggatattatcccgtgtgacattttccccggtgtttcatttccattaatcaaaagactgtttagttgaaccattgctaagaatagtaaaatctaatggggaaaataattctacatgattaaatctgactttactttcccatttctagttgtactgtctgctattgtttgaaaatgtcttaatttgcctttctaatatgcctgtactatattgtatacagtaggtatattttccagttgcacctaattcaacctttcgaatttgcataatctgtggtaaggagaaaaagtagttgtgtagtggagttgtacaattctgttgtaaagcaaatctttttataattcacaagctgcttctcctccccctagtttggatttttcttattaaaactgcaccacctaaacatgttttaactttatggttaaaataaccagtgaaatagaaaaataagtcactgttctgtatgataacatgtagagaaggcttgtacaacatttaaataaggagatttgggtatttgattacaaactgaatgaggacattcaggagctatagaaatttatcaggtaattagggtttgcttagacaattatagactctacgagtttgacccagttgctttggattaaaatattttgagtatttgtcacctgattaaaagtagaaccttctaactgtgagtcacagttgaaggaaatgtcagctttttatacggggaggcggtcagtgtggtgctgaggagggagccctggctcctgctcagagtagactgtgagtcccagctcccagctcggcagcgctgtgacttgggctggtgacatcacatttgagttttgcagggtggggtgtgtgtgtgtgtgtgtgtgtgtgtgtgtgtgtgagtgagagagagagagagagagagatctctaaaaggggctttttaccctgcagtattccatttgtttcttttctttctcttctctcttctttctttcttttttctttctttctttctcttttccttccttccttccttctttttttctctttctttcttttccttccttccccttccccttcccctccccttctttacattacttttcttctttccaatggggtcttgcttgcccaagctggtcttgaactcccatccttcagcaatcctgcctcggcctcctgagtagctggaattacaggtgtgagatggagccactgtgcctggctctacttctgcttactttgattatcttggtacatggggctactagggtgcctggcatatagcaggttgaggcagctgtttttattgtttaattgtatgggaaaatattagccatcacctacttcttgggccagtgaggactaagatgatgtagcctgacccggaatcaggaggcttctcactgaatacatgggaagcttctgcccctgcctgtttggctttcagtgccagctctagtgcagtttgggaaccagtttgtaagaaaacgaactaagattcgagaatcttacaaaatgggtaatcgtttgactcattttactccgtctgtgtttgcagttcaactgttttttattggaaaattgaactcttaattaaatggaactctgtttctagttattgcttcagaacaagggcttgatttagattaggacttagagaaaagggaaaagtaaatgcagagaaattataaatatagtattttattgaaaacagagttgggaagaaaatggccttgggatcactgtccagtttagtcaggttggttgaaaggaataccagtgaaactcaattgcctctcgggctcagctacacagatcttgaaaggaacagattcagctctgtgctgtactgtgtgacttttctcctcctgcagattctatagtaggaaattcttttaatggagattactgtttttctgttctcctagatttggtgtgattttttttttttataagtaaaagttaccccgtggtggacaaaatttttccccgatttgtggatatctttacttaaatctgatttacatattcagaacgtcacctttattgaaaataacaaaaagacataacatattgataggttttctgtgtcattgtggttgttcctctactactgtgggaatcggtttttgtttgaagagcacacctgcccgtagttgaacttctgttgagaagtctctgagggaatcatttgaatgatggcaagagaatcaagtgttttgctttcactgatggctttctcagtcactgaaactttaggggagaacggattctttcccaggaggaagagggtgaattgagatgtttccttgtttggggatgcctgtgttctcgggatgccctccaagccagcgctgtccagtggtcgttattgggagggcggctctacgctgtgtctatatgacacagtactggaaccacgagccacgtgtggctgttgagtacttgaattgtgattagtgtgacttaggaactaaattttaaatgttacctggtttgagtaaatgaagatagccacatgtagttagtcactacggtattggacagcacaactgtaagtacatttacttatcctctttgtctagagttttctttaagatacgtatcacctagatatttatgacaaagttcctttaaaacgatcatcttttaaagatgcaagactccaaattaaaaatgatgaaagactccttcaaaaatattcacggcttaggtcacactgttcaggattattcactaatttagaaaatatttgttatgctgtgatgtaggccctggcgatccagtggggatgtgacaggccccatctctgccctcatgggtggtgatggatactggacaggtaactgcagtcaggtgtgaccttggaggggacatactgtgcattgactgaggcaccagatggggactgagcctgttttgaagggtattggaagtccccgggggctgtgacgttagcactgacacctgagggtgaataggagatggcagatagtactgttccaggcagagggaacagcactcatagcagggtggaggtctggctcttgtgacagtttttgggttatgttcactgggctaccagaatttaggaggcctcatggttttgcttctgagatggtggagactaaaggtgtggttctgccctgcgggggttggtcggcccgggatccagtcttgactcctaccacttcattcttttattcagcaaatatttaagcacattttacgtgtggggcaccctgctgggctgtggtgatgacagtagtggcagaagctgcttctgtcctcatggaactctgagttgtgtggtgtggtgggtgagcagtcccgtggtgcccaccgtggcctatagcatttcacactcagctcgatgtctgactggaaggaagtggatgcctcaggctgggtggtcagggaggcttgttggaggaaggacaccagagctcattgagggtgagtagagcatcagcttgggcatctgaaggcgagataacatcaccaagggccttgaatgtcagacctaggagtccaggttattatttttttttagggcttataaaacaaaattaagctttaaaaaacccgtgtccagagtgattgggggagctcctgtgatttattttccagaagtctagattagctttttcaaggtgtgttttttcatccaagttcaggtctgtagggagagtagacaatgctttcccctcctgagccccgtttttggcaggaaaagggccccatgaaaagcagcttaagaactggaactagtgttcttatttaagatgttagtaaatttttgtacaaacaattttcttttaaaagtttttttaagttcttgtgagtagataatatattcatatggttcagaattccaaaaaagcagagtaattggtgaaaactcttcctcctgtctgtttctggggtcactggtcattcccctccccataggcaaccagtgttagctgtttcttacgtattctagagatggactgtgcgtagccaggcaaatatggtctcttcttactctttttgccctaagtagcccattttatgtaactctactatcagtgcctttcagactgatacatatctcagagctgttggaaatgttagtattagaaatgcaggctttgttctatttttttaaatttatttttatttattttgagacagggtctcactctgtccgccaggctggtgtgcatttatttgatcacagctcactgcaatgtccaccttctgggctcaagcaatcccacctcagcctcccaagtagctaggatgacaggtgcatgccactatgcctggctaattttttttttttttttttttttagtagagatacggggtcttcctatgttgcctaggctggtcttgagctcctgggctcaagcagtccttcaacctcagcctcccaaagtttagggattacagatgtgagccactatgctcggcccaggctttcttttaattaattaagtcttcttttttaacggtaaaatgttttggtgctgcatttagataaataacacaaaacaattttaatgttttctctatgttatataaataggaataattgaagttttcttgttttttgtttgagacggagtcttgctctgtcacttaagctgaagtgcagtggtgagattatagctcactctagcctcaaactcctgggctcaagccatcctcccacttcagcctccgcagtagcttggactacaggcacgcaccaccatgcccagataattttttattatttttgtagagacagggtcttgctatgttgcctaggcttaaagtttttttaaaattaattccatgtcatctcaaagaatattagaggttttgctactgtcatcaaaatgcatgtcatgcagccagctcacacagaagttgtgtttattgtttctcaattcctggaatagattcttaaaacttctggtttttattacccaccttaatagttgaaatagaaatatctgtaggttagcaacctacttcaacaccaagcagataaagtttcttgatgggtaggacttctaagaacattttcattaactccagaccttttcgttaatttagttaattaatgtagagattgtaaaacactgagtatgactcagaaatcctttagaaaagaaagggtaaaatcagtgaagttccttcagaagagtagctgagttccctggcattgcagatccagttgagggagagtgatgggtacttaggaggggagaaaagactgagaatcaataaacaaaggatggagagcaaaaatgataattagatctcttttaggggtagaaagatatgctaatggtgtatgtaggaaatttctagaagggaatctctagaaattgtttttcggggttgagctagagatgttttgggggctgtttttcattttatattctgagggttttttttcaaacaaagcaaaaaaccataaatgtatttactttcatagtgaaaaaagaaaaactagttaaaaaaattcaaaacaaaacattttgggggtatatatgtttttgtattgttttatttttatatttgtgattaagagaatctgttaaatggtgagaagcaaagttttagttaattcctgttgcaaaacctttagacctctaatgagaattatttgaacaaagtacaaattacccctaagaggcgccatccagagataggaaaatggattgtgttttagtgtggcgtctgatcatcacttgctttgtcacaagctccatttttaacatcatctttatattagaggtttcttcattgatttgctagaagccacaagacatgacagccaactaatttttgagtattttgaaataatgtcagatttccctgtgtgagcgttgggtacaaaatgttacatgtcgattgtcacatccctttagaaaaaaatactttcgaaaagttcttctttaaagtgcccttttcttttctagccttttaagcttatttgtacactaaatatattttgaactaatagtgaacccatttcacattttatcctcaaatcataaggaccctaactggaaactggagcactgggaaccattccaggtgttaccacctggtgctgaagttaatcacctgggccagtatatccccagtgggggtgccttaaaaaaaaatcagtttcttggccgggcgcggtgggctcacgcctgtaatccctgcactttggaaggctgagttgatggatcatgaggtcaggatatcgagaccgtcctggccaacatggtgaaaccccgtctctactaaaatacaaaaattagccgggtgtgatggcgtgcacctgtagtcccagccactcaggaggctgaggcaggagaattgcttgaacccagaaggtggaggttgcagtgagctgaggtcgcgccactacattccagcctgggcgacagatcaagactccatctcaaaaaaaaaaaaaattagttcctttaattacttaaactagtagttcattcacatggctcagaaaactcagaggacaaaacctgtagagagagcctccctccacctagctcctcccaggtaaccactggaagtagtgctgtcttccagggtttatctgtattcaggcagacgctgttgactcttagttctctcttcccccttcctgcctttttcttcttaactgaggtagcatagtgtacacacagctgcatacgtttattgtcttcttacagttgtctaccattccattatgtgacctgtgccataattgctttaatcctctccccactggtggacatttaggttatttccagtcttgtcttctcacaaacagtgctttaatgaatagccttgtaaagttatgcggacaggcaaatctatggaacagattcatagaaatagaattagtggttaaaaggcatatgcatttatagttttgatcatagcaaattttccttcaagagcctgtgtgttggtagagtcttaaaatgtgaaaggcagcacatatattctccaggtatacattgctagatgtgttgcagatattctttttttttttgagacagagtcttgctttgtcgcccaggctggagtgcattggcacgatcttggctcactgcagcctccacctctcagattcaagtgattctggtgcctcagcctcctgggattacaggcatgcactaccatgccccgctaatttttgtatttttagtaaaggaggggttttgccatgttggccaggctggcctcgaacgcctgacctcaggtgacctgcctgccttggcctcccacagtgctgggattacaggtgtgaaccaccatgcccagccacggatattctttatcagcatagtctatgatgagtaacactaaggttgttcttcagcttgtgattctccatcatgttgtgcttctcagttgtttctgaattctctcattttatggtgtacctttttattattattttgagtcagggtctcactctgtcacccaggatggagtgcagtgacgtgatcttgactcactgtagcctccatctcctgggctcaagcagtcctcccacctcagcctcctgagcagctaggactatgggcatgtgccaccatgcctggctaatttttgtacttttttttgtagagaccgggtttcgctatgttgcccaggctggtcttgaactactggacccaagcagtccccctgcctcggcttcccaaagtgccaggattataggtgtgagccaacatacctggtactggcatactttttggacttaaggcattcattttctgtttgtggctctcaaatagcccacacgcctccacgcgttgtacatggactggcacttccaagtctgctttcacgtctggaatatgctctttccccctttcttgacttcttgttgccgcctgccagctacatctcacagcatttggggcaaaggacctggtctctggatgtctgtttgcttgttcttacaatatggctggggaatctgaggtggctgggaatctggggtctggggctgcttctgcaaaggctagctcctagctcagcccccacattcttcttcctccaggactgttcttggctggagaatcctctccctgtaagcagggtggataggcagctgactgtagcacctctccggggtctggtgcccctctcagctgtggtggtggtaaacaacccgtttttgctcccctgtcccagatgattgggctaacgtgcaggggctgctgggtcattactgtgttctggtggcagctggctgctatgacaggcaccttccattccacccttgtccccacccttcagggctgagggaagcagcacgcaaaccatgttgaggaaactaacgttgtcttggctgtctgggaatggcacttccctgtgactgctaagtgcaccaaataaaaatagacttggctgcatttccaggacagtttagggtcccaggtgacaaagaactttgaataaggactgtctagggttttttgtttttgtttttgttttgagacagaatcttgctctgtcacccaggctggagtgcagtggcgcgatctcggctcacggtagcctctgcctcccgagttcagcaattctccggtgtcaccctcctaggtagctaggattacaggcacccaccaccacgctcagctaatttttgtatttttagtagagatgaggtttcaccatgttggccagacgggtcttgatctcctgacctcaggtgatcttcctgcctgggcttcctaaaatactggaattacaggcatgagctactgtgcctggccctgtcttgcttgggttttttaaatggaaggtaaatagtaatcattcagcgaagcaggatgttttttgatacctgatacagagtacagccatcaagtgcatttgagaatgaataaaaaagctaaaattttataatcaattatgcaaaagtagattttaccttttccaggtagcactcttgaatattgtattaagtgcattttgataaatcagtatttcccttctgattcacattacagtttctaaggttctgtaatttttattgcagttagtttaacctgataccatagcttgatttatttccccttaattcaaactttgaagttcatcatgtttccatgttaaatgaacttactaagcacatttccgtgtaaaagagtccccctggatggacccttctgtgacatgaagaatatttgtcctgtaatttagctttcaaataagaggcaaactctgagcagaacttcagagggaaaggacactgagaaaagacagttccaaagaggcagggacggaagacagcaaggcaggcaggcaaagctggctgctctgccgtggggagcttcaagggaaaaacttcaagatggcaggagcccctcggtaggtacgaattcgatacagtgggaagggcgtcactttggtaggtatgtggatctgatacagtaggaagaaccccactagaatgtcgtatatgaagaatggacttcttggggaaggtcgttgttaatgtccacttaaatatcgttcatcatacaaaacacagcatatgacaggaaaacaagaaaacccaaattctaagctctagtataaatgtaagtgctgtgttgagggttttaagacaattcggtttattaaacccaaatttaataacccgagattgtgtcactgcactccagcctgggcgacagagcaagcctgcctaccgtagtgaggcccttcccaccgtatggaacttgtacctaccctggggctcctgccatcttggagcttttcccttgaagttccccacagcagagcagccatctctgcctgcctgtcttgctgtcttctgtccctgcctctttggagttgtcagtgtccttttcctctaaacttctgctcagagcctcttatttgaagcctttcctacttttgttcactgccttattccacttggctgtaaaatatgacatacgtgttaatttaagtttgtggcttggtgtccattggctgtcttcctcaattagagtacagtcctctggggaggccgacttctattctatctcaaacccagccggtcctgcaccgagtgagggcccctgagcagtgactcgcttccttctcctggggaggagagggtgggggctgccggccgagctctctggctcttcagcagatcagtgattctgaggaggggcaagacttactcaagataagatcactgttcagaatgaagtacaacctcattgttctgttctaattagggattggtgtgtctgcataaaagaagcctgaattacggaagattttagaaggaggttgctttaattatttcctaatagtcattgtaaaaaaaaaaaaaaaagttagatgtcttttgggaacttgtttaaatgcctagataaaaattacttacgatggcataaatattaataaaacagcttttctctttcttttttttttttttttttggtatagagagttgttccattatatttatttgcataatccccaagaactttcaaagcaaagtaacctttaattctactagaattgccacagatcagcagggatgagtttattagcaagtcactaccattgataagtggcggctgttgagcgcctgctctgtaccaaccctggagtgccaggttcttaaaggctttggctggttcagccctcataggtgccttgggagatgggattgggacagtgatagtaatgactaatattttttgagtccttactgcatgccaagctcagtgctaaatgctgtatggtttaattctttcatcaacgatcctgcgaagcaggtgctactgtcctttattttattttatttatttatttttttgggacagagttttgcccttgttgcccaggctggagtgcaatggcgcgatctcggctcactgcaacctcccagtgattctcctgcctcagcttcccgagtagctggggttataggcacctgccaccacgcccagctaattttttgtaattttcagtatttttagtagagacagggtttcaccatgttggctaggctggtttcgaactcctgaccataggtgacccacctgtctgcctcccaaagtgctgggattacaggcatgagccactgcacccagctgtccttccattttagagctaaggaggggtacacagggaggcagtagctgtggtgacagctgtgatctgaaccagggcttggttgagtactcttctcactacaccagactgcacttcctgtgtccgtagtgtctaattagtaatagatcagtaaacacaccgagagcgtagtgtggcctccaggtcatttaacaataataataacaacactgtgaatccttccaccactctctagattcctcatctctaggagtgaacttttccaggatgctttgcccttgctggatcaagttttttgtatgtagtttttttccttcaaattttgttttaattaacaaataaaaattgtatgtatttatcatatacaacatgatgttttgaaatatctatacattgtggattggctaaattgagccaattaacatgtgcattacctcttcctgtgtccgttaacttagaaattaaaaattctttttggagccacagtggcacatgccagcagtcttggctacttgggaggctgaggcaggaggattgcttgagtccaggagtttaggagtttgaggctacagtgagccatgatcacacttgtgaatggccactgcactccagcctgggcaacacagaccccatctcttaaaaaaaattccttttggaagtttttcgagggtaggtaaataggtgaataaaaatgtttagcttttgaaagatttaatagaagcatttgagtagtcagggctatagtacaagtctgaggatgtagggaaaaatcaggtttctcctatactcctttattcctatactcagtgtcaacagtcgacacagaacacctctgggaccagatttgtggagatgcccccagccacacacacacaccgagtaggcactcggtgctgcagcagacgccagctgacaggcagatggtgtcagatcccacggttgagggctcagtcctcaagactgcccccgccccccaccatttgcaagccccaagttgttttacctgtgcttctgactggctataaatggggttcccacaagcccctccttgggttcaattaatttactagagcggttgacagagctcaaggaaacatgtttactggttttttattgtaaaggatattatgaaggataccactgaatatcaggtgatagggcaaggcgtgtgagagggccatgtagcctttttgccccgtccaggtgtgccactcttcaggaacctccatgtgttcagctatctggaagctctctgaaccctgtacttgtgagtttttatggaggcttcattacataggcatgattgattaaaccattggccgttggtgatcaacttaagctttagtatctctcccttccctggaaattaaggatgggctgaaagtcccagtcctctaatcagtcatgccttggtcttcctggtgaccagctcctgtccgaagctacctaggagctgccagccatcagtcaattcgtgagcatacgaaaagacattactggttgggtgtggtggctcacacctataatcccagcaatttgtgaggccgaggcggatggatcacctgaggttgggagttctagaccattctggccaacatggtgaaaccccgtctctgctgaaaatacaaaaaattagccgggtgtggtggtatgcgcctgtaatcccagctacttgggaggctgaggcagaagaattgtttgaatccgggaagtagaggctgcagtgagccaagatcgtgccactgcactctagcctaggcgacagagccaaaaaaaaataaaaataaaaaaataaaaaataaaaattctattttggagattccaaggattttaggagttgtatgccaggagacagggtggaagaccaaatacatagtcacagtattacaaaagtaatgcaaaagacaatctaaagaaaccatgaaaaaaaaatctaaagaaaggagacctttttcacaggaaatagggatgtgagagagaaattaggagtgggtgaggaagagaaaatatgtgtgggagggaaagcagagaagtatgaacacatcacaaaacagcatctgaactcttacatgcttatttcttacactactgttgctcatcctacattatgccatttaatctgtgtatcaattctagggttggggttcattgatgctgagtttgtagccaaagagtgaaatatacttgggtggtcccctaaaaggtaaagagggcaataggaaaaagtcttaaagagaaagatgacccagtgtaatatttctagagaattcgttattgtttctgttttcagaaagtagtagtaaacattaagattactgctttatatctttgactagacaagcagcttgttgatactgtgtatcctctataatgtgagcactcattcagcacgtgggtttattgagtgcctagtacatacgaagcattttatgctaggcactgagtagataagcaagacaggatccctgctttcagggagcttacagccccacgcacgttataacgtgaaattgttagcataattttaacgcattgtgtctgtaggagcataaaagagttcttatttccaggagaaggtgtgatagaccagtcctgtcagtacaaataatctggggctccaagtggaattcaaagaagaaaataaggtattatggaagaggaggctgtagaaaacctgaagaaaggtgtgttttgtggatactttggctgatggctttgaaatttttttcagatgaggctgttttcaaatgttattggctgcacagattgatttagccacccacctggtgtttgattctagtagttcattccttgcttaaggtgaaatgctgatttctgatcatcattattaagaatggatcctggaacagatgtaggtaccatttgtctttcagtgtttaggagtgatccccacctaacagtctgcatgcagaccaccggcttgggtttcctagtatagaagtgaatgtcctctgtaccttgcttggtaaacagttgcctttcctgaggctggctgagtttggctgtaactttctccttcctaagtccctactattttcctcattcctcactgggtcttcccagcctcgtatgagtgtgatagaaatggggaaatgtgtagcctctcttttctctcatttcagcttaatgaaaggggtagcctcctggttggcagccaggaagctgcaaaagggaaaattcctttccctagctatggaagtatgacaggcagtgttcgctatttgatatcggctggtgaagtttccttgaggtgcaaatgctctgggtgcagggtgcccacagtctccttttctttgcattctcccgggccccctggtaacggtcagagagaagagggcttacctgggactggatcgctgtcaatcgtgaaccttaggaacttccgatgatacagattgctcttgcttaacccatgtgttgggacactttggtgtgtagaaagcaaagctgtgttgtgttgcaatatcctggcctgcctccttcactcccctttgtcagttttgctgaactagggaatatggaaatgtggtgacagtggtaaacagaagggtgatggtacgactacgtgtgcgccctatcttgccttttaaaaagccacacctgtatatttggttttacacatattcatatggtgaattacagaagaagaatttgtctaactctgccttcacccaaacagctggtatatgtatttggactgaaataggatgaaaaagtggtcacggtggtcagagtgtagcagaccagtgaaaaacaaaaacactagcccaggacataagccctgcttacaactttgaaacttgcctgtgaatttgataagaactagaataaaccataaatgaaaactgatagctctgagagtggcaggatgatgggtgaagtttttaactctggggcgttggtacccttgttttacaggtgagggtatgaagatgcagagatgaagcagtttgcctaaggatgcaggatttcaactcctgtgctcagcttccagctgttctgttcccattgttctacactgaggccagccctgccctgggtttcactaagtactctctgagtttatctgctcttctgtggcctggcctccctctcctaggaagagtgcttagggatgttcaaaatagccagttaggtcgccttttgcagatttttccaaacttaaatataaaatatttggcccttgtttgcttctgggttacagtgcttgacacggtctcttcatcctcgccctggacagaaaggaaggagagctgatctctaatggtaatggctccagttcctggtttagatgaagtttcattttcatgctcatcagttaaggaacactgcatttttaaaagtagttattttgggctgcagtggctcatgcctgtaatcccagtgctttgggagactgaagtaggagtatttcttgaggccaggagtttgagaccagcctgggcaacatagcaagaccccatctctacaaaaaaaaatttttttaattagctggcaagcctgggaaacatggcgaaaccctgtctctccaaaacagtacaaaaatcaggtgggtgttttggtgcagggcggaagctgcattgagcctgcaacttcactgcactccagcctgggtgccggagcaagaccctgtcaaaataattatttaattaattcattaattaaaaataaaataaaaaatgagctgtttgtggtggggcacacctgtggtcccagctatagggggctgaagcgggagaattggttgagtccaggagtttgaggatacagtgagctgtgattgtgccattgcacagaggtgacagagcaagaccctatctctaaaacataaaataaaaaataaaatgttgttatttgggggggtacatattttcttttttccttttatttgtagttgacatgtgattgtatatattaaggggttacagaatattttgtaacatgcatgcaatgcataatgagcaaatcatagtaattaggatatctaccacctcaaacgtttatcatttgggttggacaaaaatatttattaaggagtaccgagtaaatttgtgtgtgcaggtggacaaagcctggagggcaacaaacaaaacagtagttatgatagagaggactttttaatacatatttaataaatattgtacagtttgtgtctggacacctcagtgaatctccaaatttaggatagcaaaatagcgtaaaaactatggattggaaccctcagaagcatgttgagacctatttcaccaggtacaggccctgtgccctcatggaactgtctgctgtatccgggatcagattcctttctcttcaaaatgacatgccctgtaaccatgaggaggtaccccaaattgaaggaccttctacaataacaactggcctctattcttcaaaaatgtcagttatggccgggtgcaatggctcacgcctgtaatcctagcactttgggaggcttaggcgggcggatcacctgaggtcagaagttcgaaaccagcctggccaacgtggcgaaaccccgtctctactaaaaatacaaacgttagccgggtgcggtggtgcacgcctgtaatcccagctattctggctgaggttggagaattgcttgaacccgggaggcaaaggttgcagtgagcctggatcgtgccactgcactccatctagcgtgggcaacagagcaagactctgtctaataaacaaataagaataaaatgtcacttacgaaagacaaaggccagggaacctttgatcctttttcgattaaacaaggtgacaaagacatgacaattaaatgcaccatgatcctgaattagatcttggatcttgtaatctcatggctataggacatgtcattttgaagagacagatgtgtgataaagatcattattgggacaaccagcaaaatttgagtaagggcagtatattcagtattgtatcagtgttacatttcctgagttgcacatgcatactgtgattatgtaagaggatgttgttaggagatacgtactgaagtacttaggagaacagtgttatttcgtctgcaacttactctcagtctcggtttttcttcaaaaactgttacatgcatgtacacactcctaaatcacatctcattccttacagacaggtgggaagataacaagtgtgtgttagacgtggttttctagactgacaagagggactggtctgttctgcaggggcagcccaaagaaagtcttcatagttgctgtgtttaatctgagtgggaactgaggtgagttttagaatgagagattcaagaagaaagattcccaatgcctgtgccagctctcagtgttgtggctggaaagtagggggcatctggtgttgtcctgtaaaggaaggccaagaagatagcctcacgtgccatgagaaggtgtttgaacttcttccatagacatgatgggtctgttagggttagggtgaggttaaactccagctaaaatggcttaagtgatagtaagtgtattttctcacataacatgaagtttgaaggtggggaagtactagggttgcatcactcagcagttcagagatgatctccccaccccaggtgtttatgtttttggctacagccatccttagcatgcaagtggtgtctgctctcctggctacagggtgattgtcacctgcccatgacgagatctggtgaagaagaggagggagatttctttctgagcatccattgctgtgaggaaggaacaccttttccacaatggtcctggttcagtgtaccttcagattcccttagctgagattgtgtcacttgcaaaggggaacgtgatcgtggtggtgggcttatctggttactctccctcctgtggccagggaacgttcctcagaggaacctcccaggcagccacttcagatcatgtgggtgttgccagcagcatggggccaggggtattgggtgagcagacattagggtctgccaccatgcagaaaaaaggttttaattttcttttctttttcgtgtgtgtgtgtgtgtgtgtgtttgtttgtttgtttgtttgtttttgagacggagtttcgctcttgttgcccaggctggagtgcaatggcgatatctcagttcactgcaacttccacctcccaggttcaagcgactctcctgcctcagcctctcgagtagctgcaattacaggcgcctgccaccacgcccagctcatttttgtgtttttagtagagatagggcttcgccatattagccaggctggtcttgaactcctgacctcagatcgtctgcctgccttggcctcccaaagtgctgggattacaggcatgagctaccgtgcctggccgatgtatggtgttttttgtttgtttgtttttttgagatggagtctcactctgtttcccaggctgtcatccaggctggagtgcagtggcgcaatcttggctcactgcaagctctgcctcctgggttcacgccattctcctgcctcagcctccagagtagctgggactacaggtgcctgccaccacacctggctgattttttatatttttagtagagacagggtttcaccgtgttagccaggatggtctcaatctcctgacctcgtgatccgcctaccttggcctcccaaagtgctgggattacaggcgtgagccaccgcacccggcctgatgttttaaagtattatacagccgcttattaaacctcctgttatggatagcagtaataataatagacagtacttagcatttaccacccataggcactgtttgttctcagtcgtgttttacacttacttattcatttggtcctcacaacagcgttatgaggtgtaggggccattgttacccctagtttccagatgaggaaactgaggcaaagaaaggctgagtaacctaccaaggtcacatcactaatgaatagggagctggaggcagagctggtgtccagtgtgggcagccccagtatagagtctgtaaccactaggaaaaactgcctctgggtattttttgtgctttttttttttttttggatgctacagataatactaagatgaacatatttctacatacttcttccttgcacatacatgaatagcctggccgttgtgggttagagtgcgtgggaaatgagagggtagagatgacatgtgtagaccacgcttcagagaaaagttactttgaaagggaccagaaaaagggttgttttagttcccatttgtttccttatcaggaaagacggattattttgtttagtgttttatttccctttggggtgaagacctgcttatgtcttttgtccatttatagtcgggagtcactgtgcttctcatcttcctgtatgattgacatttacccctttcatatactacaaatacttttaggctcttatttttaactctttgtagtttctgtgtatgtctttattatcatttgctgcagcttcaacacttttaagaaatcactgatttcattttgcgttaaagctagtttacttcttgtattttaacttttaaataatgtaatcggccgggcacggtggctcacacctgtaatcccagcactttgggaggctgaggcctcccatggatcatgaggtcaggagatcgagaccatcctggctaatacggtgaaaccccgtctctactaaaaatacaaaaaattagccgggcatggtggtgggcgcctataatcccagctacttgggaggctgaggcaggacagtggcgtgaacccgggaggcggaccttgcagtgagccgagatcacgccactgcactccatccagcctgggccgcagagcgagactctgtctcaaaaaaaaaaaaaaaaaaaaaaaaacaaatttaagattggctttactgtcctcaaattgctgttcatctaagtcaatgcccagttactttgttacacacatacattcttttttttttttttttttttttttttttttttttttttttgagatggagtctcgctgttgcccaggttggagtgcagtggcacgatctcagctcactgcaagctccgcctcccaggttcacgccattctcctgcctaagcctcctgagtagctgggattacaggcgcccgccaccatgcccggctaatgttttgtctttttttttttttttttttgagacggagtctcgctctgtcgcccaggtcggactgcggactgcagtggcgcaatctcggctcactgcaagctccgcttcccgggttcacgccattctcctgcctcagcctcccgagtagctgggactacaggcgcccgccaccgcgcccggctaattttttgtctttttactagagacggggtttcaccgtgttagccaggatggtctcgctctcctgacctcgtgatccgcctgcctcagcctcccaaagtgctgggattacaggcttgagccaccatgcccggccacacatacattcttaaaagcattttaaaattataattcagtgaatttggagtcttcccattgttttcttttaatttgtatatctgagtttgccctcaacaccacactatttaattattgttttagaatatgataaatatagtagggctgtccttctcatctctgtttaacttttctgtcttcagaatttgaagggtattttttctttattttcccaaacaaacttgtaaatcattttgacattactctttttttttttttttttttaattttttttttttttttgagacggtgtttcggtcttgttgcccaggctggagtgcaatggcgtgatcttggctcaccgcatcctccacctcccgggttcaagctattctcctgccttagcctcccgagtagctgggattacaggcatgcgctaccacacccagctaatgacatgactcttaagacatgctagtgttcgtgctgaatgccccattaggttaagatcatagaaacgtggcagttggagagctgtaaaggttgcttagtttctcatttccatttctgtttaatttctagattttggatcattgtttgacttggaaaatgatcttcctgatgagctgatacccaatggaggagaattaggccttttaaacagtgggaaccttgttccagatgctgcttccaaacataaacaactgtcggagcttctacgaggaggcagcggctctagtatcaacccaggaataggaaatgtgagcgccagcagccccgtgcagcagggcctgggtggccaggctcaagggcagccgaacagtgctaacatggccagcctcagtgccatgggcaagagccctctgagccagggagattcttcagcccccagcctgcctaaacaggcagccagcacctctgggcccacccccgctgcctcccaagcactgaatccgcaagcacaaaagcaagtggggctggcgactagcagccctgccacgtcacagactggacctggtatctgcatgaatgctaactttaaccagacccacccaggcctcctcaatagtaactctggccatagcttaattaatcaggcttcacaagggcaggcgcaagtcatgaatggatctcttggggctgctggcagaggaaggggagctggaatgccgtaccctactccagccatgcagggcgcctcgagcagcgtgctggctgagaccctaacgcaggtttccccgcaaatgactggtcacgcgggactgaacaccgcacaggcaggaggcatggccaaggtaagtgaactgaagcactttcaatacttcctacctaaccgcgggctttccctccgagtaatgcgtaaaatgggaccacgtggcccactcctgtttttcctcttgggctctccacgtgccactcatgcttggaagagacagatttctttctaggataaagatctctgccccatttctgtctttaaaatgagaattcttaaagaagtaggacagcttgcaggtcaggcagttggaaagtacagggcctaatgtgtccgtgaacctggtagaggttgctttctgcctgtgtactgcccactgaggaggtgatcactggtctgtatgctcctctgtggccatccagtgaagtatctgttggcacagtatccatttcactgaatgagaaagctgtgttccagggttgtcagctcactccctgctatgttaacaaggaagaggtggcagagccggggagaagcacaggcattcgggtcccagaggaaacaccagtgcagtggttcttcaagtggggtcccctggaccagcagcagcagcagcatcccctagaagcttgttagaaatgcagacttctttattgactcagaagctcggcgtggggcctgggctttaagaagcctccagatgggtgctggacacagtgactcacgcctgtgatcccagcactttgggaggccaaggtgggtggatagctcaactctaggagtttgagaccagcctgggcaatgtggcgaaaccctgtctcttggaaaaaaaaaaaaaaaaaaaaaaaaagcagcagcctccaggtggctccaaggtcacgcacatcacacacacacacacacacacacacacacacacacacacacacacacacacacacacacacacacacacacacacacacacacacacacacacacacacacacacacacacggccaagagctctgctagggaaaggcctggactgggatttgcagccaccagccttgcagctgccttctagagtaggaactggacttggagaagggggaaggcagatgcctggatagatgtgagacagctggaaaagcccaggactgacaggagcacagagaaggaagggcagcctattcccactgaagtgacaaacactgtggatgctctgcggccagaggcttctcaacagcagccaccaggcacgtcttcaggcagtggaattcagcacatcccagaacagaaaatcagtttgggctgttctttggatttgtttagtcccaagtaggggtgagggagaataagagtagaacacagtttccccagaaggttgatgagagcgttgggtgacggatgcaaaaccctgtgaatgtcggaaacgagaggatttttttttaacttaagaaatgaagatgaagtaatgctcaatgtttaaattgcatttgtcttttttgaaatgttagtagagaggaacgtgaacttaagttttacttgtacctggcattttaagaagagtctgtatgagtgtgtcaattgagaaggaatttctcatgggtttatggttcctggagagattgatccttgttccttttcccagttcattcatcactctactccttacttttaaaactctgtctattctggagagtttaaatcatatgaagtcgacataatagtataaagcaatgattcccaaacttttttttaatctcaagactcctgaataatcttaacaattactgaggaccccaaagagatttctttaacatgtgcagtatacctctcaatatttactatattaaatagtaaaacagaatattgaaacacatttcatcatccgtccagtgcagtggaatcacacatcacaaagtaactagaaaactagatctactgtgttcttgggagagaatcagagggaaaaggcaaatcatatcttaggattttatggaaatagttttgacatcatggtccccctgaaaggtctgggaccctggactgcacttcaagagcttttgataacatgtatgtagaagttagactttgtacacctaaacacaaagccattatcacatgttaacagatttaacagtaacttcatgtcagccagtatccacagaatagtcacgtttccagtggtctcatatgttgtaattttttttttttttttctgagatggagtttcactgttgcccagtgtctggagtgcagtggcaccatctgggctcactgcaacctccgcctcctgggttcaagtgattgtcctgcctcagcctcctgagtagctgggattacaggcgcgtgccactgctcccggctaactttttatatttttattagagacggagtttcaccatgttggccaagctggtctcgaactcctgacctcaagcgagccacctgcctctgcctcccaaaatgctgggattacaggcgtgagccaccacgcccggcctataagtagtttttatagatttttactcaaaatctacatttcagttagttgatatgcctcttaagaatctgttctctgttggtctgtgggatccttacaatttactgaagaaacatgttttggttgttgtctgctatttatcctggagagtgtcttccagaagttggactttgctgattacacctgtaacacttcatgcttctctgtccacccaggcttttcattccatcctggggttcctttatacagagtggtctttctttccaacagcaactcgtggatgtcactggaaagtgagcctcgttagcgtgctggggacagttgtctcttgtttcctataggtatctcaaagcagcccactagaggtggatagagtgcatttttttaaagatgtgtcgttgcctttgggtggaatgaaagaccaagtagtggtgggcagaaagtaagagggagagacaagtccattttaaaccattccctctctagaaccttacgatagcagagccaactagattttaagatgcacagggaaaaggcgctttttttaagataattttgttttaagaacgattacacaggaagtatatcctatgaaataattaaaatagtaggaaaagagcaacatcctccttacagataaagatttaaaatacataatgaaaccagactacataagcaccttactgttttacttggcagtgtaccttagatggcctctgtgacactgcacagagatttttttttcttactgatagcaaagtattccattatatgatacatcataatttattgatctcatcctctgaggatgaacatttggattgtttctgactttttgctagtgcagcaatgcctgtacacatgtgtcatggattagattctgaaaaggagaattaatgggtcacagacttgtttaaagtttgtttttagaaagtaaacatgcacatggtttaacgacaaacaaccataaaaatactcttaagagtaagaaccagagagttaattcttaattcttgaattttggttctcccaaattctcaccaaaggcaactattatttcttatctgtcctgccagtgatgatgtatgcgtatagaggcgtagagagaggggtgtgggtatgtgtgtgctatctccccagacataaagagtagcattacacagcgttttcttgtgagtgtagatgttcccctccccacccaccacttaacaatacaagttggaaattcttccatgctccgcgtagctgtcagtcattcttcataggtacaataggaattcctgatttgggtatatcgtaatttaaggacttgtgccatgtaggctgagcatttaggttattcccagtattttgctgttttcacagttttgctttgaacacattgtacatatatctttgtacagctgagtgaccatatctgctagataatttattggacatgcaatttctgaattaaaagatactgagattttaaatcagcatagataatctcagatactcttcagaaatattgtgcaaattacaccttcatcaagagtgattgagcctctgtccaaatcttgaccaacactgaatattaccatccttttacttacttgacattctgttaagcaagttgtcttctttgttaagtgtgtcttttcataaggtcataggcagttgtattttactgattgttcataatctttgtccatttgtctcttgaattgtttgtcattttttctcattaatttatattcttaagtctcttaaaacatgtttttcccctttgttatttgccatagtctgtttcaccaggaatatggtcacataggtttacaatatgtttttaccaagtatatgttttcagtttgtatagaaacacatttatccatttatttcctttatggcttttaggttttatgtcacattttagaagtgcttttcctattaaaaaattaagaaatattttcctgtatttttctccttattacatgacttttttttttttttttttttttgagatagggtctcagtttgttgcccaggctagagtgcagtagcatgatctcagctcactgcaacctctgcctcctggtctcaggtgatccgcctgcctcagcctccccagtagctgggactacaggcgcgcatcaccacaactgactaatttttgtatttttttgtggagacggggttttgccatgttgcccaggctggtcctgaactcctgagctcaagcgatccacccacctcagcctcccaaactgctgggattgcaggcgtgagccaccgtgtctggcctccttgaatctttaactcaatttattttggcataaggagtgagacacagagatccagcagtatatattttttcttgttataatcatcttagtaccatttatttagtattggtaatccatcttttctcccactgatacgatatgctgtttttggtatacactttattctcttttcaaacatataggatttgggtctaatttctgaactctttttctttagttccattgacctttgcttgttcctgtgccagaaacctattaacctagctgtgtgatgacttttagtatatgacctcactagttatttctcacacaggtggttctcaactctgtctacactttatcagatttatctggagaatttttaaaaatatgatgcctgaaccccactacagagcaattgagttagaatctgggggatatggtagaaacattcgtatagtgtgtagttcctcagatgactttcatggcagccagggttgagaaccccactgtgttagataaatttaggactttttttcaaattttaaaaacaaaaaatctttgggattttggatttataagattcactacaactttataagtcattttaggagggatgtgacattttaacagttttgtgacttcctgagtcttcttatacatataaattatcttttctgggggtcttatgttgcttggaagcatagtatggttttctttatctgtgtaataaatctttcttactaagtttatttctggaggtattacgtggtttttgttgctgttggtgatgagttatatttcattatctaactggctattttaatataggaaagatgttatgtatacgctactctggtaatctggctgctttatggggttatcttaattattctaatacgttttcaggagattctcttgagttttccaaggagatagtcatcttttgcattattgatacttttattttctccttgccaatattttttgccagtgtttatgctcttaggcatccctgtctcgtatcctacttaaatggaagtgtatttagtgttctgttattaagaataatgtgagctttggtttgtagtcagtagtatatttcttttaaaattggggcataatctgttcgtcataaaataaatgataatatctaaatgttaggttttatcaaatttctttttgatacctacctatgttgattaacctgtgatttttcactttccatttatttatgtgacagattatctgtgtaggttttataatatcaaattgaaccatctctgtaattgtaaaatcaaaagttaatgctgagttttaattgctagtgcttcatttagaattttgtttctcatttatcagtgatgaaattgatccatagctctttttgtgctttgtcaatttttatatcagtgttacgttaacttggtcaaaaagagtttgaaagtcttttttttttttttttttttttttttgagacggagtctcgctctgtcgcccaggctggagtgcagtggcgggatctcggctcactgcaagctccgcctcccgggttcacgccattctcctgcctcagcctcccaagtagctgggactacaggcgcccgccactacgcccggctaattttttgtatttttagtagagacggggtttcaccgttttagccgggatggtctcgatctcctgacctcgtgatccgcccgcctcggcctcccaaagtgctgggattacaggcgtgagccaccgcgcccggccgaaagtctttcatatttattctgtgaaacagtttaaatcgatttggaattatctattacatgaagaattgagagacttcacccttacagtgatgtgggcctgaagcctttttttccctaggaagtgactgaagatctttgacaatagtgccgggcgtggtggctcacacctgtaattccaacactttaggaggctgaggtgggaggattgcttgagcccaggagttcaagaccagcctgtgaacatagggagaccctatctttaaaaaaaatttaagaattagctggtcatggtggcacatgtctgtggtctcagctactcaggaggctgaagcaggtggattgcttgagcccaggagtgcaaagttgcagtgagccatgatcacaccactacaatcaagcataccaacagagtgagattctgactcaaaaaaaaaaaaaaaatctttgacaactttattgctattttctataaatattggctcttttaggcttttagtagtctcttaggtcagtatcgtttttatttagtaaagtctaaatttgctttgattttgagaaaaactaaaagatacttaacttttaatctttgtttaaaaaaaggataggaggtaggcaagtcacatgttacagattaagaagtggaggctgccagtgagtggcagaaccaggcttgcatccacacggtctggccagaggcctgttaacactaatgcaatgcagcctgttctttcgtaagttttacagtttctgttttagtagaaaattcttttcatctaatctttaaaatttgttaacttaaagctgtgcaaaaatgtgtgcagttctttgtcatttttgatgtttgtgattatttctcttctcattcctaattttttttttttttttttttttttttttgagatgggagtttcgctctttttgcctaggctggaatgcagtggcatgatctcagctcactgcaacccctgcctcccaggttcaagcgattctcctgcctcagcctcctgagtatctgggattacaggcgcccgccaccacgcccggctaattttttgtatttttagtagagacggggtttcaccatgttggccaggctggttttgaactcctgacctcaggtgatctgcccacctcagcctcccaaagtgctgaggttacaggcatgagccaccgtgcactgccatctcatttctaattttatgtgactctgaaaatatttacagtaggaaaaacatgacccttgttgacaacatggcaatattaacaatacatgatattactatttttttcttttgtttacttttgtgatagaaggcatgataagagttttttaaagaaaaaacaatttctttatttcaacagtagcaaaacttaacatttcgtcttatgaggggagcatgttcttgttttctactgaaaataactcatacacttgtcctctagaaagaaagcaaaaaagaccaatttaggtaggatttagaagccgtacagacactctctttcctggctacgggtgttgagagatgttgcttgacacagagatgacagaaggaagccagaagctggtagaaagaggaaggtgtaatttcgggtcaaggggtccggaggcattctgattttaaggttgataagaatttgtttttgtgaccttagaaatcttttaagtactttcttttaactaacaaatctgaaacgtgaccaaaatagtttgtatggtaatccatcttcatagggggtcagattagggcttattttttgaataaagtttttggaatattcgtcttttttagaaagtggtcagaaaaccccggggttgatttttgactggaggtgttcctggagtaaaagttttaaattagatcagctcccagtactcagtcagccatcattttggtcagatactataaagcagtgattcccaaacttgaatattcagcagagtcactgcaggcttgtcaagacagatttctgcctccaacttaccaagtttctgattcagcagattttggttgggacctgagaatttacatttctaaccagctcaccggtgaccgtaattgtggtggtcagggaccacactctgagaatctgtgctctaaaggaatggattagcagaatatagtcagtaaagaattaatagaaccaagttggctaagaaatgactaatctaccttctctattttgggtagattattggaaatctctaatattatttatttattttgagacaaggcctcactctgtcacccaggctagagtacagtggcgttatcatggctccctgcagcctcgaactcctgggctcaagcagtgctccagtctcagcctcctaagtagctggtactataggtgtgcaccatcatgcctggctaatttttttgattttttttaaaaaattgattctcttatatacacctttatttgtactaaaaattgtaaaaagagcacaaagtttcctcttattgcaacccaaatttttcttattattacgctgtagccaaactacccaatgctttctttacccacaagtgactttgcttcaaattctcggtgttgggtttcatctcactggctttgggcttctaaaacacatggggatgcttatgtcctcttggcttcgagtcaaattaagcagtagagctgaagtatactgaagttattcagatacgttcaaactacacagaccccttatacatcactagtatcatggtagaaaggaaaagatacaagaaaaatacatcctagaactcattatcaaaatttttgatatatagtctattgtagcataaggtagctttctcaacctgctacataaaattaccagcaagaaaaaaaagtacaagaataaggtttatggctgaagtggctcagtgttgtaattccctattctagcactctcaaaagtaccccatctgttacacatgcagaaactgcagcagcatctgaaatgtccacttcttgattcattctgaactcccttaagcccagtgtttgttagttctcgttcaagtctaggaactctgccgagtaacaggtatctcaattttgccatcctttctttctgcatagacaggagtgttcttaaatcttctcctgtaaagcaagtcatctctgatttccctgaggatcattgctcccgtatactgttgttggggtgagccttctggtagaggggaagagaatttggtactagggttgatagtcaagttactaaggttctttatcaacatctcagagcagaagttttgagaggcccctgaatcgtcctgggaattttcttcagtgagcatttttgaagactgggaccagggttggattaaacttttgtgatgggtccattgtgtctcaacacaacactgagcttctcctggatctttgaaacccagcagaaactgttgctggactctcaaattgccacaaggtagaccagaaagagcctgaaaacccgaactccaaccatctttttctttcctttttaatgcagacatggtgttgctatgttgcctgggctggtcttgaactgaactcaagccgactgccgtcttggctgcccaaagtgctgggattacaagtgtgaaactatcatgcctggctggaatttctaatatttaatagcaagagaaataatactgtacatttgtctgttgcttttcactttttcacgtgaagtcatctgattcttaacacaaagaaataagggaattttatattaagcatatcttaatttggcctcttaaaagatcacaacaaaaatagtttgtagaatgaaactatgtagtgccatgaattaatacagggtaatgtgggatgtatataattcctgtgggcacagctgtttagtagacatgttaagtagcctaggactggctcagggatcttattatgactctaatgagagatgatcataggtgtcctatagaatgtatgattcaggatgtacctaccttcccatgataattaatcatgaatttcttttttcttttcttttcttttctctttctttctctcactcttcctctctctctttccttctctttctttctttcctttctttcttttccattcctttccttttccttccttccttcccttccttccctttcctcccttcctttccttccctcccttccctccccctccccctcccctccccttcccttccttcctttttctttctttctttccccatagtttcactcttgttgtctaggtgggagtgcaatggcgtgatctcggctcactgcaacctctgcctcttgggttccagcaattttcctgcctcagcctcctgagtagctgggattacaggcatgcgccagcatgcccagctaattttttgtattttcagtagagacagggtttcaccatgttggccaggctagtgttgaactcctgacctcaggtgatccgcctgcctcagcctcccaaagtgctgggattacagacatgagccacctcacccagccttatgaatttcttttttaaactttttaatttaatgagattgcatatgtatattaaatggattgacacgcacatagtagttagtgtacttactgcagcagcagtagtaatagcggcagctcagactgccttctgcagatgtagtggctaattgctttcaagcctggcgtgggctctggaataagctgactcagttcacatccagggttcactaattattagctatgggaaacttatttaatctctctgggttttagtttttttggcttttaaatgaggataatagtagctgccattgagaattgttctatcaattaaaaatggataataatctctatcttacagaatcgcatgccaattaaatgagatggtgtatgtaacattcttagtatatgcataggtttactgaaaaccttccagagaatattgagtagtgaactagcgaggtgctgtgccacataaaatatttgagatagccacacaacatttgaagtgataatgagactgcttttctaatgttttccgaaaacattttttggtagtgaaagtagctgttgagcttggtggctcattcttgtgatcccagctacttgggaggcggaggtgggaggattgctttaggccaggaatttgacaccagcccgggcaacagatcaaaatcctatatcaacttttaaaaagttgatgtttgttatacaaaattagcacagaaatgtctagaaaagaaaatcttgcctgtaagcctatcatccagtcatacttagcgctaaagaaaacatactcctgatgttttctctaccagtcttttatctataattatgtatcttttttaaagtcaaagttggagtagtatttccagttaactttttggctgattattttctgtaacacaaacggaatgaatgtttagcataataacaacaatgaagattttcatttgacatgtctcccaggggaccatcttgaagagtaacttaggcatgtgtcacttgatgggggtgaaatgcatcattaagtgattatgttatgctaggaacatcatagagtagttatgcaaacctagatggcatagcctgttacacacctaggctatatagtgtaccctgttgctcctggactataaatctgtacatcatgttactgtaatgcatacttgggcagttgtaacacggtgccacaatgctaagtgtttataaacctaaacatttctatacatagaaatggtatagtagaaaatactgtataaaagatttaaaatagtacacctgaccagacactcagtcccatgcctgcaatcccagcactttaggagggtgaggccggaggatcacttgagcctgtgagttggagaacagcctgggcagcatagatcctggtgtgtgtggcaggggtgggcgggtgtgtgtgtaaaacacacctgtataaggcatttactatgaatggtgtttgcaggactggaagttgctgtggatgagtgaatgagtggtgagtgaatgtgacagctgagaacgttgctgtacactgctatagactttataaacactatatacttaggccatgctaaatttatttatttttaaatttcagtaataaattagcttactgtaacttttcactttataaacttcagttttttaaaaacttttttattcttttgtattaacacttagcttaaaacactaaacacattgtacaggtgtacaaacgtatttgtacttattctataagctttttctattttaaaattttttattatttatttatttattattattattattttttttgagacagtcttgctgtgtatcccaggctggagtgcagtggtgcaatctctgctcactgcaacctccgcctcccgggttcaagcaattctcctgcctcagcctcccgagtagctgggactacaggtgcatgccgccacgcccacctgattttctgtatttcagtagagacgaggttttaccatgttgcccaggctggtcgtaaactcttgagctcaggcagtctgcccgcctcggcctcccgaagtgctgggattacaggtgtgagccaccgcgcccggccagttctttaattttttaaacttttttgttaaaagctaaaacataaatgtacacacatacacacagacacacacacactagcctaagcctgtacagggtcaggatcatgaatatcactgtttttctcctccacatcttgtcccactgaaaggtcttcagaagcagtaacatgtatgggagactgtcatctcctataatgacaatgctgccttctggaataccgcctgaaggacctgccttgaggctgttttacagttaacttaagaaaaagtagaaggattatactctaataagtgtagtaaatacataaaccagtaacatagtcatttattatcattatcggctattatgtactatacataattgagccatgcttttatacagctggtagtgcattgatttgtttacaccagcagcatcacagacacctgagtaatgccttatgctatgacagtttcaacagctactacgtcactaggccattggaatttttcagttccatggtaatcttctgggaccactgtgtatgaggtctgtagtttactgaaatgttgttatgcaacacatgactgttcttgtacgaaaaaccattatcttcgttgctttatcaactaaaggtagctattaagatttggagttaaagacctacctatatttttaaaatatttttattattttactttgattatttttggagttgtaatttatatagcatgaaatgcacagatcttatatttgtcaaaaccctttacccatgtaacccacacccctatcaagattcaggacatttctcttagcccagaaagttcctttgtatgcctccctttttctgtccccactcatcccccgacaattactgctaatttcttttttttcttttttttcttttttttttttttttgagacacagtctcgctctgtcacccaggctggagtgtactggcgcaatctcggctcactgcaacctccacctcatgggttcaagcgattctcctacctcagcctcccgagtagctgggactacaggtgtgcaccaccatgcccagctggcttttttctttttggtagagatagggtttcaccatgttggccaggctggtctcaaactcctgacctagtgatccgcccacctcagcctcccaaagtgttgggattacaggtgtgagccaccgcgcccagctgctaatttctgtaaccatgaattgctttgcctgttctcagacctcacgtaatggaatcatgtagtgtgatgacttatagtatgtgcttttttataaggcttcttttgctcacaacttgttttctgagattcatccacgttgttggcatgaactagttcttttttattgctaaatggtattctgttttgtgactagagcataatttgcttgtccgttctcccattaatggacattggggttgtttccagtttgaagctattaagaataaatcttctgccgggcgcggtggctcacacctgtaatcccagcactttgggaggccaaggcgggtggatcacaaggtcaggagatcgagaccatcctggctaacgtggtgaaacccccatctctactaaaaatacaaaaaatcagccaggtgtggtgccaggcgcctgtagtcccagctactcgggaggctgaggcaggagaatggcgtgaacctgggaggcggagcttgcagtgacccgagatcccactactgcactccagcctaggcgacagagcaagactccgtctcaaaaaaaaaaaaaaaaaaaaagaagaaatcttctgtgagcatttttgtacagctttttttgtgggcatagaagttttcatttctcttagataaataactagcaacgaaattcactgtacaaggaggtgtctgtttctggactctgtagtctaagggcaaactatagcccatgaaccacatccagccccatgacctgtttttatatggcttgccacgtaaggatgggttttatattttttaaggattgtttaaaaagaaaacaatctgggatggaaaccgcaggtcatctgcaaagactaaattatttattaactggcccttcatagaaaaaaaaaatccctgtacctttgttctagtctgttctattgatctatttttctattcatttagtttgttttttaagaaaagcttttttgtttgtttgttttgttttgttttggagaaggagtctcgctcttttgcccaggccggagtgcagtggcgtggtctcggctcactgcaacctccacctcccgggttcatgccattctcctgcctcagcctcccttagtagctggaactacaggcgcctgccaccatgcccggccaattttttgtatttttactagagacggggtttcaccgtgttagccaggatggtctcgatctcgtgacctcgtgatccgcccgcctcggcctcccaaagtgctgggattacaggcgtgagccactgcgcctggcccaagaaaagcttttaaagattttgggtttttttagagtagtttgagcttcacaatgaaatgaaggtacagagattttccatctattccctgttctcctagttcatagtctcctccattttcaacatcctccccaactccgctgtctagaatggtacagtttgtcacaatcaataaacctatattgatacatcataatccgaagtctgtagtttacactagggttcactcttggtgttgtacattctgtggacttggacaaatgtataatgatgtgcatcattgtagtgtcatgcagagtattttcactgccctaaaagccgtctgtgtttcacctcttcatccctctctccttcccaaaaccctggcaaccactgattgtctccatagttttgcctttttgtaaagttacagtcacacagtgtgtagccttttctcattggcctcattcatttaataatatgtatttaaggttcctctgggtcttttcatggcaattatccctttacctactgaaagacttcatggttgcttccaagttttggcaattatgaataaagctgccatatacatccatgtgcaggtttaagtttttacctgttttgggtaaataccagtgagcacaattgctggatcatatggtaagagtatgcttagttttgtgagaaactgcaaaaatgtcttccaaagtgtctatatcattttacattcccaccagtgatgaatgagagttcctgttgcactacatcctcgccagcatttcgtgttgacagtgttctggatttggctgttctaataggcaaatagtggtatcccattgttgtcatttgcatttctgtgataagatgtgggtcatcttttcatacgcttatttgccatctgtgtgtcttctttgatgaggtgtatgttaaggtctttggcccattttttaaacaggttgttattgttgagttttgagagttctttatatatttttgtaaatagatctttatcagatgtgtttcttgcacatattttctcccagtctgtggattgtcttctcattctcttgacattatctttgaaggggcagttttaattttaatgaagtcaattttatcaatcacaaaagtttcatagatgaaactttcatagttgtactttagctttacagtaagtattaaagtcaggttgcttagtttctcgttttcatttctgtttaattcctaggttttacaccattatttgttgctagtatggagaagtataataaatgtttctgtattaatgttgtatcttgtaaccctgctaaactcacttattaattctataagatgtcttagaattttctgggacatgttgtctgagaataaaaatagcttgcttcttcctttttcatctgtatgcattttattcatttttctggctttaatgttctgcctaggacctctagtacaatgttttgtttgtttgttttgggtttcttttgagatggactctcactctgtagcccaagctgaagtgcagtggtgctatctcgcctcactgcaacctccacctctggggctcaagcgattctcgtgcctcagcctcctgagtaactgggactacaggcttgcgccaccacacccagctaattttgtatttttagtagatacggggtttcaccatgttggtcaggctggtctcgaactcctcacctcaggtggtccgcccatctcagcctcccaaagtgctgggattataggtgtgagccaccgtgcctggccagcacaatgtttaataaaaccaatgacagtgttcttcccttgtcttattcatgatctgtgggaaaaaagcattcagcctttcgttaagtataatgttagttgtaggctttaggtatcattcattaggatgaggaattctgtttctagtttgctgagtcttttgatcataagcgattactgaattttgccacatcttttttcatttattgagatgaatcatagggtgttttttttttctttgaatgtgaattacgtctttctgagtgttgaaccagccttgcattcctgtgagataaccccacttgattgtggagtgttatcttttttatatgttactggatcagatttattaaaatattgttcaggatttatgcttccacagtaatgtgctacataacgaattttggtcagcagcagactacatatacaacagtggccccttaagactataatatatttttactgtgccttttctatgtttagatacacaaatacttacaattttgttacagttgcctccagtattcagcacagtaacaagctgtacaggtttgtagcctggaagcagtgggctataccatacagcctaggtgtgtagtaggctacaccatctaggtttgtttaagtacacccaaagtgtaagttcccacagtgaccagaatcacctaatgacacttttctcagaagatgtccttgtctttgggcgaagcatgattggtatattcatgagtgatatgggtctataactttctgtttttttggagtgttcttatttgtttttgataacaataatatactggcttcatgaagttacctgggaattgttccctttgttctgaaagttcatttaagattagtattatttattcattaaatgtttgataaaattcaccagtgaagcgatccaggtctggagttttccttgtgggaaggttttaaaattatgattcagttactttaaatttgaatagctaataggtattagctattcaaattttctgcttcttgtgctaattttggtaatttgtatttttgagtaatatatccattttaagttcttgaattgatttggcatgaaggtgttcataacatttctctactcttttcttttttttctttcttttttttttaactgagtcagagtctcactccgttgcccaggctggagtacagtggcatcatctcagttcactgcagcctccacgtcctgggttcaaacagttctcccacgtcagcctcccaagtagctgtgcttacaggcgcacaccaccatgcctggctaagtttcgtatttttagtagaggaggggttttgccatgttggccaggctggtgtcgaactcctgacctcaagtgatccgcctgcctcagcctcccaaagtgctgggattataggtgtgagccaccatgcccggcctctgtactcttttcttaatttggatagaatttataataatgtctggtgtgctctcttgtttttctctcattgatctaggttggggtttgtccattttattaatattttcaaacagccagcttttgttgttgtcagccttttcttgtttgttttctatgtcatttatttctgtctttattttcttctgcttatgttggcttttctttggggtagaagtttgtatcactggttatttagacttttccaatattaacatttgggcaataaatttctccttaaaccctatgcatcttttttatttccccatttctttgaatcctttaaatccataaacataaaaaagtaccccaaatactgttgttaattgcatctcaaattttaatacattttttaaattagtttaaaatatgtttatattttacatgtgatttattctttgacccatggattatgctgaagtgtgtttagcttttaaatatttaggaattttgcagatattttattgttggtttttaactccactgtgttcagaaaacatgctttgtatggtggttgtcctttgaaattgaagacttgtcttacggcccagcaaatggtttttcttgacaaatattctatctatacttgaaaagaatgatcaggcgcagtgtctcatgcctgtaatcccagcactttgggaggccaaggcggacagatcacttgagttttagaccagcctggccaacgtggtgaaacctgtctctactaaaggtacaaaaaaaattaatagccaggcttggtggtgcgcttctgtagttgcagctgcttgagggggctgagatacaaaaatcgcttcaccccaggaggtagaggttacagtgagctgagatcgcgccactgcacttcagcctgggtacggagcaagactctgtctcataaaaatagaatgtgtatcctacagttgtgggatgtgatgtttcataattgtctattagaataagttggttgatggtgttcaaatccttatgatttttttgttctattggttactaagagaggattattaaaatctacaattacaattttaggtttgtctggtttttcatttagtcagaacaaaatgtaagtacttgtttcatgtgttttgaaactgttttattaggttaatatgtattttggattgtaatgcctctggtaaatttagccttttatcattatgaaatatttgtttttgttaatattctttgtctttatctcctttttctcatatttaatgtagactccttatgattagcattcacatttttttttcactctttttgttttgttttgttttgatacaggatgtcactctcacctaagctgcagtccagtggcgcagtctgggctccctgcaacctctgccccccaccccgggtgaggtgatcctcccacctcagcctcctgagtagctggaaccacaggcacacactaccacgtctggctatttttttgtatttttagtagagacagggtttcaccatgtttcccaggctggtctcaaactcctgagctcaagcgatctgcccacctcgacctcccaaagtgctgggattacaggcatgagtcaccacacccagcccactcttaactttgtctcttaagtatgtctcttgtaagcagcgtagcattagatcttatttaatttattctgataaccttagtcttttaattgtagtgtttagtttatttatatttaatgttgataattgttgggtttaggtttctcatcttatttgttttctgtttgctgcttctgtgttttgttcctttttttctcccttcctgctcttcttgtagaggcaaattccaacatctctgtcatctctgtatctgtttcatttacagtcttgtttgtttaaatatagaattcctggttatgggtcacatcttcctgctccttggcatgtccagtacttttagactgtgtagtggaaatggtggatgataatgttgttgaatatgggttttattgtcctttattagtttgttttgttctggcaggctcttaattactcagatcagtttgattctctcaaagcttgtttttaaacttaacttagggcaggtcttgaagccctgttccttagacatggccttggggtctcagtttaattcctgggatgttcagcaagatcttgaaactccgactgatcagaacttctatgtctctagcactgtgccacctctggaatctgttcaattcacaattccttcgtagtcctgcacacttagttacagctccagtaagccctaggaggtgttggtgatgtgattgttgtgtgtggtcgcactgggagatactctccattttaatggtgtgaacgtaacattatgatatataatggttgtcccgtagtgactgtgtatttcacactttaaacgttatctctcatcttctgaatcgtctgaggattaagttcactgtagaaacttgggaagtgccacatctaacattcttaatgtaaatgggtccaaatcataacttcaaggaccaacttttccaaaatatttttgctatattttaaaaagagttatatttatacaaattaccatagacagtaatttgctgtccatctgtcaccaagttaaaatatctaagggtttttatgttgattaccatgtaatttttttttttttgcatttttcaaaattatgtatatgactatagcataaaatttcagtgtgatccaggtatgagcaaggataacaattactatatttattcttcctgaataacagtaagaggaagagcagaaaaggacatgcctattgtactgggcactgtgctgggtgctttgcaaacatgatcttgctttttctcatttttaataatcctgtgaggtgggtgccatatgtcttttataacaaggagtaaaatattctgaaccactttcctgcctatgcagaaaattattcaagacgacacatgtttgaaagtggtagaattttacttaaaatccacctgtgattgactccaagcctgtatttttttcgactgcatcattttgtctgtaatacagctgtattcaaactatgatggtgaaatacataagaccttattttctgtgtgtgggtcaggttttcccccatgcacgaaatttatagaacaggtaacctggagagtgagtctaatttcccaggagtatttttgtcaaatgaaagaatttactgcttattcctttttagaaacatacccttgtatgctgtaagctttgcctgtggtctgattgggttatggctcttaatctgaaatactaattcagccaagcaatttttgtaagacccataaagaagtcagctttcgacgggcatggtggctcacgcttgtaatcccagtactttgggaggccgaggcgggtggatcacctgacgtcgtgagttcgagaccagcctgaccaacatggagaaacctcatctctactcaaaatacaaaattagctgggcatggtggcacatgcctgtaatctcagctactcgggaggctgaggcaggagagtagcttgaacccaggaggcagaggttgcggtgagccgaggttgcgccactgcactctagcctgggtgacagagcgagagactctgtctcaaaaacaaaacaaaaaaaaaagaagtcagcttttctggctagaaaaatgtgccttggcctatgtgcaagaggccagcataattaattttcttaaacattattttttaaagtgatcttggccaggtgcagtggttcacacctgcaatcccaacactttgggaggttgaggcaggaggattgcttgagccaaggaggttgagaccagtgtgggcaacacagtgagactccatctctacaaaacattttaaaaattagctgggtgtggtggcacgtgcctatagtcccagctactcaggaggctgaggtaggaagatcacttgagctcaggaggccggggctgtagtcagccattgttgtatcactgtactccagcttgggctacagagagaccctgtctctaaaaaaataaaaagtaagtagccaggcatggtggcttatgcctgtaatcccagcactttgggaggctgaggtgggtggatcacgaggtcaggagatcgagactatcctagctaactaggtgaaaccccgtctccactaaaaatataaaaaattagccgggcgtggtggcgggcgcctgtagtcccagctactcgggagtctgaggcagaagaatctcgtgaacctggaagggggaggttgcagtgagccgagattgcgtcactgcactccagcctgggcaacagagtgagactctgtctcagtcaatcaatcaataaaataaaaagtaagcaagatcactttttgaaaaatatttttcttacattatggtagcaaggaaaggtttgatttttatgttctgagttttttaaattttcaacacaagaacaaaggatagtataaccaacatctgtgttttcattagaattaatgcctgttgatacttatcacatttccttcatagtttttttttttcttttcattttttaagtagacttaaattttttttagagagatagatcttgctattatgttgcccaagcagtggccgttcacaggctcaattatagtgtactacagccttgaattcctgggtttaagcgatcctcaagcctcaactttctcagtagatgaaactacaggcggtgcaactgactgagtagactctatgttgagaacagttttagatttacagaaaaattaaaagatagtacaacagggttctttatctcctccccaccatccacgcacttcctattgttagcctcttacctttcctgtgttgtgtttgtcataagtaatgaaccaatactgatacttgtgattaactgaagtccatactttaatcaaatttcctttaattttccctaatgtccttctgttgtggaataccatccatgataccccattacttttaatcgtcctgtctccttaggcgcctcttgattgtgacgttttctcagcctttccttggtttttaatgaccttgacagttttgaggagaacgagtcaggtgtattataggatgcccctctgtacagatttgtctgatgtttttctcatggtaagactgggcttatgggcttttgaaaggaagatctcagcagccaagggccatttttaccacgtcactttgagggtgcgttgtgtcatggtgactttaccactatggttgatgctgcccacagccacctggttgaggtcgtgcctctcaggtttctccactgtaatgctccgcttccctcctccatgccatcctctttggaaggactcactatgtttaaggatagggggtttatattctaccttctttaggcaaagtgtctacataatttatttagacttcttcagtgtgggagatctgtctcttcatagttttttactaaatgaaatcaattttaacaggataaatgaaagtgtcttttacatgatatgtattcatcttgctccccgcccgccgagactgggtctggctctgtcacccaggctggagtgcagtgatgttatcttggctcactgcagcctttgcctctggggcacaagcagtcctcctaccccagcctcctgaggagctgggactacaggctcatgccactgcacccggctgttttttgtagagatggagatttgccatgtggcctaggccagtctcaaactcctgagctcaagcaatccacctgcctcaggctcccaaagtgctgggattacaggcatgagccaccatgcctggcctcatcttgcttttttaagaacagtattaaaattcatacataaagatttgattcatttattctaacctgttcatatgattatgaattcttccttgtatttttttccgttacagttttctctatgcttttgaagatacacaatgacattttaatgaaaactttgtctcttataagaggttcaaatggtgtggctgaatctcagaaacaagagattttgtcttagtaatttttaaaataaaggcaaagttactcacaaattaggtttccccccagcatctttaatcatctttgattacttgataaaaaatgccttctaactgtgatgtagatctcattttcttttttttttgtcagaagaggactgaaccccttttctgagtgctctactgaggcaaagtgtccagagccctccacttagagctgggaactgaatgtcagtgacattttcttgccagcaagtataaatgcttatcaactaattgcaattccaaggccatacttccatagatatacatctgtgtaattattacatatttttggataagaatgtggcactgtggtttgtggctttcaaaaaatggcgcatggtctgaagtagtgtgattgcagggattgcatttttatttactaagtaaaaacttaatgcccttagcagtgagtcatattattcatttcatgtttttctaccaagtaatgaagaatgaactggaaaacaagccacctgaaactcttcctagaacaaagcaagagatagataatactgagaaatgccaactttagacattgtcttgcagttattgactttaaattattgtagtaaggatgcatgcctgttttaagtactgtagaaagtctgttcattttatagaatcctgtctcatgttagagattttctgtgctctatttttgcaaagagatcttagagccacctcaagattgcacagtgctttgtagttttcagagcattttcccatgtgctatcccatttaaaccagaaaccacaagttagagcggccctgcgtgaatggcaaacaggagtgtatatatcagcgatgagtgggcacactgttgaggcacagggagtgattgaggcgtagagattggggacagtgcaaggaggggactgagtgtgttttctcccctaaaaacctggcacattttgcttagagagttacagtagaacgggaagcaccggcctgcttggcagttgtagtctccaagttgaccgggtatggttcagcctaggcgtgctgctgccgccgcgtgtgggctcggtgaggcaaaggcgtgtggggatgggagtggccagaggtgggaggccatcactcttgacttgagtccatcaggatttgaatgcagagatcagagcagcgtttgttcctgtctgtcgatgttatgagtgatgctcttctgagacagtgcttgccttctgtgactaaccatcagtatgaataaccagctctctcctgagctttccagtttccgtgttcattttaattaacactttagctctgtcagttaacccccagccaggtggctgcacatcctaccacttttttgtggacatttagattatttgattagagatagactttgaaactgcaagattcatggctatccaggcccatcccagaggtgtttttccccattcctgtttatgatgaggttgcagaggcgtagcctcggtcaactgtgtctgttaccatttagctcgcctttgcaggcccagctcttgacccccttgtttgcctcccagtcaggacccctctcccttttgaaactccatttagcagtcgatgttggtggcacctgttaaccgcacatgtctgatttccttgtggcttgtgtctcttacctttggcttgggagaacgtggccctgtgtgtgtcaccactgcacagtacctccctcctgaaagactttaacacacttcatgttcctagatgagtgtgtgtgtgtgtgtgtgtgtgtgtgtgtgtgtgttgccacagccttttcaacttccagtgtcctaaagataagagcatcactgctgaagagagctaggggcgggtggcaacgtgatagctgcctagtggtctccttgctgggaaggtctgctgctcgataggaactgtctgactagaagtgtgccttgccatggaaacttgggaactaaatgcattcaggtccatccctcatgctccagtctcttgcttgctgctccctgaagctcaggccagatagatcaggatgaaggggcatcccttgctgcctaaactttgaaccagagttcaaacagcagggatcattgtacctttgtggtaccaagagccaaacgtgggatgtctgaggagaaaaagcagaagctgttagagccacgcctggctttttgtgtcctgagtaggtgtcgaccttgtttgtttctattttctttcctcccgccctccctgcagagagtggtgggcctgtgctgaggctccttgaaatgtcttctagccacaggtataaggcattcgagcaaagcttgacaggttacgcggccacgttgtgaccagggcaaatttgatttcagttaccactcagcggcaatctctgtcaccaacagtttgatctacctagttttattcagtgtttaatgacagtttaatgttttaagtagagttgtgcagcctaacagggtcgtcttgccattttgggcactcagaatgtttgagtagagaacgactttaagaaacaacttttcctccttaaaataatgctttgtatagagaatatgagtcataatagaaagtattaagaaagaacatttgcttacaagccatccagagaaatcactatgaaatattttggtgttctgtcctccttgctgtgtataggtgtgtgttttatggggattatacatttgtgtcctttttttctttttaattttgtaacttagaaggaacgttttctctgtcagtaatcagagtcacctttgtggtaccagcggttccttatgttgacctcacccctctcccttttctaggcgcttcctgtgtattctctcgaaacaaggcacagagactgcagcggactgagccagctcctggctccctcagcacccttccctgttttgtctcctcgctgacatcaccagtcaggagggacgactgtatttaagagcactttactttgctaattatgtttttgttaggactctgtacacctcagcttttgttaagaggtagagccacatatttttgataacaatatatctttgagtgtgctttacacttttagatttatggcatttaataagctgggcaagatcttctttggctgctgcagtcctcctcttgccactgaggtccaggagattcgccatgaggagatgacacagaaccctcaggcagcctcacgtcacctcccagggctcatcccacgagctgttcttcctgctcccacagtagagctgacggcctgcccagttcaagaattagttctgttttcctgccccaaagtagaggaggaacacagtcctctgaaatgtcatctttctttctcctttaaattttactagaaatagtcagtggctgtctgtcttaaagccttgtgagttctgtccgatctttatttctccttttctctgaaccgttgcgttacctatacacattcacgccttcctttattgccgcctcctttactgtgcgttcttgacgtccctttttatgagtgagtggagtgtagatccgtggaaaaaggtgcttctctgccttgcatgagcgctctatgtggaaggtctggggaaaacatcgggtggctttgtcaggtgacttattgaggccctctgtcccgctgggccatagttggattgcagtgtaaattaatttcgtctttacaaagattcactcttttgtgtgtgtgtgtgacagagtcttgctgtgttacccaggctggagtgcagtggtgcaatcttggctcactgcaacctcctactcccagggttcaagtgattctcctgcctaagcctctccttaagcgattctcctgcctaaacctgtagctggggctacaggtgtgtgccaccatgcctggctaatttttgtatttttagtagagacagggtttcaccatattggccaggcgggtctccaactcctgacctcaggtgatccacccgccttggcctttcaaagtgctgggattacaggcgtgagccaccacgcccagccaagattcagtctttatagaataaaatttttctcacattttttatcaccttttcttcttttttcctctttttccattgcccgtgtgaagttggcttggattggcatgaaaggggcacttaatcctgaagagagtctactcttctacctaaaaaaaaatattaggacttaaaagaattaggagaaacagtgccttcaaattttatctcccttttcttggatcattttgcctcagattagctgttctttgtgtaaaatactctgggaagtggtgtccagggtgcggggctatggaatcccagtcactgggcagtggggatggaagaccttgctccacgaactccccagtctcctggaaaggctgctggccatccactctgggccccacagggaggattgccatggtgagggcctcccagtccaggggttgacagttaagtctgcagactcagaaccctcagttgtcactcactgcgagtagcaacatctcccaggagtgtagcctttatgtgaatcaagcactgatggtttgaaataaaaaatgtcatcagatttttagaatcagaaagaactttaaagatcacctaatgataatctaaatgcttcctattttatagataaggaaaactgagggaccaagaggtttgtcccagttacatggctgatgaggggcagaaacaggattagaaatagtttctccagtgaccttgacccgtcgtttttgcttatgcattaatgcagactgcaccttggggaaccagcgtctctaactgtagggacctgccaaggtgtaccaatagtattagggtgccggtttcactgctagaagtttctggagcagttgggtgactaacagtgaggatacaggcctgcatttccactcttcttctaagtcacattctggtcgtggctgtgtgtgtgtgtacacagtggctcaattatggatcactacatcctcaacctcttgggttcgagcagtcctcccacctcagcctccgaaatagctgggactacaagcacacgccgtcacacctggctaattattttttgtagagaagggggttttgctacgttgcccaggttggtctcaaactcctggcctcaagcaatcctcgtgcctgggaggatcttaacccaagaagacaaggaatgcttcttgaaagacattatccaaatgaaatacagtgagagttgctaaatactttgttactagtcttccagttaggacttatccttccagggcaaatgttcagacctgggggccgcacattttcctgaatgcattccaggttggcagcacataagacttcaattgagggggaaggtgggctgttcacctgcccaggtgctttagcccaactctcctgccccaggtgcaccctggacagccaagtgctgtctgtggcactgtaatcagtggcgtatttctccttactctatatttaccaagttgatatactggaaggattccaagagcaagcgagtgatagcagacaactgaatgcagtcatgtctttccatgaaaactgcttttcttggctttcttccaacaatggtaggttgccaagagaaaatgcttttggctttacaaatgatctggccgtagtctggggtggttctggttctttatgtcattgaaaatgataaatatttctggctattcaattatttagcaaacttttgctcttgatgtactgaactgtgttgtttttttacaccttatatgaatttgtggttttacatgtataccaacttgtggagaaagatgctaaaaaaactccagcttgaaaaatatgtcaggttaggctgaagccacatcaaatggaagtttgttgctgtgtcgtggctggcttatgagtggtagttgcatccatttcttttttcgtgggagtgttctttcatgttcagttcttctatgttttggtttaaattttaacccaagaatgttaggctagggtattttaatcatatgtcattattgcttatgatttaagtttgaaataaacaccctgagtttattgttcttaaagctaaaaaacaatgtagaatgaaaactggaaacgcttatgatttaccaggacaattagaaaataatggccttttcagagtatttctacaaatagcaaatgcacaagattgttgttgtcacagtgtttttctgaaaatgtcccataatccaaatgccagtaatcccagccggcctctccctatcgtcctacatgttggaaccactctccaccattacacgttctctgtaaagcattcctttatttcattactgtttaagcatggtcaggaaagaaatcatatgtagtgtagaatgattgctcccaaagctgtctctcacctcctcacccctagtactcactgtcgcagctgctcatcttagtgcttcgcatataggaacttgtttagttctcacgcaacccttagaggaggtgctgtgatctccattttacagatgataaaaccaaggtgcagagaggtttaagtaaatccctagcaagtggtggagtcgccattcagatatccccagagcccacatagttgaccgcaatggcatgttgcctctatggatgaaattgtatttgtggctgtgttccaataagaaaaatttggttttttcagaaagaggcattgggctgcctttggcccacaggccgcactttgccaccctgttttcatagacagatcctgtctctgtcccggctactggcgtgaggccggtgaacttgaaggagacagagttgcgttaagcggggaggtgatgagcccccgtgcaagggtgaagcctctagtgggggctgtggggagcgtctgctgagttctcaggctgatttagtgtgtccctgccctttccggggggccccttcctcacctataaagtggtaggttttagctagtcttatttctccacttgtctttgcaaagcttattactgaacatcatattttggttcctttttgtgtgtttttgaccagcatcagtgacaccccccaaagcccacttcctctgagtggtctgctgtgtattgtggcttgaggcgtgtcttgaggtgtgaggaaaactgctgaagtagtcagctgctgcaaaaatggacttagtgggctcctcggaaccaccttaaggccaggtgcggtggctcacgcctgtaatcccagccctttgggaggccaaggcaggcggatcacttgaggttaggagtttgagaccagcctggccaacgtggtctttagtaaagatggggaaaccccatctctactaaaaatacaaaaattagccaggcgtggtggcacgcgcctgtagtcccagctactcaggaggctgagacgggagaatcgcttgaaccagggaggcagaggttgcagtgagctgggacggtgccactacactccagcctgggcaacaagagtgagactccatctcaaaaaaaaaaaaaaaaaaaaagaaaagaaaacctaaacatcaaactcggcacttgttgcactgagagtttctgatggcctggccgactctaggtcaagttctgcgtcgcagtgccatttctggccgtcctcctccccggccccccattggtcacatggtggccccctcaggtgcatactcataagtggttatggtcaaccccttcttgtgagtgtgcacttcaaaatgacgtttggagatgaaaactgggggagtttgtttgtcggagtggttgttcttatgagtggttgatgtctctggaagtggactatttgcaaaggctcccatacatggctcagggttgtgtgagatgaggaaccagcttgcccttccctgaaaatgaggggcatggaggaagtttccttcctccaaggacaggtattcttaatctttaggagatcttagagtgaccctcagaaatgaacatcacacaaaattgtgaactggtgcccacccaaatgctccctcccctgcccccatggactgcctggcccattgcctccccccagtggagtttggcctgcaaagaacgtgtttctctgaccttttcgacagaagagccagaaaatggatgcttggcttgctactattgtagaaacctgttctggggaaatacttctattttgatgatttcttctataacctttcagtctaaaccccttttcaatatcaggagtttttctgatgatattgaaggacttgacttgacttttctctctccttaaacccttaattagtttttggatttccatttactaacttttttacgagactagatctcacttgagagaagggggagttaggtgagtagtagagagattctcctggttagtgagtggagagaatctttctggtctttctgagcctggagcttgttttcttactaatgttttgatagctgtcatatcattacaagtagaaaatgatagtatttgtcccacacactgaggtaaacagaggaggctgttggcagccagaagtgaccatggaggctgatgggtcagtaattctgtgtgcaagtggaaagctctgggtaagggcatgagtggggccttgtaccaaagtcagggttttcctggcccaaagatgtagcacagaggacccattttatagccagactggacttgtgtatctgctgtgatcacacacacccgtttcaccattctgaaaaccaactccgaaggcctgttctcgttctgcccgacttttcagcatgggaaagtagctgtccactcctgtccactccaactggtagctgagatccttgtttggaagttttgaagatagaaagggcactgttcctgctgcctcttccgatgccccctccagccattgctgaccctctttgtgccttgactttggtcacttgttcgtggttctttgaccacctccttcctggctctattcctaggggctgcgtggcatggtggtgctttggcgtgttcattcatttgggtccttccgctgcatccctggtatgttgcaggggatgcagagaatgttccaggaaggtgagaagttttatcctagttttgtgaccaaaacaggttcaggatagattattacaaacatttatgtgacagataatcctctagagccgtgtggtactttgtactttccgtggtacccatgtctgctggagtagatggacagtcacagtctgccttttccctcctctttgttgatcatggtcactcacctacttgccagacagttcagacccgcagccacaggatttaatggatgggctaggctcagcaccaggatttgctgcaggtgcctctttgtattgttcttgggttttgagctgaacttaaagaggaatttcctcatcagagctcacactgcagtcatgttaaggctaatccagtttcacccccattctttcttgggggcagtggttggagttggggaaacctcaggatctggcttcaatatttttcttatcatacacagggactatgcattacatatttttactctctgagtgaagtgatagaaaacagaagtaggttctcaaacagttaattgattgatacgcttggtcacaatgctttttaatgggaaacctgggagagctgtgaggcattgtttaatttagtttcattatggaagctcttgttctttttttgggtacttactatagttaacttttcctattttctgagattaaacttgaattaaatgcttaaaggagttctgttaggaagaacagagtaaaagaaacttctaatatgtatgggctgttgttgaatgaggcagaatataaatactttatgggttttaatttgttaatatataaattttactattaactgaacagttgcctattctctgttctgcttttttaattttatttaaaagagtgtatggaatacaaaaaaaaagaatgaataagactttgtatttgctagcacaacagggtgactattcaaaaataatttaattctacatttttaaataactgaaagactgtaattggattgtttataacacaaaggataaatgcttgaggtgacggacaccccatttaacctgggtgtgattattacacagtgcatgcctgtaaaaaaaactcatgtaacccataaatatatatacctactatgtacctcccaaaattaaaaatgaaaaaactttttaaaagattatatagaggttctctagcagcattaaaccaaatcctgatgaacctccattgaaaataaagccagctttacaaaaaaaaaaaaaaattttttttttttttttttttgagatggagtctcccctctgtcatccaggctggagtgcagtggcaagatctcagctcactgcattttctgcctcccgggttcaagcagtttattctggctcatcgtgggattatacgcacgcaccaccatgcctagctaatttttgtatttttagtagagatggagtttcaccatgttggccaggctggtctcgaactgctgaccttaagtgatccgcctgccttagcctcccaaagtgctggaattacaggcatgagcacccagcctaccaaactattatcaagtacctgttgggacgtttaaagaaatgtagattttcattaattagcgttagacatcttgattttagtatttcattttgggcattggtcctaagaagtatatgttagcctagggtgggggaccacagtgctcagtttgattaatggagaatagatatatactaggaattcagaaatctagaatctctagaagcaaatggtttttattcataactgcaggctaggaccagtgcatggctcttgagttctgccaggaggtggtttggcaccaggaggtagccttgcctgggcaatgagcagtgataccctgtgagagagctgacctctttagcctggttattaactttctctgataaggagaggctggggctggccctggtgccagagatttgaaccctaacctcctgcatgtagcctgggttttgtttttatcataggctaaagacgggaattttttcccctatttttgagaattgtgtagatccctatgagctggacgttccttacataccgttcatgatctttgacttgccatcttttttaccttgtgagaatcaaggtaaaaacttgttgagactgtttccttcactctcttatctgatggccaagaagaaaaggtacaaacacgtttttgatgaaatctgtcagagcgcttccaaacactgggttaccctttgaaattgaccagttatggccaggcgtggtggcttatacctgtaatcccaacacctggggaggcttgaggtgtatggatcacttgaggccaggagtttgaggccagcgtggccaacatggtaaaaccctgtctctactaaaaaatacaaaaatttgctgggtgtggtggtgcatgcctgtgaactcaactacttgggaggctgagacacgagaattgcttgaatctgggaggcggaggttgcagggagctgaaatcatgccactgcattccagcctaggcaacagaacgagactctgtctcaaacacacacacacacacacacacacacacacacacacacacacacacacacacacagaacgagactctgtctcaaacacacacacacacacacacacacacacacactaaacaacattgaccagttagaaaagggccccaggccaggcaagtattacccatctgatcacacactcatactcaccctggcagggctatcttaggaaaattgtcaaaatatctgggaagttttggaaataaactttctgaagcaagtcaggtgaactttgaggtccacagagcacactggcctcttggtacttaggtcccctcttctctggagccagggtgcctgggcatttggtgtggaaggaagatggttacctgttcccttccccaccccttcagctgtcacccactttggtttgtcaatgctgggcctaattaattagaaacttccaaaagacgttgattttttgtttgtttgtttgtcaaattggttgacataaggtgtgagctccgtgacaagtgggaaatgcatctacgcagcctcagaactgggcttggctcataccaggcacttggtgaataccagttgacttcgaggatgaattgatcgagggaaaatgagtgtgggtgttctgtcatattttgtccgaagtcagaaatttaggaactgggggaaaaaaaactatattttttgttgttgttcgtgttgttgtattcaaattctaggcttctaagaacaatgtttcagcggtttggttatatgtaataagacaaattctgagagtagtaagtgttccatggaattaatttagtatagtggtttctgaaaatataaattcctgcttcaattaagtttcagatgacagttgaaggaagcttcttgcaaatcagaaatgtgcttaatatttatcgagctaccatcttgcctagattaagtcatttgaactcgaaattgagtctggtttgtggacttgcagaagaattagtgtctcagttcacttaagtagagcacctagtggtgacaagaatgtgattgctttccaaaaggtgagaaatgtcacctaggaggactacatggggaaggaaatcacctgcgtatgaaatgcacagagctagaactttctggttatactcctttggtttttatttgtgtttctgtacaggcatttcagcagaaagggccagttgtgttgagtgttgatttgtttgtagcctagacttttagagctgaaagaaataatacgatccatcttgttcaagacactcatcttacaggcgaggagtttgaagtccatagaaggaatgttaagttacccagagtggacatgctggcgtggcagtcaccaggtgaggctgatggagagaactgagctatgatttcttaactggaaactcacccctgggaggttttccctatgcggggaccttcccagtccatcaaactgaccactactccagaaatacagaacacacaatagacagaaggtggaatattagagctttgcaaaaaagcaaagacaggcagcccaagcatccagtttcttaattagtcgttgtttctccacagggagaaagataagcactgggatattgccatggcaattcctgaattgacctgtggaggctggagctgggggtcatcagggaacttggcccacatctgttgatggaaggaattccagttggttgcaggccctcacggaagcatagctgagggttcctctttcccattcctgcctttatctagtatatatttgatttcagtgcactttaattttataaaaaactttattatggaaaattttaggccgggcgcagtggctcacacctgtaatcccagtacattgggaggccaaggtgggcggatcacctgaggtcaggagttcaagaccagcttggccaacatgatgaaactttgtctctactaaaaatacaaaaattagctgggtgtgatggcacgagcccataatcccagctactcaggaggctgaggcaggagaattgcttgaacctgggagagggaggtttcagtgagccgagatcacgccactgcactccagcctgggtgacagagtgacacactctcaaaaaatataaataaatacataaattttacacctgtacagtggtagagaggatactataacctctctgtacccatcgcctactgcttggttagtgattatcagtaccttaccaggctctctccatctatgcccttttcctgccacctcctcctgcccagtggattagaggtgacccttaagcaactcaggggttaagggtgctgaccctgccagtcgaaaatctgcttgtaaccttttgactccataaaagtttaactactactaatcccctgctgttgatcagaagccttaccaatagcatacacatttgcttaacacaaatttcatgttttatgtgttatatactgtatctttacagtgaagtaagctagagaaaagaaaacgttattaggaaaaccgtaaggggccgggcacggtggctcatgcctgtaatccgagcactttgggaggccaaggtggatggatcacctgaggtcaggagtttgagaacagcctggccagcatgatgaaaccgtgtctctactaaaaatacaaaaaaattagccggacctggtggcacgtgcctgtagtaccagctactcaggaggctgaggcaagagaatcgcttgaacccaggcggtagaggttggcagtgagccgagacagctccactgcactccagcctaggcgacagagcaagatgctgtctctattaaaataaataaataaaaccataaggaaaagaaaatatatgtaccattcattaagtgaaagtgggtcatcatcaaggtcttcatcctcattgtcttcacgttgaggaggatgaggaggtgctggtcttgatctcttggttggcagaggctgaggagtttgaagaggagcaggagagattgaaaaatatttccatatatgtagacccatgcagttcaaacccatgttggtcatgggtcaggtgtattttaaaggagatcccaggtgttgtatcatttcattgcaatatttccactgtgtgttttgaactaatggaaacttagttcaaatctgatggggaacctaacagaaactagatacctatagagtaattaaggattaaactgaaagaattccccttgggtagcagctttggaaggttttgttttccaaatgactttcttcgggtgttggtgccattgttggggcaggagggattgagtgaggagagtggctgagggtggggggaaacagctcgtctacttgcgggatggggtttagggtgaggagagagtggctgctaggagctgcttcatgagccttctgcttggagcatgtgaacctgataatgaaccttgaatttatcattgcaatgagtatttcataggaaactgtgtgagcatttcccaggcccttccttttatattgactgcgtcaccacagctgatgttacctcttttttgtttcagatgggaataactgggaacacaagtccatttggacagccctttagtcaagctggagggcagccaatgggagccactggagtgaacccccagttagccagcaaacagagcatggtcaacagtttgcccaccttccctacagatatcaagaatacttcagtcaccaacgtgccaaatatggtaagttacccttggccctcagtgttatggctctccggtgggtgctgtggtctgtggatttttaccattctcacagtgaaagtctataactaaaagtgtgtcagtaggtgataggaagagaacccagatttctcatgagtagctctctaaatgagtttaacattttctgtgatgagctagcaacaggagagataggtgaggatgattcagccgctcttcccaggctccttttgttgatggagagaattcacgtgcacgaatcactttacctttctctccagaatcatgagaaccagagacactggcttttcttacacttcctgtttgttagtggcttgatgatgtcagtagaagcccattgatttgtattaccgtcagatgatggacatttatcttccaaagacaatactctgttgatgagatgcatattacgtccaacacaatagatgattccacgtgtcttcatcctccctgaggtttgaagggattttatagatgggaaatctataaaatgggaattatccttatcacttctcaacctgatgaatcaagatattaatgggaaaatatctccttttgcaccaccaaataatagaatctcttttatttcaaaacactgaggggtagtgcgttcttttgtccagcctctcttgttcacccccagtgctgcatgtctggtgtgctcttggtggtgggtgaggaccacaagcagccatctctccccactgtgcttgttgctgagagcctgaccttcccagctgccatagtgatttgggaagatcacaagaaagtgagaggattatgttcagaaaaagttgctttttgtctttcggttttttatgctttttattttgaagtatttgttgtaaagatagcacagagaattcctatatatctttcacctcatccagcttcctctgatgcatcttacataaccttggtcttttctcaaaactaagtaattaacattgcttacagtgcttagaagttttgaggttgctgggaagcagagagagccagatctctttatttacttgtttgataaaatcaggaaatgggaataatgaggtgtcctgtcaggtgctggctccctgctgtatggtacctccatttaaaaaggtggttgaggccgggcgtggtggctcacacctgtaatgccagcactttgggaggctgaggcgggtggatcactaggtcaggagttcgaggccaggctggccaagatgatgaaaccccgtctctgctaaaaatacaaaaattagccgggcatggtggcgggcacctgtaattccagctactcaggaggctgaggcaagagaatcgcttgaacctgggaggtggaggttgcagtgagcggagatcgcgccactgcactctagcctgggtggcagagcaagactctgtctcaaaaaaaaaaaaggtggttgggtatgtacaagtaacaaaacttgctctcaaaactgtgaaaacaacctaaagttcttaggacttctttatttcttctgataatccccttgtaactttccttgatatgcttctttctttccaataactttttgttgccaggattgtcctgttcctgatagtgcaggtccagaacctgaaacagagcccagaggaccctaggtcagcccctcaagttcagggaacggtactgacctgcataatgctgggctctggcaccacacagatcccgttctctcctgtgcttccttttccagtcctcaccgaaaggacagtagtgtggactctggggttagctgtcatcgattatgcctgctcagtaaccaggagcacattttggcttcatagtgaaagcatttgctttttccaagacttcttgtgttttacagtcagggaaaccctgacctaacattttgctcccttttctcttttaaaatattctccagccccacttccccatcccctctcctttatctacaacttagtgacagaatctgtgctccgggcccctctgctgcctccactgctgctccagagggctgaacttggcagatgtggtatgcttgtcaagggcagtttctgcccgggactgcaaagaggctgctcattcccttcacctgcagcagggctggagccgtttggtctggggcaggctcccctctgcctctgcactgatggcagttctctgctgtgagccggttgtgccccagaggatgttgggcagcatccctggccctacccactgggtgcttacagccttctcctctaagccatgataatcaaaaatggctcaaggcaccaacatatgttctccagggcatagtcgcccctagttaaaaactcctgctctggagaactggagagtaattaggagaagcagtagcaacagcatctcatccttttgcttgtcttccagacatctgacaaaagtagaaccacttcttttcctctctgcctctctctctcccccgctgccccccccttctttcatccctccctctccccttctctccccaccccctctctttctctctccctctcttcctgtttcttggtctgtctctgatcttctcagggtaaactgagaaagcatttttgtccatgggaactgcattggttgcctggtggccactgtctcacaagaacccctgtggactttgagacagatccacaaatgcctgttgggggtaaactgaatgacaccactgaccctggagggcacagatcagatggggctgtgcccacgtgtgcctttgtgaggcagcctgacccaggaacagccttcagtgctccacatagtggtaggaaccagaggggctggtgggaaagtggggtaccagcacacatggtctccccaacatctttctaggtaatttttaacatattcctgcaatagcctcttgagagacatcattccaggtcccattttacagctgagcaagttgagactctgaggagtttgggttgttcaaagctatgtagcttcctgtttgcaaagcctgaaactcttcagttatgttctgaggtcatgtttttgcagccctgagcctgccgggaatgcttcaccagcccgtgcttacacagtttgtctgcagttcctcagatgtgttttgtagtctttttgaattttgaaaattatatctggcctcaaaacccacagacttttgcatactgagggcaaacacttacaaagaaatctaggtctatttactgaaaaaatgaggtgtcaaacatatttgcatttattgtcatgctttagggggtacccaactaaatttggtgtcccaaacaatcccagtcaggactccagtgccaaatcacctggtgccctctgcagctctttcctggagtgatttagccacgtggtcttgggccagggagctcttgttcctctcccctcctagtttctataggagtccaacactgggtagcattgaggaagggaaggatatgatcattcaattaatttgtcacatgtgttgaaagccttttgtgggctcaggtgctggagtcggctccccagaaggcaactgggagtgacacagagctcactccacttttgtgaaatggaaggtgtagtggccacggaaaacaaatcgttacaaactgctccaagaggtctgcgtagcactcagcggttcagattgtcatagggacctctttagatggagccatcagagaaggccacattgaggaaggagatttaaaggcaagattggaaagttgagaagaagccacagagaccccagggtattgggacagcactggcttgcgtaggaactggtagaagtccagaaaggccaccatgagggaagggagcagggcgtgagtggaagttgggggttgagcaggaaccatttcagggggccttggagggaagatgggccatcggcttacagggtggggtgtgatgcaggaagttgaagccactttagctgagtgaggaggagaagttcaagggcgatccttctggaagtggaacccacctgattcttggtgacgtcttgcttaagctttggattgggctttctgacattttcacaaaatgccgtgtagaagtgggatacgtcttagactgagaacattcagtgaccagaggggcctcatcttcaggttctcccacgtggtctcctgcaagagttatttctaatgtggagttcgtaggtgtgatttttttttttttttaagaactgcgttatggagacttcaccattaaagttgagatgcaggagattcatcagtagtgctgcttatttaaaattgctcatgagtgatgttacgatttgttgtgactgagtttcagaattttggagtggaggttgtggacagggcccacggcagctgctgatctacgtctctgaatggaagggtggtgtggctggaagactgtgtagacgggaggatgggagagtggtcttctgtgtcctgccagaatatcacagctgcggcagtgacactggtagcacctgagcggcaagccatgtgctaggatgccctccagggccccctgtgtccaggggttcattccattgctgtgtctcagcacctgtccatggccccacctgcatccgagtgactggcagttcctgggcctcacccagtcctcccgattcacaatctcttaggacgaaggtgcagaatctgtgtcttgtagtcactcttaacttgtgaaacttcagcttttttctttctcaatttcccaattccacctaattccctctaattataactcagataattcttaaatacatgggcttgcggttctttgtgttctgctggaactcgtggttttacatgagctggtctagtgattctgatgtggaataaagatcatgaaagccactgtccactgacaccatgagccattggcattgtgaccagctgtcccactgtggagtggacttactttgttggtcttcatgtccactttagtacttcagaaggcttcactaatcttcccccactccccaaccttgtttgtcatattttcataattttctgtcccctgtctagattgtgatcattgagggagcaagacttaaactggctgcatagggttaagcttcgtgaacgccaggatctctctctgttgtcgtctttgatgagctcctcttagttttggtttccttgcacaaatgcctgtgttccctaacattatacacaagctcctttcactgcacaagtagaaattgtaaaatcactgcttgtctaatacctccctctatcctaggactaaagagagtccttacagagttctgtggagacggcaggtgaatagtcatgtcatctctttaccataacagtgtctatagaaaaattacactatgattatgaattgtgtctcactaattgaactggaaaacgtggggaaggtttggaagtaagcccttgtctataattattagtgatttaagtgtttgtgtattcttaagagtttacatctattgactccatctgtatcttgaagatcactgagaaaacatgtatgcagggccttcaaatgccgctaagtataaatcttctattcaaacttatccccgttggttttggcaataagtatcagctgggaaacataatttaagcacaaaataatgatacgtgatgtgttgcaaatgagaagaaactataaattgagagaaagtagcgagtcctttggtattaggggtagccccacatattacaaggcctcagtcaaggtcatttaacttactttccagtatgggtttcccattaaccagcagtatcttttctagagtctgattagtataatcctttcttcagcaaaacctcctaggtggaagcataaatcatctcaaagatactcatgtaaagtggaggcctagccagaaggttttttttgttttgttttttgtctacacaagatgtgctgcatacttactaacagccagcattgcagcctctgcctgcctgctggaagtgtataatgaggatagcaggcatttctgagaaatgaagtgacttttagaagaaccgagtaaatacaccgcagtagtcctgcaagaagcaacaactcagtaaacagcacaggtcatgggtctgggtgaggtcagtcgtagctagcagtaatgcgaatataatacttcacttcctctggagcggtgtgagctacatcagtctctgcacagcccaaatcaccctaacttccttttaccttttccacaaccctttgagatggccctgaggttcacgtcaccaaaaagacagtctgtccagtaactaatttgccaagttatcaaaaaattgtgtaaatttttgtttatgttcctttttttccctctaatccttagaacctgtaaatgtcgtaagtattcttgaagaatacatatgtatatatcaacagtattcaagaagagtattctaaaaactttaagtttttagtaaattggtaattctcttgaacttggtcattcgactcctggtctggtccagcagtcactttgaccgtaggaatagatctggtgccttctatcttctatcttgcaggttgtcttttttgttgtttctttggttggttggtcgggtgattttttttttttaagctggggtctcactgtcaccccatttggagtgcagtggtgtagtcttcagctcactgcatcctcttcctcccaggctcaagcgatcctcccacttcagcccccgagtagcttggaccacaggcacgtgccaccatgcacagcaaattttttgtattttttttggtagagacaggtttcgccatgttgctgaggctggtctcaaactcctgagctcaggagatccacccacctgggcctcccaaagtgctagcatcacaggtgtgagccacctctcccggccaccttataggttttctttgtgctgtaacaagtaactcccaccccttctaggtagaatgctgggttctgaaggctgtggctgtgggtccaggaagagagtggggagggagtggcaagtccctcgcccttggccacatttcttaccctgagccttggccttgggctcaggctttcctgctccccttagccatttgctttctactttaaatcacagctttaagattacttataaatcattctggattatttccctattgaatttagatgttttgttttttttgttgttgttgttgttgagagagagtctcgatctgtcgcccaggctagagtgcagtggcgcgatcttggctcactgccacctctgcctcccaggttcaagctattctcctgcctcagccttccgagtagttgggattacaggcgcccgccaccgcacctggctaatttttgtatttttagtggagacagggtttcggcatgttggccaggctggtcttgaactcctgacctcgtgatccaccccccccccccccctccccgccgtcagcctcccaaagtgctgggattacaggcgtgagccaccttgcccggcctgaatttagatcttaaattttaagataatcttatttttttaaaaaaaatcaataaacacaaagcaaaaagaagaaaacacaagaaacatttcctctatgaaaatagctatgttgtgtttcttaccagtttatcacctctgaggtgattatcgcttcttcccaggttggcagctgtgtacatttaatgagcattttctttgttttatggcgccacagctttgcatacccagctgttgtaggtccttatgagggaacctgagcaagtggttattgcagagccagcccttgttctgcctgatgttcgctttggtatcgttttctgattctaggtggaggttgtggaggagtcaggtttccaggtgggtgggggagtatccgaggagcataggtttggaccctgttgcgatgtggaaggttgaggacgagcagcaagaatcccagcctggtgtggatccggggcattggctgcacagaggggtgacactgtccttccttgttctttcttggtcagtctcttgctgtttggaacacagggtcctttgaagacatgataacctactcttggacacacagtaaaaaatgacttatttttttgtgaggaatgtgaggataagcgttattatccacattctgtatgcacatctctgttatgtccttagcatagaatacaggcactataggaaaaatggcattggggctaaattacccaaaacctatgtagcaataacagtcctaataaaaatgcatgttagattcttttaaaatttaaggaataggctgggcgcggtggctcactcctgtaatcccagcactttgggaggccaaggcgggtggatcacttgaagtcaggagtttgagaccagtctggctaacacggtaaagccccgtctctactaaaaatacaaaaattagtcaggtgtggtggcacacgtctgtaagtccagctacttgggagggtgagacaggagaattgcttgaatctgggaggcagaggttgcagtgagccgagatcatgctattgcactccagcctgggtgacagagcgagactctgtcacaaaaaaaaaaaaaaaaaaaaaaaaaaaaaaaaaaattaaggaataccagagtaaatataaagagtttgcttttaaaggtagtttgacagtggagtatacacagtggttgaggctgccaattatgtaataagcaacacatgcaaagagcctgtggctaaaccgagtgaagatgatgggtggggtgagtgggctcagtgagctttgtgttaacctccctttactcagtggctcaaaatagtaacaggcaggggagactaaggtttaaaccagtatggctctcacaccatactcacctcctccttccacattacaaattgcatgtgaaatgatcctcgctccagaaacacatattgcatatattttaaggcttctgacagataccattatagtgctttccatcaaaagccatgtacccgattaccagcatcacaccatcttcccaaggctagggactgttaccccgttcttctgtttttttttagacagaatgttgctcttgttgcacaagctggagtgcagtggcgcaatctctgctcactgacgcctccacttcctgggttcaagcgattcttttgcctcagcctcccgagtagctgggattacaggtgtgcgccaccacacccagctaattttttatatttttagtagaaatggggtttcaccatgttagttaggctggtctcaaactgctgacctcaagtgatctgcccacctcggcctcccaaagggctggattacaggtgtgagctgctgcacccagcccaccctgtcctttaataggagaaaatgatgtcatcttactttgatgagcatttctctcatgagtaagatttaaagtgcttatgtttagagacataggcatttatttgagttgctttggtcctgttgttcaccagttttcctgtcagattctcttagaacactttataatgcaaggtggtcagccctctgtggaggaggggcacagagagctgcaggattggggctttgctgctagttggttggctcatcacccaggcaaggccctttccttggggcctcagttacttcacctgtcgtgtgtggctagtccccagagtactcttccctcggggatgtgtgtgtcttcaatgaactgctgtaccttggaccctgaacacagagcctggcacagagtgaggaataaagatggactgggaggagaaaaaataatagctccatcatgatttgttttgtcttgtgtctttcagatttaatttttcctagttcataaatggcccttacacttgttcctagtgattttagtcatagaaagaatgccagtctttatgtaatctagcctctcacacctatttaattgtacagtcttctcctgcattggagtcgcccatggggcttttgttcttttttctcttttctcaatgtttttgattttgtttttgtctttttttagcaacagggtcttgctatgttgcccaggctggggtacagtggcaattcacaagcacagtcgtgggagactatagcattgatctcctgggctccagcagttctcccacctttgcctcctgagtagctgggactacaggtgtaccaccactcctggcttcttaaatgtctttattctcattgtaaaggcacatatatgttaattttggaaaaattgggaaaagtctaaattaaaaaaacaaagcaggctcgtctcttaggggaaaaatgagaggatctgtattttaagaatttttactggaaggccgggtgcaatggctcatagctataatcccagcactttgggaggccaaggcgagataattgcttctgcccaggagttcaagaccagctcgaacaacatggcaagactctgtctctacaaaaaattttaaaacttagctgggcgtcgtgatgcacacttgtcatctcagctactcaggaagctgaggtgagaggatcgcttgagcccaggagggtgagactgtgtgagccatgattgcactacttcacttcagcctgggtagcagtgagaccctgtctccaaaaataaaaagaatttttactggtaatagtgaggaacactgctttatgttctgtgactaaagcctttactgcctttacgtaacaaagtacccaccttaattaccttcccatacttttacaatttaattttttatatttagttcctcatcattttcttactgattcgtctgattttgttttctcgggaatttccccccaaaatggaatgctttttggtattaaaatagtagtcacttaaacagctttttgttaaagcataaaggtctgccttattgttgttagtaattcgttgccttaaataacagtcattggatgttttctcccacaaattcagacagggcttggctggcccattcccctgctccacatggctttgacaggggttatttgaggtctgccttatttttcatgggtgcctcttgtttcattataagtctgtagccataggatgtttaattagtccacctttaatagacatttagaattttttccagttttcaatatttaatcagaatgtgatgcattatctttgcacacatattttaacatacttgtccaattacttccttaacaatgaatcatgagaagtggagttactgtcaaaagaaatgcatgtttttctttttgatacatgttgctttccaaaattacaccgaattgccagagtacttgagaattgccatttctttatatcctcatcaataccaattagcattttttaaatcttggccatatagatagattaaacatgcctcattgttttatttctattcctttagtgattagtaagaactttttaaaaacagctttttaagatataattcatgtaccatatagtccttgcttcaagtgtacagttgagtggtatttagtatattgtgtaaccatcaccacagtcaattctgaaacattttcaccactccaaagagaaacctagtaccattagcagttattccccatttcccctgaacccccatctccagccaaccgctagtctttctacccccatggatgtatctattctgggcatttcctagaaattgaatcacagaatatgtggtcttttgtgactggcttcttttacgaagcatgttttcggagttcatgttgtagtatgtgtggttacttccctttttacggttgaataatattccgttttggttatacaccgtgttttgtttttcccttcatcacttgatgggcatttgaattgtatccactttttggctatttgtaaaaggctgttgtgaacattttttacagttttcgtgtgaacgtgcattttcagttcttttggttgtatacctaaaataggaattgcagaggtcatgtggtaattttatgtttgaccttttgaggaattgccagactgttttccagagtggctgctgccttctacattcccacaccaatgtatgaggattccaggttctccacgtcctggccaccctgttgctattggttagcatttgactttttattatagccatgtggtgggtgtgaagtggtatctcactgtggtcttaacttgcatttccctaatggctaataaggttcaacatcttttcatgtgcttattggccattcgtgtatcttctttgcataaataactgttcagagctttcacttattttttaattgggctattagtctttttattactgagttgtaagagtttttaaaatatgttctagatgcaagtgctttatcagacctatgatttgcaaatattttctctttcactttccactttcacagttcattattttgtaatggtatcctttgaagcataaaagtttaattttttatgaaatcagtttatttttcttttatcacttgcacttttggtgacgtagtaagaaactgcctaatccaaggtcgtgaagatttattctcggttttcttctgtgaatggtacgattgtcactcttacgttgaagtgtttgctccaccttgagttcatttttgagtgggaggtagagaggaggctgcctgcatccttctgcctgggctgtccagtgcctgtgctcctcctcattgtcattgagaaacgatccctccctcccttgtgttgcctcagcaccaaggtgtagaacatttttgtatttgtcgtttctttgtgttttgtgaggtgtctgcattttctttgcccaattttttagtgggatagtatcctttctttcctgagagcatttgcataaaagatcaaccaatttgctcgcagtttttcactttttaaactccattatgtgtttatgttaagaaggctttctcatcctcatgtcctaaaagtttttaaatttttttctccattttaagccatttttattcactttagttcatgtgaatttttttttttttaaataaaagggaagataaggatcaaagatgcctcaccactcttgaatgtaaagcaccacctttaggagacaatcgtcctctcttatctggggtttcactttctggggtttcacttaccagcaatcacaaaataagtgagtgcagtacaataaggtgtttagagagagagagagagagaccacattcatgtagcttttattacagtgtattgttagtaatggttctatttcattattagttaatgttaatctcttactatacctaatttataaattaaactttatcataggtgtgtgtataggaaataatacagtatatataggattcagtactatctgaagtttcaggcatccactgggagttggaacctgaactctgaggataaggggggacttctatatgctaatttgatatacacctatgtctgtttctggacttaagtaaagaaattagctttatagtatgtttcagtatctggcaatatagattgcccctttatttttactgtttttcaaaattttcttggctcttagaaaaacaaaatcacacaaaacgtagattacttttggggcagcttccaccacgatggctttgttctgtgctttaaagggaggttccgaagtactctccctccatcctcagtgcctgcctgccagtgggaactgggcagggaggttgggaaagtctgaaggatgcttctgacagatttgggggccacctgcagttcacatctaactctcatggctcattgaacaccagcctgggagaggaggaaattaagtgtgcccctgtatttgtaagtactttgcaaaactaagctagtcccagacaaatatacagaattccatggggaaagacagagacagggacataagacattttccattccactgttgattcaccctcagaatggcttttgagatgcatgttgtaaacaatatgtagagctcattaaactgtgcatttgtcctccatccagaggtagacaaataacagaacaaattttaaatttgccatatagtttccaaccatcctgttttgacatatggtcaggtgtagtgcaaaagacactattaaaaatacatgccaggctgggcgtggtggctcatgcctgtaatctcagcactttgggaggctgaggtgtgccggtctctttaggtcaggagttcaagaccagcttggccaacatggtgaaaccccatctctactaaaaatacaaaaagtagccaggcgtggtggtgggcatctgtaatcccagctacttgggaggctgaggcaggagaatcgcttgaacccaggaggcagaggttgcagtaagctgaggtggcgccactgcactccagcttaggcgatagagtgagactcccgtctcaaaaaaaaaaaaaaaagtacaagccagttaggtggcaccacacatctgtgatcccagctacatgggaggctgaggtgggaagatcagttgagcccaggaggccagcctgggcaacatagcaagaccttgtctctgaaattttaaaaaaagaatatttttaagtcccaaatgaaatcagtgtgttaattgttggtgaattaagaacagtctggttataatttacttgtagagctaaattttttgcctaatttttatataatttttttggtatgtgatatttctgtactttaagacacagtgagaggacaactgtgtggtctcttcaacaaggtagtgtcaggagtaaaaaaagggaagatacaatagattaagaaccttaaaaacaaccaaatacaggatgtgggccttcttggggtcctgatttgtgaacaccagctctaaaagacatgttttggacaaccagagaaattgggatatgactcagtattagctgatgcccaagaaggatggttctttttcttaggtgtaaggatgatatcctttcctttccatttttctgtatgtttgaaattttcataaacgtaaaagaaagagtcctaaatgaggctcattttgtgtttctcccattcctccatatctccattcctgttgatttctcgatggaccttccaatccacagggataagccagttgagcagtggacttaacaccagtactgcatgcttgcaggggcagctcaaggcctgtttgcttactgaagctttatttacagttataaaaaataaaggaggggccagggattccagtttatgccccataacaagaactagttaaatgagtataaagttaaaagagtaacatgctgttcattacaagtcattccagcccactatctgagacagtttagtggtatggggcagaacatggaaaaaacactaagcaaaacatgtgtgttgcaggggagatacgaggctctattgattatggttcatacgtaaacatttatatagaaaaaagaagggaaaaaaacctatcaacgctttagtagtggactcctggataatgggattttaattgttgttaattatttctgtagtagttctctagctttccaaatttcctgcagtgtatatatatacttttataatcaggaaaaaataaacataagaggctattttctcttaggagttgagccctgcattcatggtgttctgcttctcagctaggatgctgattttgctttgggtccttctcagaattgctttgggtccttctcagacttccaagagttttgctcccaagcccagccacccagcttttctacgtacttattttctagttctcataaaggtaaaatcaaaacagaaaactctataaacttttaaaagtgagctttgattcattaaaaattatttgtatagttttctctcctctttgtgaatatacagttttgattcatacatttttaaaaaatccgagtggcgtactttaggggaggtaatgagggtcgtggaagcaagctggaaatatcagagtactagagaaaattggaaatcccggaactgtggatgatactgttgcacattaggaacacttctcttactgcctaagtctttttcagtaagtttatctgaagaatgcttatagtttgtaaagaagaagactctatgggtccccttttccatttgccttgctgttaaaaggtttgtttggtctggcttgttatttcaggcaactgaaagcaaaccctttctgtatttttagcagatcaccaaatctttaaaaattgtcagctgtctgagtggaaattgtaatgaaaaacaaagcataggacaagaatgcatttcccattgcactgggtggttgtattaaggctaactgtcattattcttttaggagaggtaatggttgctgtgaaatcaagctgcacgcattgtccttctagtcatgtgataatgaaatccaaaaggtggctctgattctttttgctacatcaaatgtttgtagtacattgcaattggtcaggccttggcaaatcttttttttttttttttttttttttttttttttttgagacggagtctcgatctgtcgcccaggctggagtgcggtggcgccatctcagctcactgcaagctccgcctcccgggttcacaccattctcctgcctcagcctcccgagtaggtgggactacaggcacccgccaccacgcctatagtcctaattttttctgttttttagtagagatgaggtctcatcgtgttagccagggtggtcccgatctcctgacctcgtgatccgcctgcctcggcctcccagagtgctgagattacaggcgtgagccaacgcgctcggccaggccttggcaatctttttaattaggttgtaccctatgaaattgccagtgtttggccatttgggacctacagaaacagcagtttcatatggtccagctggtatagtacacagcttttcctgtagttgtgtatattgtagagtgagttggattttggttgctacagtgaagagccagccattgtcttgcttggatgataattgtatacaagtgaacttgaatcagccttgctgctgagttgggttgatttctgtgctgctggatcttcttaaagtcatcagtgggttagagaactacaccagccttctctctgtggtcggtattatccatcagcttttgcttttgtttgagaaataattaatgaatatgacttggaactctgagaggttaaagtatttttattattttgctttattttagtctcagatgcaaacatcagtgggaattgtacccacacaagcaattgcaacaggccccactgcagatcctgaaaaacgcaaactgatacagcagcagctggttctactgcttcatgctcataagtgtcagagacgagagcaagcaaacggagaggttcgggcctgctcgctcccgcattgtcgaaccatgaaaaacgttttgaatcacatgacgcattgtcaggctgggaaagcctgccaaggtaagtgctgtttttggaactcctagtggtagaggtcaggaagaatttgcctttattgttcttacagcagctctctggttcataaggctccggcagcctgagtgctgccttccattgggtgtggcaagacatgttgcgctcacgttccccacgcgacgacagtcaggtgctccaggaagtcttatctgctgaagagaaaggcgatttggttttctgatactctgtgaacttctgctgcttgaagctgtgccccgtatttgttcttttcctccttcctctgtcacggaagacattggtcacttcttgagcactgtctttgttgtgaatgtctagattgtggttttcttttggggcaatgaacatagcacaggcacgtgcaggcacacgcccttcctgcatcccaacatctgtcttggtggcctgcggccttgctcctctgtcctgtgtcttgaggcaagtgcggatgacagcgaagttgtcctgggtgactggcagtgacatggggaactatgcactgtatcatcccagggggggtggtgaactaggcacttcacgtgccctctgtctccccttttaccgcagacacctcatttctaccgaaggaagtgtttcttattaacagctgtactttcctttaatctttattctctttccttctctgcttatgctcataaacttaggggaatctccccctggtctccccgtctcccgttgtgacatttgtgagtccccagagtaaccctgttgtaacagagaagcagagaagggtaaggttagacctttagaagatgaagacggaataaccagggtcagttagcctctcgagtacttcttcaccaagtgcccagagtccctttcagaatctctacagacttctcatttgcttctctatctgtatttcttcactgtagtatttaggtggtttcatcttgaaacataattgaacatttttattttaaatagtgacatcacagaactattatttgttctacctttcattgcagttgttcgctattccaggttgaatagtttttgttttgttttgtgggctgccctttatcacccatccttcataacattgcttctaggggaagttttgtttggatttctcaacagtcaacttacaaactttttggaaaacagcctgtttgtaagttgaggactgcctatactgtgttatggttacacttgttaccattttcttatggaatctggcattataatttaggtataattgaaagtgtgacgatttggatagaaaaataacatctcgttgtttttctggtcatagttgcccattgtgcatcttcacgacaaatcatctctcattggaagaactgcacacgacatgactgtcctgtttgcctccctttgaaaaatgccagtgacaagcgaaaccaacaaagtaagtgagcacgggggcagagaagcttggagatgagaatagaagttgtttctaaagaaaattcagagagtaggtagggagtgggcaggggttatgagccatggagtgcagggtgaggtagggcggacagcagcccaaggtacagccaagctcagagggcaggcgggctctccgtgtcaggaacggctgtgataatgttggaccctgactcactcactgcctctccctctccctgccccctgcatacatgcacttgaagcagcatggaacagcagagtcactttgttcactgagccaacacgaagacatggtatttcctgacagttactccatacgtgagaatttaaattccatgtcgctataatggcagtgacgtcttagggagggggatagaggggatacttcttttggaattggaaagcccttatcctgaagtaaattttgaaggctctgtcagtcagtctgggtcagtataaaatcccacacagacatttatgaaggtttccctctacgtggagctatggtccccagaactctttgtataactaaacgttcactctgcttcacagtgagagcctctgccctagggctgctgcatcctgatcaccccagtcgttttgccgttgtctaggttgtctgtagccctcggcacggctggttacgcagcgatccctgcttgttgggaggtccgcctggggctctggggctccctgccatttgtaggcttcaggcagtaagaaggatgaacctccctcccgtttttcaaccatcttcctgtcattttagaggtaaaactgtggtctttgggtgtgtcattcagtttcggacagctaggaagtgcccttcagtctcctgtcccctctggctggagctgtacccttagcgacccttccagcacagcacagtcttcctcatcttcctccatctcgtctgtgccatcttgccaccctcccctgttttgtgtattacgtgttcattcctctcattcttcttgatcatccttcctcaagaccccgcagctgcctggagaacatgtgctgcttttctttctggttgtttctgagtggcccagggaaagatggaaaaagtgctttgttcctaagagtactgtggagtggcgtgccagtgacagcccccgtggttttccttttactgagtccagcccacctccctctggcggcgagggagtaggcagcgagctgacgctgaccctgcttcctttaaagcagggtgtccctgtcatagagaagagaaatgccagggtaatggggcctgttatctgcctccctacagaagaaccacaacgagtttcctttaaaagccagtttcctggccaggcgcaatggctcacgcctgtaatcccaacactttgggaggccgaggcgggcagatcacctgaggttgggagttggagaccagtctctactaaaaacacaaaattagccgggcgtggtggcgcatgcctgtaattccagctacttgggaggctgaggcaggagaatcacttaaacctgggaggtggaggttgcggtgagccgagatcacgccagtgcactccagcctgggcaacaagggcgaaactccgtctcaaaaaaaaaaaaaaaaaaaaaaaaagccagtttcctaaaagtcagttaaattattctttgattgactaaaatttgaattaataaacaatttccctggacatttcttatataaagtgacattctggaatcctgggtcttctagaaccagatatttgggacagtagttctaatggaatacagtctgtttttcctcccacattactgtaaaagttttttctttagtatattgtgatggctaaatttcttgtgttttagggcacatttcagtaataggctctttaagtgccaaaatattcattgtcaagtttgtagttatacaatattctatgaataatgagctagaattttattcttaactttaatttgggggtgtggctttttgaggatcttttgtttttagtacatactaccatgacagttgtaaactttggtgatttctctttttaagaaacacttatgtggtttttgttttaaaagaaaaaagaagcgtatgtggttttttttttttaaaccatccttataacggcctgagtgttgtgaaaattgattctgtgcatgctctctcaagtggtaaaccacaggttttctactagtcagaatgtaagatattaccaggatgattttataaagtcacaaggaagatttagattaacttgctgcaaggttttggtagtttttttttacaaaagtatgattgacaaggtttcagcaatatcctttttgtaaattttattgttttttctcttctcccaaagcaaattatgcttatcgtgtgtgaactcttgagttaggaacccagagaggaaaatgtgaatctgaccctacgttggcttaaggttgggttttgaagacaatatatatgttaaaaataacgtaagggtgacctccctcaaaggaccgaggtagagacaagtcagtgcaatcagcattcttttcgaggagaattggagcgcacctgactactttgtagagaaaggtgggacttggtggagcccagtgcaaacagaataacaaaggaagaacatttcagacagtggggacagtgtctgcacagtgcacagcttgtgagggcatgcatttgactggactggggttcctgtgcaaacgaggtgaacagaaaggtggactgtgatgagctcctggaagcctcagggactctgccgagacccacctgtgctcgctctgtggagactgccttaggggccccgggactctgctttttaggcagtgtttcccacaggccagcgctggtcttacctgatgcacacttccttggtcagcacatgctccactctcttaacttctgtgattaatgtctctactgagagaaccttccagaatcacctgtggcgctaatctgaggttctttgaaatgaagcccagaccattgattacctttttggcctgtgttgagttttgtttggttggttggtttgttttgagacggagtcttgctctgtcacccagactggcatgcagtggcatagccaagtctcactgcagcctcaacctctcgggctcaagcagtcattccacttcagcctcctgagtacctgggactgcaggcatctgccaccatacctggctaatttttgtattttttgtagagatggggtttcaccatgttgctcaggcttgtctcgaactcctgagctcaagtgatcttcccaccttgacctcccaaaagtcctgggattagaggcgtgagccaccgcgcctggcctcattcgatttttccttgaattgttttttaaagattctgtaatcactgatctcgagttaaccatcccttatagcaatattcaattttttttgaataattaggacttgccaagataagtatcttatgtcagtcctggcatctgacctccagtaaattcagtgcacagagtggcatggttgactgggctttgggacccgtgagcaggttcccctcttggggcttatgctgcctcacttgtgaagttcttgctgctcaaagtgtaggcctcagggaagccatagaggtgctcccaggttgtaagcaataaagaaattgggcccccatttgagacctcttatattaaaacctgcatttttataaaaatcctgggtgattagtgtgcacattaaaatctgagatgcactgctctggatgccttggaagaccaggtatctgggccagtgctggtgagagggtttgagtcattctctgagagagagaccaggggttttccaacctagagtcccccagggactgttgaagcaagtgtgcagggtcggccccagagccagcctaatgcacgcactgtcccggctgcgtcagccatggccccagctgctgcccggcatctccatgagtgtagctcccactgcttcacctggcaacatgttccatctgtaggtgcctcagattgtttaaaacacctccttttggccggacgcagtggctaacgtctgtaatccttgcactttgggaggctgagtgagacaggcgggttgcctgagctcatgttcaacaccagcctgagcaacacagtgaaaccccgtctctactaaaatacaaataattagctgggcatggcagcatgcgcctgtagtcccagctactcggtatcctgaggtgggaggctgaggcaggagaatgacttgatgaacccgggaggcagaggttgcagtgagccaagatcgcaccactgcactccagcctgggcgacagagcaagactacgtctcaaacaaaacaaaacaaaacaaaaaaccaaaacaaaacaaaaaaaaaaacctcctttttttatatggagtcaagatctccgtcctttgaactgccactcatcgaatagcccatcaggtgcccagtgagtgtgtgtggagcaggccctttgttcacttgagggcccttcagagattttcacctcttttgacagactgtagtgggatgggggacagcaaggagcagaatctgaaggctgtagagagaatggtgggcttgattgaccctgacttaagcaccaaagggtcgtgggtgatgtgtttcatctgaacagcttttctccttgctagcaaggagcagtgtcactgcgccagtgtcacttggcttctgaagaaagccttttgcttgagggcttgtggccgtgcctgataggaggctgagtctccagcctggcagtgcctgggttcccctcagtgcttctcttcactgtggtgccccacgcagtgcataggaaggtgccaggtaggaagtaggtcctggcccacacaatgcccgcaaggtacggtggtgccaccagcaactttgtagagatggctgcaggtctgaataaattcttttttttttttttttgagacgaagtctcactctgtcgcccaggctagagtgcagtggcgcgatcttagttcaccgcaacctccgtctccctagttcaagtgattcctgcctcagcctcccgagtagctgggattacaggcacatgccaccatgcctggctactttatgtatttttagcagagatggggtttcaccatgttgtccaggctggtcttgaactcctgacctcaggtgatctccccaccctcatactcccaaagtgctgggattacaggcgtgagccacctgaataaattctagcattgcttttttagtagaaatctaagtgtcttggtatccttgggaatttggttccaggacaccccaggtataccaaaaccaggtggactcaagccctacagctggccttccccatacacaagtttcgcctcccgcaagcactgtgtttctggcctgcgttgggtgaccccgtggctcactctcgtgctggtgaagcatcagctgtagcaactactgctctgcttcatggtctgtctccccctaccctcacaaagtttggagatttgattcatgtccgttttcactgaatttccaaatggagttcagttttattgaggatgattaggggcttaagttgtctgagtaactgagttctttgcatcagcaacatagactgtacagaaaacctcttagtggaacattccttttttcttttgttttttgagacagagtctctctgttgcccaggctggagtgtagtggcgcgatctcagctcactgcaacttctacctcctaggttcaagcggttctcctgcctcagcctcccaagtagctgagatgacaggcacgcaccaccacactcagctaatttttgtatttttaatagagatggggtttcaccatgttattagccaggctggtctcgaactcctgacctcaagtgatccacctgcctcggcctcccaaagtgctgggattacaggcatgagccactgcacccagttacacttggccgtacccggcctcttagtggaacattgtttgtgcatgaagagtggcaggtgagtccgagaaagagcctgctataaaacttggccttttgttcataggtcataggctccttcttcagcaacatcagaaggggtggtgagactaggggatgttggggagctttaaagaggtaaatatccgggacaggagtgttgcctgatgggcccagaagaacccagccactgtgttagtgcattgcaggtgtgttgtgacttcctaaaagttagagctttatgctctagcgaggaaaaaagatgtaaaaatggccaaatgagcacacggccttgacattggaagaagttaagtggcaataatacagaaaggataaatagagaaacttcatccttagggatgccaggtagatggaccaatctccgtgcatttctgttcagttccaagacactccatgggctgcgctgcgagggcccacgatgtgctggccgctgcgctatagctggcacgtcccctggactctgcacagcaggttacgtggcccatgtggcaggtggtgaagagcaaaaccgaatttgacattaatcccacctttcagggatgcacagggaacgtgacatgagcctgattttccctgtcccagggttccaaggtgcagtttgggtgcattaggtgattattagataatctgttgtccctaggctcagggaatgcagagattgtgcccacaccatgtctgggagcctggcagagtgtactcactgagtctgtcacgtgagtgagtgaatacacgaagggtcagtgtctaaagacaagcgggtacaggagtcactgtgggatttcagagagggattgggaataccaccatggagcacttggagcaccttgaggttgcagtacagttgatggtggcttatacatagtgactcccctttcagtcagccatcaccctgcagtgaatgcctgagcacccttacccttcagtatttgtgtcatttcatgtaatagcatcatttggacttcaaattcagccatgcttaaatggcagagaccttctttatttgttcataattaatttcctttgcttctgaattttagaaatgatgagttccaaatgcttctcataggtatattttcttttaaaataaaaatataataatgtttacgtttagaaaatgaatgcctctaacacaaaatgcagtgaccgtgtcagcagcttccgtgggaggcctatgtgagtatgaggcgttggctgccctgtaagtgctgtgagcttaggagtggcattcactgtaaggtggggcattttagttaagtagatggcacttggggaggtgtggataaaagagaaatgtagtaggaagaagtcaataaagggtttacgggaaatggaaggctccatactttgtttcttttaagttcttctccacagtccatcaccatgtgtgttaaatatagtgtagccctgttcttccttacagcgcaaggttgtagaaaaataaactatcctaccactgttaactttgatttctataccatagtgcttcttaaaaatgtaggatgtcggtttcagaagtatggtggacacatgtttaaagttttggggagtagtaagtattagaatacttttaaaggtattgtgcgtgacttacttcagctacacacttgtcataaagtgcaccttgggagttgcttttcatttatgttaatgagtgcttggtgtatgtagttgtgtctgatgagtgttaatgagttgatctgaatatcattattagaaaagttaatagtatggaaagtataattaccaggaattttttttcacacattttagtttaattaagttgctctggtaggtattgggtttattataggtgtgctgatggttgaatgtgagaatattactgttacacatagtggttgggatttgaaagaaaggctttgtggtcgtgttttatgtatcaaaaatggtgtgttatagcaacaacactataagatgctatttttaacatgactctaaaatttgtggaagttagaaaggaactcaaaaataggaataaatggtatcatatagaacttctgccatatgataaattttcacacaacagcatttgggttgttgcgacagatgagggggcaggcaaacaggtaacaggtgggtaggtaggtgggtagatgaattgaccttgaaatgtccaagttgatgcaagtttggagttgtctctccattaccttggaagccctttgggatggagctccttatgttgacaccagtttttcctttagtctcctggggttagctagctggatggggcagcttccctgccagccagcagtgggcctcagtagcagaagctgactttggccacgtgaggcagagccacctcctgaatatcagaggtgctgaggtagcccctggataataagacccatgcagaattgcgaagcctcactccaaccttaatttcaaacagctcagtcagtcaatcaatcaagtacagtatttcttgaacagcttcatgtagccggagagctcagcatggtgctctgctgcataggaatcccatcagaaggatatgtccatgctgtcattgtttgtgtatgtttcaaggacttgcaattatgtgatttggaagagcacattatagatttattaatcaaaactgaccgaccaggtatcatctctgctccttctcttaagccctctgtacctgtgcaggtgagcagtgaaggacagggttggggtcaacaggagggggctcctctgttcatctcagaggtgtctgctggtccccagagaatcagacgtttcccttgtcatacatttgccactccctggaactgacttcttgaggagtctctaggttttaagacataataatttttttcaagtgttatctgtgagattttatggtctgttgcatgctaagatagaaacttgacttttctttaactttttgttcctcacttactgctaggcagaataaatgagtccttcagcacagttcctttctccctaggcttgtttactgctttatgatattcatgtgtagtattttgatgaaatgtatttgcttctcaatagtttttaaatcattcgtgggcttctcccttttacttacctctcgtttttgtctgtctgtctgtttgtcgttatagccatcctggggtctccagctagtggaattcaaaacacaattggttctgttggcacagggcaacagaatgccacttctttaagtaacccaaatcccatagaccccagctccatgcagcgagcctatgctgctctcggactcccctacatgaaccagccccagacgcagctgcagcctcaggttcctggccagcaaccagcacagcctcaaacccaccagcagatgaggactctcaaccccctgggtaggtgaaggaactctcaacttcgttcttacttgtccacatgcagcaaagggaatggagtgatggaacccaaggcagttttcagtttgttttgtgttttttactacggtggttgaaataaaaaatctcccaggaaaaagctgaagtatctgatgcaaggaaaatgttacatgcttataaaaagagcagcatttgcaaatgaagcaatgtttttgttgcttgctgtgccacttctgtctggacggttttcataaagaatgtgccatgtgcctcagaatgcagatctcacaagtcaggatgctgactggacgcctcatgctgactgttgtcatttatttgttggagtacttgtgtttgccagtttctcacacatcttggttagggtctacccctcagttggaagtgaccagcctggacttcagcaggttaatgacaatgacaggagtcctggaaactcttggctcaggctgctggacatgtcatggtttcttttgtcaccccagcccattatttgccagcctttgatcgtttgctcacacatcgccatgattttgccatttctgcatatggtttccttaatatttttctttaagtggacacagtccctttacatttaggcttaagctaagcagtgatgtctgtgaagtcaagactggctgactagttgtgctagttttgttctttccctaatagagtaactattttacacttaaaaattactccttaaaatatgcccagctaaagtcatcttacttgttgctttctggaaaacaactgccctaatgaatgtctaactaatactggccaggagactgagttagaatcctgagacccaagtgttaatctaactcctctcctgttgatggtataatttgggactagcttaaccttttttagtctcagctttcgtttcctttaataggaagattgtagacaaattgacctctatatttttttcctgagcttaatttctatgattttattttctgatattgggggtggagacacagaggtgtgtgtcagtgcagctgagtcactcaggagcgatactaatgaagcagaatgaaagtaagaggctgcatgtgggtcatttataactttttcacttagatagcagctaacctccataaacacaccttactttggttacaaagtagagtggggagggtgtctactgattatttgtgcacgttgattaccattattgaaaatatgacactcagagttcctgccgcagtgcttactataactggccagaatcacttatttaaataaccaccaattgtttatatggtggcatgttggttatctgtcatcaaaactttgaagtatatattaaaatttaactgttgattgatttcttttctgtctttaaaggaaataatccaatgaacattccagcaggaggaataacaacagatcagcagcccccaaacttgatttcagaatcagctcttccgacttccctgggggccacaaagtaagaccctgtttcagatctgagtgacagtccaacaggagcatggactgagaaccacacaaaactgattctttctaaatgtgtggcagagaaaatagtttaaatggggtggtgaggggtgaatgctgttttcctttttttctttaattataaatgtagagcagataatagattaaaacatagtttaagttttatttatttacatcacttggctctcctgacttaaacttttaaaagtcacatgtggtggcagaagaaccttactagacaaagtgtgtttgagtcacttcagtagatggatgaagtgtctttatttcctccttagcccactgatgaacgatggctccaactctggtaacattggaaccctcagcactataccaacagcagctcctccttctagcaccggtgtaaggaaaggctggcacgaacatgtcactcaggacctgcggagccatctagtgcataaactgtacgtaacagttttgcagtttcatagatgtttgattttattcctgtgttgcccattggctaccagatgacagtaccctaggagcctatacaagtcacgtgcttatttagggagccactctcactgctggtagagttctggcagccctaggcaggccagagattcccacactctatgtcctcggtgagcgggggtgacaaagagagcattggtggctctgtactgccgaggggcactgacttgcagcccctatcaccgaggcaaagaccctcagtgcagcccggccttaatgtgcttctgcactttaggctgcgtgagggggctggggttagctcaagagcctcaccttattttgtagttccagattctagttgtggagacccctcagaattggaaaagtttagagtatagatggcatgtcattatcaccttacagttagttaacataacggaaagttaacagttaacttttttttttttttttttttttgagacagagtctcgctctgttgcttagactggagtgcagtggcacagtcttagctcactgcaacctccgcctcccaggttcaagtgattctcctgcctcagcctcccgagtacctgggattacaagcacgtgccaccacccccagctactttttgtgtttttggtagagacagggtttcaccacgctggccaggctggtctcaaactcctgacctcaagtgatccgtccacctcagcctcccgaagtgctggggttatgagccaccgcacccggcctttttgttgttgttgttgttgagagagagagacggagtcttgccaggttacccaagctggtctcaaactcctggcctcaagtaatcctcttgccttggcctcccaaagtgctgggtggcatgagccaccacaccaagcctaacgttgttgagctagttattttaaatgagctagacttacattccctttgagttttttcccttccttattttgatcaaattttttttagtaataagtagtttaaaaattagggatttgaaaatcgtgttattctggaaatgacccagcacatacttgttaatagcaaaatattgatgtgtttgatgtgtagataagttgataggtcaggattgtctccagggagttaacttcattcatgtattgacatgcgaggcaagagaggcttggcatttctctccacactgtattgccaccagagatacatgatcctgattttgtagtgcttatttgatggcattggaagtagcttcaggccaggtgcagtggcccccacgtgtaattccagtgctttgggaggctgaggtgggaggattatgtgagcccaggagttcaggccagccggggcaacataataaaactccatctctacagaaaatttaaaaattagccaggcatggtggtgtgcacctgtacttcccagcttactttagaggctgaggtgggaagatcattgagcccaggagttcaaagttgcagtgagctatgatcatgccactgtactccagcctgggcgatagagcaagaccctgtgtcttttttttttttttcttctttttttggtatggagtctgactctgtcgcccaggctggagtgcaatggcacgatctcagctcactgcaacctctgcctcccgggttcaagcaattctcttgcctcagcctcccgagtagctgggattacaggcatccaccaccatgcccagctaatttttgtatttttagtagagacgggatttcaccacgttggccaggcagatctcaaactgctgacctcaggtgattctcccgcctcagcctcccaaagtgctgggattacaagcgtgagccaccgcgcctggacgaaaccccatgtctttaaaaaaaagaagaaaaaaaaaagtagtttgatagatgtgttatcctttcagcgtccaagccatcttcccaacacctgatcccgcagctctaaaggatcgccgcatggaaaacctggtagcctatgctaagaaagtggaaggggacatgtacgagtctgccaacagcagggtaggttgctgtttaccgtgctctggcctctacagcatctgtagtagacagcactacatttgtctgctttgttatctggaaatagtggaatctatgtagttgggacagactcctccccttgaggccactgaccaaggagacttcccagataagacacaaatctcctgcagaactctcttgattagctacattggtgcatggagtatataaatttacattatatccatgggatatatttttcatagtaggtggtgttgtaatattgttagcatcagtgaatattcaagaagttcatttgaatgaaatggaacatgtattaagtacctactatttgatatgtcctataaagtcattgggaattcagcaagaatgtgggcttctggtgtatcaggtatttgcatactacttttgccagtgtactcaatgaggaagttcattagttagaacctacaacacagatcattcagttgctttttacagttttaactgtttcatattgaatattattgctttttaggatgaatattatcacttattagcagagaaaatctacaagatacaaaaagaactagaagaaaaacggaggtcgcgtttacataaacaaggcatcttggggaaccagccagccttaccagccccgggggctcagccccctgtgattccacaggcacaacctgtgagacctccaagtaaggattttatttcctactgccatcccttagcctgtttccttggttttccttcgtgtttggggtgtatttctaagaacagagaattagaatatctgatgcatgccctgcagaagctgttgatgtggcagtggccctgaccacctgcctcaggctgtgttgggacactgagtttctctcttgggaaggccctttacagggtgcgctggcattggaacacacgtgcttttggacctattggctgttttcccttttaagtttgaagtcctaataagaaatttcctattcctgaatcaaggattatattaaataactagggtggttttgtttttgtttttgttttgccaccatagatggacccctgtccctgccagtgaatcgcatgcaagtttctcaaggtattgaactgtttgtggtgaatcatattttagttttacattcaacagccataactttcactgttttttcctctccccctgtatatttctttctaaccctttcttctttccattcctttttgctgataagcagaattcagttctacaggtagtatggatatgtttatagtatgaagtttggagattataggaaagatcttccaagagataagaagcagtatttagctatttatttatttatttatttctattttattttattttatttttatttttttgagatggagtctcgctctgtcgcccaggctggagtgcagtggctccatcttggctcactgcaagctccgcctcctgggttcacaccattctcctgcctcagcctcctgagtagctgggactacaggcgcccaccaccacgcgtggctaattttttgtatttttaatagagacggggtttcaccgtgttagccaggatggtcttgatctccgtgatccgtccacctcagcctcccaaagtgctgggattacaggagtgagccactgcacccggccttagctttttattttactttattttcttttcttttatttttttgagacagagccttactttgttgcccaggctggagtgcagtggcacgatctgggctcactgcaagctccgcctcccgggttcatgccattctcctgcctcagcctccatagtagctgagactacaggcacctgccaccacgcccagctaattttttgtatctttttttttagtagagatggggtttcaccatgttagccaggatggtctcaatcgcgtgaacttgtgatctgcccaccttggccttccaaagtgctgggattacaggcatgagccactgcacccggccagctttttatttttttaatggatggtgaagggggtgtggtacgttactcttaggaagagtccgagaaagaagcaccctagatgtggggagggagtgcttctgaatgctgagaaggagaagcatgcaagacagtcctagactgctgagcacttgcagaggctgaaatggggacggcacgggctgctcttggccctaggggttaagcccagctggctggatgtcaacttctggagagagtgtacacacaggtcctgtgccaggttggggtgtcagcagctgtctcaacaaccttgaaaggttcttaagtagagagcctctggtttttggttggttgaagcagtgatttttattttggggcagggagcatttgaaaaccctgtagctcttgaccattgagacccaagcaggaggacatttttccaggttgtgaaacaaggtggtgacattatccagaagactctaaggaaagaggctttgctcaggctttgatttttgaaagaaatcaaggagtcaggctgggcacagtggctcacacctgtaatcccagcactttgggaggccgaagcaggaggatcacttgaggtcaggagtttgagaccagcctagccaacatggtgaaacccccgtctctattaaaaatacaaaatttagccaggcatggtggtgcacacctgtaatcccagctacgcgggaggctgaggcaggagaattgcttgaacccaggaggcggaggctgcagtgagttgagatcacaccactgcactccagcctgggcaacaagagcgaaatctcatctcaaaaaaaaaaaagaaagaaatcaaggagtcagagaaattgagccttgggaaagtggctggatgctgtgttggggattggtccaggacttcagcctggataggaagatgctgctggtgtggggtatgatgcccctgctgtttaccagcagaatattggaatagatgttttctagttatgcacttagcaacctccctaccagcacatctgggtaaatacagatttctttaagtgctgttccttagtaattgtttttcattttgtttaaaaaaattctcaaggagtggggaagcttacattatagactccctggaaagtcttcctggtctgcatcggcactccgttatttgagggtaccatttctaggtagccattgaaggtagtgctccgtgagtcatcctttgagccttctcatgactacagcagcgctaaggcagcaccttccagaaattctctaaagggttctgtcagattctagtgttggtcctaagactaatttgaactggtgcttctttagaactcagagtttacagagtattattggaaattggaaggaactagacaccgcagtctggagacacttactggctgtgaagtgtctttcagtgatgtggtgttcctgtaaactacaggaggctaaggttgaggacggctgacccttgggcacttcttaatgcttaaggtgcttgcaaaattaaaagaacatttggagacttagcacagattctaacaatgaatgtaaacccagcaaggagctgggaatcctcggatgatgggcgtcagctgctccagaggcattaggtatgggtgtgcacagaagcttgccctggtctctggaaacatctcttctgtagcttgtgagggtgctgtcctttcagggcacctcctcaccctctttgttgctatgacactttggtactgtgccctctggctcagctctaccacagcctcgtttaatgtctcacttgttcctgtcttacccaaccttatgccttcatgtcctcgtccttccctggtacccctcaccatgccaccgtcaccacccccacattgatgccgttttctctggatatggagaagtctgttccttcatcatcttcattgattaattgggtgatttcttttcagttttctgttgcctgtgcgttccatcttattttacttaagagtttatttagcaagttgtaattctgttttcctgtgggtgcttttcctaatgaaccgttgtgggtacatttacagggatgaattcatttaaccccatgtccttggggaacgtccagttgccacaagcacccatgggacctcgtgcagcctccccaatgaaccactctgtccagatgaacagcatgggctcagtgccaggggtaagtgttctctttcgctgtgctgcagatagccctccctctcacatggaacattatctaagcagcagaattcatgtcacttgagaatcctgtggttcttgttcctttgaatttgggttatgctttatttctttcatctctcattttaaaaaaattattactacacagaattatttgactgttagttattttattggaataacaaattcataggaatgtgtggctttgtgagaatgtgggagttccaaggctggagaaggcagcctcagatatgtggccagcagggaattgtcagcatctgttgactgagagctcgctgttccgaggctgctttctaaacactttagagaactcataggcatgtcttaaactttaaattatagcctgctattgatttctattcagaggacattttgaagctggctcatttgagagattgcctgagaaagtgtgtaaggtgcccaggagcgcgggagttcttagcaagtggtggtctcttcccatgaggaagggcaggatgtgagccctgtgcttgccatcctctggggttgtgaagccttggatcattctggctcaccttgaaaactctggccgtcagcttccgaactacagctctggtggtgcttgttgtctcgtagatggccatttctccttcccgaatgcctcagcctccgaacatgatgggtgcacacaccaacaacatgatggcccaggcgcccgctcagagccagtttctgccacagaaccagttcccgtcatccagcggggcgatgagtgtgggcatggggcagccgccagcccaaacaggcgtgtcacaggtactgtgccccactgggaccgtggctccctaggaaataaaattcttgtgttaagttttggttttttttttctgtcttccttcgtggaaattaaaattccagaatgcacatttcatgtctttgtatcagcttctctttgttttctccacctttgtcctgtagtccttaactcgtttggaatttctcttatcctttctgggttaactatatgcaaaagtgggaatggatttagaatttttggtttgtatgcttttgtgttttgatctttgagtttttgttttcttattttttgtttgtgtattttaaattctaactttaacgtgaccctgagaggcattaggattttaaaaagcgagtgagaaggacccatgaattcactcttgatgatttggcttttgtttcttttgacctgtctccactgccaggtgaaatcaagctaacagaatcatttcaatagttcccttcttgttaaatgtttttaatttctcaatctagagctgaagaaattgattttccatttattccttccttttttcctcttttgttagttgtagtgcgtatcattgctactgtatacaaaatatacatgtatttaaaacacaccaaatcctccctaaaagataaaattcttgttttaagtttttttttgtttgtttgtctgttttaagacagggtctcgttttgttgcccagactggagtgcagtggtacaatctcggctctgcaacctccgcctcccgggttcaagcgattctcctgcctaagcctgccaagtacctggggttacagatgcccgccaccacacccagctaatttttttttttttttttttttttgtatttttagtagagacgggatttcaccatgttggccaggctgatctcgatctcctgacctcaggtgatccacccacctcggcctcccaaagtgctgggattacaggagtaagctaccgtacccagccttgttttgagtttttaatgtgaaataatgctgcataagtcattattatatattagatttcctcactaaatgattattcttaactttccataacatttcatttctctagaacaaggattagcaaacttcgtgtaaagggccagatactaaatattttcagctttgcaggccattcaatcttggttttcatcacttctgttcttgtagtgcagaagctgctgtggtacataaatgaggtggctgtgtgccaataaagctttatttacagaaacaagcagctcagtgtgtttgccctgggagattgccaacccctgctctagaacagtgattcagaatcatttttaaaatgttcacaaataattctgaagtgtatccccagtatagaaccactgcactgaaacagttctctttcagtaactaacgtgtgtgtgtgtgtgtgtgtgtgtgtgtgtgtgtgtgtttgtgtttcagagagaattttttttttaaatttttaattgttaagggtacttatggatgtatatatttatggtcaataacttttattcttatttttatttatttattttatagtccccagggaagaagcaacttaaaaaaaaaatacctttttctaagctaagcttagaaaatgttaaagaacattgggtacatgttatagaacatgaagcttataggctgggtcaatgtacagtagctcccccaatctgtcatttcactttctgaggtttcagttacctggggtcaactgtggtccaaaaatattaaatgggaaattctgggaataaacaattcataaattttaaattaattagctaggcatggtattgcacgcctgtaatcccagctactgaggaggctgaggcaggagaatcactggaacccgggagatggaggttgcagtgagccaagatcatgccattgcactccagactgggtgacagagcgagactctgtctttttttttttaaaaaaaaaaaaaaaaagttttaaattgagtgccattccaagttgcatgatgaattctgtcaccatcccactctgtgcccccagggatgtgaatcatttatttgtccagcatttccacactgtagacactacccacctcttagtcactgagtgtccaccttggttgtcagatccaaaaatcttggtaaatattgggttcagtactatccgcagtttcaggcgttccaagactgggggtcttggaatgtatccgagtggatatgaggggactgctgtagatgtgtgtgtttaagccataagtttcaatggttgttttaattatataaatcagactataagaaacgtgtgtagttttaccgttattgaggagtgcccattacaagtgtatagctcgatgaattttcacaagcagaacactcccaagaaaatgtgattaaattcccatacatttggctgggcgcggtggctcacgcctgtaatcccagcactttggaaggccgaggcgggaggatcacttgaggtcaggagtttgagaccagcctggacaacatggcaaaacccgatctctactaaaaacagaaaaattagctgggcgtggtgacgggcacctgtaatccctgctactcgagaagctgagacaggagaattgcttgaacccaggaggcggaggctgcagtgagccgagatcgcaccattgcattgcagcctgggcgacaagagtgaaactgtctcaaaaaaaaaaatttttttttcatacatttaatttttcaaatgtttcatcacattttcaaacgggggaaataattttaccatactctgtccatttctggtagggacaggtgcctggtgctgctcttcctaaccctctcaacatgctggggcctcaggccagccagctaccttgccctccagtgacacagtcaccactgcacccaacaccgcctcctgcttccacggctgctggcatgccatctctccagcacacgacaccacctgggatgactcctccccagccagcagctcccactcagccatcaactcctgtgtcgtcttccgggcagactcccaccccgactcctggctcagtgcccagtgctacccaaacccagagcacccctacagtccaggcagcagcccaggcccaggtgaccccgcagcctcaaaccccagttcagcccccgtctgtggctacccctcagtcatcgcagcaacagccgacgcctgtgcacgcccagcctcctggcacaccggtaagcctctctgtctctgctgtttttgggccaagactcttagaagataattttcccataaaaattgtgtgtcaggccaggcgcggtggttcacacctataatttcagcaccttgggaggccaaggtgggagaatcacttgagcccatgagttcaagaccatcctgggcaacatagtgagacctcgtctccagcaaaaaaaaattttttttaaccagacaagcatggtggtgtgtgcctgtagtcctgtagtcccagccactcagaaggcttaggtgggaagatcacttgagcctaggaggtacaggttacagtgagccaagatcacgccactgtactccagcctgggcaacagagcgagacattgtcatcttttgtttgtttacttaaaactccattgaggctgggcgcggtggttcacgcctgtaatcccactactttgggaggctgaggcaggcggatcaccggagctcaggagttcgagaccagcctggccaaagttgtgaaaccttgtctctacaaaaatataaaaattagccgggcatgatggctggtgcctgtattcccagctactcgggaggctgaggcgggagaatcgcttgagcctgggaggcagaaattgtatcgagccgagattgcgccattgtactccagcctaggtgacagagtgagactccgtctcaaaaaaaaaaaaattccattgagtaagaatttgcaaattaggaattcttttagtggttccttcgtgtaatgttcatttactccaccagcacccgtgttcctaccgttcacacaggctgggtaacactgtctttgggtaggcacttgatttccctcccttcagatgtgcttaggcattcataattcagccttttaccatacacattaaccaccatattgaagggaattaatttcaaaatatgagatttcatgatttagctagaaaacttcgagaaaataaatttatgtcaaagtttgaaaagctctgctgtttcctctgcctttgtggcaagacctgagttgtacctctggctgctgttacctccctctagaactcattcctactttaacccctgttcttcggtttcacagaagggcacctgctggatcagtattgagaaatgttaatgggaaattgtaggttgcatgagcagcatagttgaagatcatttatgttaccttgcttactgaagtcagtgctttcggttttttcacagctttcccaggcagcagccagcattgataacagagtccctaccccctcctcggtggccagcgcagaaaccaattcccagcagccaggacctgacgtacctgtgctggaaatgaagacggagacccaagcagaggacactgagcccgatcctggtgaatccaaaggggagcccaggtctgaggtgggtgccgctccctaggaatgcattgactgcgtatcgcaactttacccaggtgtcctcgggcgaggcttggagcctgccatgggtatccctgactttagttaaaatattctgtttgaatgtgggttcggggtttggtgtataggaaattgattgaaaacagcttggtttttcatttttaaatatgaggggtgggtttattttgcccgaaatgaagaatactggcttatatttgaaatacttgaatcatccaacagccttttattttatgttctccattcatttctagttctgcagaggtagactacagaaggggtggtggattcatttactaattaacctatggcagaagctgaaagctggcagaccgtgggctggatccagcctctaaatgtgtttggcccacacaataccttaaaaatcaggaaattgcaaataaaactctagatttctggcttttcttgaaaaatgagatgctttcagcattgtgcctgcatccctgtgtgacagcagtctggttgtgagcaccaactgtagtgggctctccaattagccacagtccccactgctccttcctgtctcataccacacctgcctctgagaaggacttttggtccctgccccaactttcaaggagatttttattccaaattagaaatatctgtagtgaaaaatctgagtatgtgcaatttttaaagcagttttacatttaaaaacttttaaattaggctgggagctgtggctcacacctgtaatcccagcactttgggaggccgaggcaggtggatcacttgaggtcaggagttcgagaccagcctcgccaacatgatgaaaccccatatctaccaagaatataaaaaattagccgagtgtggtggcacacacgtgtaatcccagctactcgggaggctgaggcaggagaattgctagaacccaggagggggaggttgcagtgagccaagatcttgccattgcactccagcctgggtgttagactctgtctcaaaaaaaaaaaaaaaaaaaaaaaaaaaaaaaaacacttttaaatttaggaccataattgcactgactctgtgctgaagcgacttaatgaacaccaagtactttatttcttcttccggaagagaagaggaatcataaatgcaactctgactagaggaaggttttaacaaacctgttttaggcttgtaagagtcttcccgtgaggttgcggtaacataaaggtgtttgatattcatatgttatctgtaatgtttttctcaagatgatggaggaggatttgcaaggagcttcccaagttaaagaagaaacagacatagcagagcagaaatcagaaccaatggaagtggatgaaaagaaacctgaagtgaaagtagaagttaaagaggaagaagagagtagcagtaacggcacagcctctcagtcaacatctccttcgcagccgcgcaaaaaaagtaggccatttattcattaccttattaaagcatgctgcttttccacggtgttaggattccatgtggaggattaaaagctaaagtagaaacataattctatctgcccttttacctttcttgcctgccattccccagactttcccctgcagaaacactcaggctgagcaggacccctgccctgtgcctgtggggctcatggcaggagtgagagatgagctgctgctccgagggcacccaggctgcagagctgtcttctgatggtgctggcaggggccgagttgaaatgtgtctgggtccttgagcaggttaaggagcttggctttactcataaaagtataaagaaccagtgatgtatgtgagtaggagaataaccaaaaaagccataatttaaggaagatggtcattatgacagcacagggtgacttggaggcagaaggtttctgcaggtgcagtgaggaagctgagcatgcagagtgaggggcagggtggcgcctagggaccctgtgtagtgagacatgggggaggggtaggttaggcatctttggggtctgagatgtgtgaggtaagcccgcctcacagtggaagttggatggaatccatttgagatgtatccacagtaaagagataacagggtatcagaaaattgtcaagtgaaccttagaaatgggagacaggactcagaaagtccaaggctgcagatgacacttttgggaaagattgcagagaaatgttagagactgagaccatgttactctgcagctggaagggaccctggagagtgtggagtacagtgaatctcagggctctttatactcttagaaattgagggccccagagagttgttgtgtggattatctatcattgcttactctactggaaactaaagttgagaaatttgagtacagtggcttacacctgtaatcccagcactttgggaggctgagatgggaggcttgcttgatgctgggagttcaaaaccagcctgagcaacatagcaaggctccatctctacaaaactaaaataaaactagctaagtgtggtggtgcacgcctataattctagctgctcgagaagcggaagcggcaggattgcctgagcctaggagtttgaggctgcagtgagcccagatcacatcactgcactctagcctgggagacaaaagtgagattgttgtctgaaaaaaaaaaagagaaaaatttttaaatatttagttcatttaaaatagtctgttacatggcacccatagaaaacatttatatgaaaaacaatttttccaaaacaaaaataagtaagaatagtggcgttattaagggtatctgcctctgcatttactgtgttgtgattggttattttggttgaagtgtatgaagaaaatcctgtagttggtaaagggagaagtattttcgtagccctttcagctgattgtggatattctttgatactataccaaaattcagccagtgaaggtttcttaaaggttagttgcgacattgaaccagaatctatagcactggatttttcatagtctgtgacattagaatccattgatccatcttgtacttggaatggatcttttgtgcttgcatgatttttttttcaattgacacttaagttctgcagattttccatatgttgacatatttcactatacagtgtcaaaaaaaaatcaacatttgttaataccaccatcagtctcttcaaacaagtcttaccaacttagaaaagcagggcgtgcatggtggctcacacccgtaatctcagcattttgggaggctgagggggaaggattgcttgagcccaggaattcagggtctatgattgcaccactgcactctagcctggagctcaggagttcgagagcagcctaggcaacatggcgaaacctaatctctattaaaaaaaaattagctgggtatggtagtgcatgcctgtagctgcagctactcgagaggttgaggtgggagaatcacctgagcctgggaggtcaaagatgcactgagccttgatcatgtcactgtactccagcctaagtgacagagtgaggccctgtctcaaaaaataatactaataataaattttgagaagctgtgaagcccatgtacaagttttccaaagcatttgatttttttatgaaagcccaaattttagcattggcaacaaatactgtcagttgtccttgaagtaactggccctctttgttcatttctgagaaaatgtctgacatataaccagagcttagtaactatagcttatctctcagtcattcctgaaagttttaatgtgctccacgagggcaagcagctacttcagctgtaaattccaacacttgcccaagtactgcctcctgatgtggccactgtgcctatgcagcgcacatcttttattctgtgtgaggagataggcagaatgtttcatcacacagaataaaagacatgtaccaggcggccagacgcggtgcctcacacctgtaatccccgcactttcggaggccaaggcaggcagatcacgaggtcagcagatcaggaccatcctggctaatacggtgaaaccccgtctctactaaacaaaatacaaaaaattatgcgggcgtggtggcgggcgcctgtagtcccagctgctcgggaggctgaggcaggagaatggtgtgaacccaggaggcagagcttgtagtgagccgagatactgcactccagcctgggagacagagcgagacgccgtctcaaaaaacaaaaacaaaaacaaaaacaaaacaaaaaaaaaaaccacacacatgtaccaaacgcttaagatttaatacaaggaatactttttactatctcatcaagaatattttttcagccaggtgtggtggctcacatctgtaatctcagcactttggaaggccaaagtgggaggatcacttgaagccaggagttcaagactagcctgggcaacatagtaagaccctgtctctacaaaaaattaaaaatcagccaagtgtggtggtgcatgcctgtagtcctggctactcaggaggctgaggcagcaggatcacttgagctcaggggtccaaggctgcagcaagctgtgatgccactgttggactccagcctggacaacagagcaaggccctatctcaaaaataaattaattaattaagaaatgagtggacacagtggctcccacctataatcccagcactttgggaggcgaacacaggaggattacttatggccaggcgttcaagaccagcctgggcaacgtagtgagaccctgtctctacaaaacagtttaaaaattagccaggtgtggtggtgcacctgtagtcccaatggctcaggaggctgaggtgggaagattgcttgagcccaggaggttgaggctgtagtgaaccatgattgtgccagtgcgttctagcctggatgagagagtgagaccctgtcttaaaaataaagaatattttttcttggctgggagcagtggctcatgcctataatccaaggactttgggaggctaaggcaggaggaatacttgaggccaggagttcaagccagcctgggcaacatagcaagaacccatctctacccaaaaaaaagaagaaaaattttaaacaaattttcttaagcatggctggtattttttttcttgtgactgtacagcagcagcagtgtgtgtgataacagtagagtttggtgatgttggctttcttttcctttgtttttgctttttagctgggtgtggcagcatgcgcctgtagtcccagctactcggaaggctgaggcaggagaatcacttgaacccaggaggtggaggctgcagtgagccgagattatgccactgcactccagcctgggcaacagagtgagactccttctcaaaaaaaaaaaaaaaaaagattgcttttttcccatctgtgcagatgtccaacatagtgcaaaaggcaaatgataatttagtgttataaaaattgtttcaggccgggcgcagtggctcacacctgtaatcccaacactttgggaagctgaggcgggtggatcacctgaggtcaggagttccagaccagcctggccaacatggcgaaaccccgtctctactaaaaatacaaaaattagtcgggcctggtggcgcatgcctgtaatcccaactactcaggaggctgaggcagaagaatcacttgaacccaggaggcggcagaggttgcagtgagctgagatcgtgccattgcactccagcctgggcaacaagagagaaacttcgtctcaaaacaaaattgtttcaggctgggctttggggttcacacctgcaactccagcacttttggaggctgaggtgggaagatcacttgaggcccagagttcaagaccagcctgggcaacatggtgagaccctgtctctgtagaaaaaaataagaaaatagctggttatggtggtgcatgcttatagtccctcatgctactcatgaggctgaattaggagggttgcttgagcctaggaggtcaagtttgcatgcagtgggctgtgattacgctactgcactccagaagacctcgtctcaaaaaaaaaaaaaaaattggtttcagttttggtgaaatagttttcatcttacagcacatagaagggcctagggcagtgctataacttgagcacctaaaatgtgaccagggtggccgggcgtggtggctcacccctataatcacagcactttgggaggccgaggcgggcggatcacgaggtcgggagatcgagaccatcctggctaatacagtgaaaccctgtctctactaaaagtacaaaaaattagccggccatggtgacaggcgcctgtagtcccagcgactcgggaggctgaggcaggagaatggcatgaacctgggaggcggagcttgcagtgagccgagatcgcgccactgcactccagcctgggcgacagagcaagactccgtctcaaaaaaataaaaatgtgaccagggtgaccgaggaactgagttttttattttttgtaatattattcgtttggtaaaatttcagtagtcacaggggctggggactgcgatatgagacagcagcctccaagggctcgagagccgcgtttttgggagatgctggtgcgctgcaacagccctgccgcgtggagcaggtcctcgggccagaggaggggagcggcgcagttcacatacactcctgacttcacttctgcacatatgggatcttcttacagaaaggtgctggtgaagacaggagtctgaaaatgctctcctcggccaggcaccgtggctcacgcctgtaatcccagcactttgggggccgagattgcaccactgcactccagcctgggtgacagcgcgagactccatctcaaaaaaaaaaaaaaaaaaaaggaaagaaaatgctctcctcagcacggaatttgaatagttatttaatgaatgaataaatgatcaaccaaagtgacacttgtttcaggccctgtcactcccgattaccactggggcggtgacagggtctgcaggccttctccgtgcagaggcccagtgatccacgctgtgggctttgtgcgtcctgaggcctctgttaccactcctcagtgctgccactgtggcacggaggcagctacagatcctatataaacgaatgagcacagctatgtgccaataaagctgtatttttggagactaacacttgaattttgtgtgattttcacatgtcatgaaatagtattcttttctttttcttctgccaaacattaaacaatgtgaaatccattgttagctcttgggccatacagaaaagcaagcagctggccacatttggcctcttggtcataatttgccaacccctcattcagagaaatcaaaaggctatttgttacataattgttttctcataaaaagttattcaaagactagcaaatgctgcttcgtctgtgcataaaacagaagaaaggagttagtaggaagcaaggctgtgtgtttccgacgcttcccactgtgaagggcacgtctgcaccctggaccaggcctttgcaccttcaagtgctggggaccgtgtgcgtggggagtgctgcgtcggggtttttacctggttgcccggacctcaggctgctgtcagaggtctgaagcagccacgtgccctggagaggaggcggtgtctgcggaggttggtcaagagtctgtatcctgggctttgatggaaatgagccctgaggcatgttcttggtgcgcctgttttcatctctaaagtgagcctgttaaacacatgggtttttccttccaacttttaacttttgctttcaccagttaggaatcagatgacgctttccagaatttgtcaagttagaccatccccaccccacacagaattgatggcaggtccatgtacctgatgcttgccgcttcccaactggaactttaaatgtttaccatattttaatctgatttttaaattacagtttaccacttacctgttgtaagaaatcttttcagccgggcatggtggctcacacctgtaatcccagcactttgggaggctgaggcaagcagatcacatcacctgaggtcaggagttcgagaccagcctgaccaacatggagaaacccagtctctactaaaaatacaaaattagctgggtgtggtggtgcatgcctgtaatcccaactactcggaaggctgaggcaggagaatcgcttgaacccgggaggcggagattgcagtgagccaagatcacgccattgcactccagcctagacaacaagagtgaaactccgtctcaaaaaaaacaaatcttttcaagatacaaaaaacagaccaggcccagtggctcacacctataatgttattgctttgagaggctgaggcaggagaatcacttgaggccgagagttcaataccagcctgggcaacatagtgatatgacaagatcacttgagcccaggagtttgcagctacagtggctatgatggcgccactacattgccctccagcctgggcgttggagcaagactctgtctctaaaaatataaaatgagatgggcatgatggctgggtacagtggctcatgcctgtaatcccagcactttggaaggccagggcgggtagatcatttgagatcaagagtttgagaccaacctggccaacatgatgaaacccatcttctactaaaaattacaaaaatcagctgggcgtggtggtgggcacctgtaatcccagctactcgggaggctgaggcaggagaatcacttgaattcaggaggctgaggttgctgtgagccgagatcgtaccactgcactccagcctgggtgacagagcaagactctgtctcaaaaaaaaaaaaaaaaaaaaaaaaaaaaacctgggcatgatagcttagtgcccgtaatctcagcactttggaaggctgaggcagggggagcgcttgagctcaggagttcgagaccagcttggacaacatagtgagacctcatctccataaaaaatttaaaaatgagtcaggcatggtagcacacacctgtagtcccagttactcctgaggctgaggcaggaggatggcttgagcctgggaggttgaagctgcagtgagctgagatgatgccattgtcccccaacctgggcaacagagtgcgaccttgtctcaaaaataataatttaattaaaaattaaagaacaccaagaaaaaatacatcacttataagctaaggcatcagaatgcctgagacatctttgcctccagtttcttctctgtgtgagtgaacatgagccaggtggggtcgtgacacgctgactgctgactggccggcctcccacaccgaacagcttccctggcacctgttcccatacttgttgagggtttgtatgaatgtaccatcttgaatgtatttggcagccagtattttatgtttgtattagtgaaaacagagagtgtagtaggcagtaaggtgtctgaggggttggagaaattggcattagtaaatgtgggagtaagcaatatggaactttttataaaaatgctttattttgtagctctattactgtttacatttatgagattcaaaaccgtttgtctccagtggcctgaatttaatttagccaaggataaaaaactttactcagaggatcttttaaggtcccttccaatgaaatggtcttttttttttggagacagagttttgctcttgttgtccaggctggagtgcagtggcgcaatctcggctcactgcaacctccgtctcctgggttcaagcaattttcctttctcaccctctcgagtagcggggcttataggaacccccgacacacaccaggctaaatttgtgtttagtagagacgaggtttcactacgttggtcaggctggtcttgaactcctgacctcaggtgatccgccctcctcagtctcccaaagtgctgggattacatgtgtgagccaccatgcccagcctgaaatggctttatttgccacccagtttgatgaatgagacagatttgggagttagctttactttctttttcagccaagtttttaatgttggaaacctttcatggaagaagcaaacttcccagtgttgtattttgcctcacaagctgaacacagttctgacactagtgtgttttcagaagctttagtccttaacggtgatggacgagagcccctcgagtgccttaggagcatcgtggctgggatgtcacagcagccaggattccgttttaaatgtgaggtaggagggatctgagcaccttttacaaagtgtcttttcttgatgttttctctgcagtctttaaaccagaggagttacgccaggccctcatgccaaccctagaagcactgtatcgacaggacccagagtcattacctttccggcagcctgtagatccccagctcctcggaattccagtaagttaattcataaaaatagattataactttgctggtgtgacttctgagtgtccattgttttatctcttgaaattagataaaataatccccctgccttgaagattgttctcctaatataaaaaactgttgtctgttaacagttatcagtgaaagtgtttattttgtttgatttcacctgttcatgaagccctggtccttggaggaggggtgcactgaagcaagggaagcacatgcccctgagacttcactttatatttggggccttgtgtcacttttgtctgaaagaatttgtgaacatgaactgtaaaaaaatatttgggcttctctcttttatattcctggatagccttgcaaaggccatggggacccagccgattctatgtagcagtcattactagctttgtgtttatatttgtcttgtaatttcattttgcttgctaggatcaagagtgaatatctagaaatacacactgtttgataaacttgttcactattttaattcagtggattaaagatctatttttaaaattttttgttagaagtatcttttaacaatttttctttacttttgcctttggagtattataatgtgatcatacctgaaaatactaattacacttttagtgagtaaaatcagttgcgtcagaggttattttcttttcatttcctatttcttactgttgggaatggaagttattttggtgctttctgtttctattattttaaaacaaagctgccagatgagactggcatttggatattgggggattccctatactgagaccatttttttttttttaaggactattttgacatcgtaaagaatcccatggacctctccaccatcaagcggaagctggacacagggcaataccaagagccctggcagtacgtggacgacgtctggctcatgttcaacaatgcctggctctataatcgcaagacatcccgagtctataagttttgcagtaagcttgcagaggtctttgagcaggaaattgaccctgtcatgcagtcccttggatattgctgtggacgcaaggtacagttttaagtttttccggaaagtgaattttcctggttaatccagccagaggggtgttatactaatatgagaccacgcctgtatactgggagtgcatatgtgcaatctgctgtctggtgacacagttgatgcctgaagcgatgtgatgggtgatcagagctgggtgtacaggcgcttactgagggaggccatggggaagcgtttctggctgcccctctctgcctgtggtacctgtctgtagtgaatgtctcttagagccagttctatcacatgctatcccaaaatgtctttaaagctactaaaattgttagaaaactgtctaatatactaacagaaataatttactagtctctatagtagactagaacattataagacagtaaatggaatgtatttttatataaaagtatttctcctttatttttgcagtatgagttttccccacagactttgtgctgctatgggaagcagctgtgtaccattcctcgcgatgctgcctactacagctatcagaataggtaagcgtcaagcagcatcctgcattatgtcttagggcaaggcacgttcatctggttatagtctgtgtacattatttctttcctgaagttccaataaaaagtggcccaatttcaggccgggtgtggtggctcacgcctgtaatcccagcactttgggaggctgaggtgggagaatcacttgagcccaggagttatgttatcagccttggcgacatagagaaacccccatctctatttgaaaagaaaaaaaaagagaaaaagtggctcggtttcagtgtcttgttagtcacttaggcccatggcctcttagttagttataaagcgtacttttacagtgtaaaaactgtaacctcagagccaagtcttgccgtactacttggattaggtacgttatttcttcagccctgcccgttctaaaacgcagccctagaagcaagcgtctgaagttgagagtaactctgataaaggttgacatgcctttttcaagatgttcatagagtagaaaatgtggattttactattctacctgcaaatatttgcctggtaatttggcctgatcagtctcatggaaagacttgcatgagtgctgcttcctataaggcagaggaaaagggtccatgatctttatttttaaattttacactagcagcacgatacaaaatgagatctggtgttttaattgagttcaagaatgtgattctgttgcctcctattataagatggccatttcagggttttgtgagtggtggatctgcttaagaaatacttgccattcttttggaatatgaagatggctaaagaatagatctcctgtcttaaaataggtagagagtgagaatagtattttttgttgtggtttcccacaaaatacagcttgcgtagttttggagttgtttgagaagtcagcttatctgtaccgcagcgtgtaagtgtccatgtgccgctgcagtgtgagcgcaccatgcgtggaggcacaggtcaggaatcttgctcaaactgtgacgttgcctctattttatgagccagcagctggattctctgtggccaagatagaggtttgtgcctgttctttgtctttaggttcaaataataagcgtcaacagtggggtttggcgttttttattattttactctcatttggtcagagtaattatgtcctatacttcaaagaagacagaaggctttttgttatttgttcacaggcctgaaaattttggagttttatggttatgtgttttaattcttctatgttttttttaaaaatccatattcaagataagtaataactcccatcaaaatcctatttttaaaaaaaatccttttgacacaaaaatgtctcaaaaaaggttcctaagccttttctattaggaataagcctggcctgcttattcctaatactgttcagtgtagtgaaacactggtgcaagggggaaggacagaccctaaactgcatccctgctagaagtgcagcgtgtgcaattgtcctgctgaaaatagtttaacattcagagtctgatttccatctcaacttcccctttatcaatagaaacattttatgaccaagtttaaaatgataccatagccccttcctaatgggatctctcccatagtgacttgctgctctttgggaagttctggccactccttttatgcttttagccccatgaccttcagcagaccccatgatgtattaatgtattaagcttagccttgtctgtgatacagacaatagcgtcttccctcgcagcctcattttgtcaggtcctcaatgatgaaataatgaataggaatgcactttaaaaaccatttgtgccaagcaaaataaagttaatgatatcttcagagaaaggttaatattaactacacccagaaaaatgccacccctgctacgttgcccaacacagttttggtctagaaggaaggtagattgtttaccactgtctctaaagtgttgtggggcctgttcctgggtccgttggtaccctgcctttgctgatttgcacagattttggtcttttacattgagagcaattaaagttaaatggaattggtaggaccaaagagtcattgatggcatatgaagtcattgatggcatataaagtcattgatggcatgaaagttctgaaacgtctaattttatttctgtatagaacttcatttttactaaacaaaagtaatgtatttttaagagtggaaatgcaaataaaggagttccattttattagtgataatttttaaagcgtaggcgtagcgttcctcagacgatcacaggcatgctctctagaacagtgtatctgactgagtaggttagcatattatcatcctgagaaagcagtggcctgattctgtaacaaatactttaactgcttatgtttttattttcaactttgactatttatgaacactgcagtgttcttatgaataattgtcttggcacttgtagtcctaaactgggcacttagaacaataaaaaatcctacagatcatttaaacaagtgaaaccctaatatataagtgagcgtatgattacattttcacttgttttcatactttgcaaatttgaaagtaactcatgttggaaaaactgttctttagctttcccagttagtatctgtagataatataagtattatctatagatatcccagtgatatgtactgatatggtacttaaaacaatctgcatttgaaaacttagtccatatattaaattacccttacagataaactatgcagttccatggtactatagcaaccctgaaatgcatcatcactggattatgtgaagtatttctcctttgcaattccatattcatcaagctgcttccttcacaccaggcaaaatgtcatctaggcgcttaagttgaaaagtgaatttctaaatctttatgtgtttccagggagaataaagtgtggactaggtaagaaggtaggggcagtctggcaataacatctatcactcatagactgccagggttgctttagctgattttactagttgggggtgactgttcccttttctgtgtgctgtcttcctctctcagaacagtaataaagtgaagccacgggcccctcttcctccccttcttaaacacgaacaggctaaattgtccatttctccagcagttttgaggcagacaaggagtctgttgataatgctttgcctccccggttctgatcctgggattttccagggtgggagtcagtcatacaggaagagcctcagtttcccagccactgcatgggctgccattccaccaccagtgcctccctcagtgtcactttcctcggtggggaaggatgggtttatggttcttgtttcctggatgttgctgggcttgctgtccttaaataaaagcaaaggatttctccaggattttaaaaccatttagactcacctgtgattacggtgggagtttcatttcagaatgtcttgaacggtcccttctagttggccatagttctgcgtgtttgattgtatcatgaatggggcactcaattaggagttttacttataaaagggaagtattggggattgagggaatgtcttttttgtgtattgttttggttgccactgaattggtttatagtttctgtactttaattccttcttgccagtgatgaccataccctcctgcacacggaagttcttcttcataccggattttaggatatttacaaaatagtgaatggccagaatattgctatagttcattcagggaaaaaaaaaatacatatttaaagaaaaacattaatctgcctcttgcctgtcagagtgttaaatcctgacataatttattaattgagttagtgccaaataaattagtcccagcaagaaaccttcattaatctagtgaatctgtcatgttcctcatcaaccaaacacaaaaaattggctcatcttgagatgtgcatgcactgaagttgtatgctttaaaatttgctgtatgtgtgtggttagtgaaatacaacagacaaaatgctcaatgtattgaattaagattagatttgggacttgtgggggacctgtcctagtggtagtgaactggccacacggtggcccacgcctcagtcttctgtagccgtgtgagtgcgcaagtgagtgagactgcagctgccgcgtcccattctgcacttggtggttcagcctggcgctcgagtcctgtcgcactgtttttaatactaatccttcctggcatcttgtagacatagttttgagcactaaaccgcattcgtgctgccgtcgctacctgacactcattcttctcgcttgtgtgatccacctccacccgcttgtttattcttacggtattcttgtgtactcatcttgttttatgcagcatcagcctgcatttctgttgatttctcatttatgtcctttccaaacatttagtagtttttattttaattgtttgtatttgatagcttgagcccaggctctatattgtcttacaagaaattggggtgatggataatttctcaaatgcagattgttctttaaagattaactctaaattcacttaacttggattgcccccaagtcagaacagtcattcgctaagtctttcagattgatgaatgattggtcccagtaccaaaaatgtcaaatcaaagcttagaattgaattttcaaagattgttcatggatttacatatattgtatttcttatacaatatatcacatttcttactctgtatattcatattgataaatgggtggaaagtctttgaccctgactgcatttatgttaaatgtttgtctagaatatggatttggtttcatttgtattgtaacacaattaactgaatgattaacatgaaaaaaaaaaaaacaggaaaaaattaaaatcagttctgggtgctcagcattttcatacatttaaagatctggcttaataccggaaataaaatctctgaattgctgtcaagcataaattttccattttgaaaaataaagctatttcagtttaaattgcttttttaaggccttttgtcagactgttttgttcaagtaaatttttccatctcaaaccctggagttatatttgactttctctgagtaagaacaaaattcagattcctaaatttgggctccatgcaattctagtattaacaactccttgaaaacatttgcctcttggagccggaccgagcctgtcgttgttagtgatgatggcctgtgatgtgtgcaatgagaccgaatgctaatcaatgctttgccttggctttctgctctgtgttgtcttggtgtctgcgtcttacctctgtgtctgtgctatttgttcccttccctgttctctaatcctgcctttccccacctgccccctgttcctttcattgtcctcactgacccatcaatcaaccaacaacgcccccccttcgtcgtggtgctctgccctgctctgattggtggcttcgttgcttgggtggctgtgtgttatgatggaccagttcacccaagtatggccttcttgctgacaggtatcatttctgtgagaagtgtttcacagagatccagggcgagaatgtgaccctgggtgacgacccttcacagccccagacgtaagtaccgtcctgtcattttctctggggtgagggagggtgaccttaaattgttttttcctcttaccaatgactataaggaaggtaccggtgccattttgacttccttgcaatgttttttggttttttgtttttgagacaggttctcattctgtcacctgggtggtgtgcagtggcactatctcgactcactgcagccttgaccacttgggttcaagcgatcctcctttctcagcctctcaagtagctgggattacaggtgcacgccaccatacccagctaatttttttgtattttttgtagagacgaggtctcgccatgttgcccaggctagtctcaaactcctagactgaagcacaatccacctgcctgggccttccaaagtgctgggattacagtctgttgtgttgtggggtttgtttcatattaactatgatcacatttaatttgaatatgtgtatacgtatacatttacactgaaaaatgtgttttggctgaaccacagcgccacctctgcctttatcattcaaggcggtggtactgtggcctaccactggagaccactggtctctcttgaccttggtctgtctttttttctaaaataattgctttttcctagtggttccattttggggaattagaaattttctttattttaattttttttttgaaatggggtctcactgttgttacccaggctggtcttgaactcttgcctcaagcagtcctcctgccttggccttccaaagtgctggggccaccatgcccgaccatgtaaattttcagttatacctgagaaaccaggtatccccatttgcagaactggcagtagcaaaaaatgagtttggtgtacatgccctgccctttacatttagtttatctccacttaaacctccatcctttcagttactgaagtctaatccagattaatggattccagtgttctccaaccccattttttggcctaaagtctaaatgtgtttccttccttcactagtgctttacctgttgtttaccagctccaaagtggacagctatgactttgttagttcactcctgcacagggttaaacttgtatttccagtgtttattatccggcagagttaccttcgagtgttagaatggccactgtgtggcaagaaaaagcaaatgcacaaattgtgttatcaactcatttctatacttaagtaactaaaaacctgccagccacccaccacatctgcccaggtctgccgttccctcttttcgtcagactgagttccccagtcttccatgattcctaccaccctaccacagtgtgacttccccaacagaaaggaagggtttgccacaggagcttcttccagcagtgtaggcacttacgctctaccattttctttgttcaaatgcagaaaaaacctaacttgtaagacaaacaaaccaaagtgactgaaattctacattttcaatttatttcccttgtcatcctaattctctttagtctagttgtgtgattaataattggattgttgcctgagcaacatagtgagaccccatctctacaaaaaattaaaaaaacttaacagggcgtggtggtttgtacctgtagtcccagctactcagaaccggggtgagtttgagttcagccttggcaacataatgagaccctcatctccacaaaaaatcaaaaaattagccagtcctggtggtgcatgcctatagtcccagctacccaggaggatcacttgagcctaggaggttaaggctgcagtgagccatggtcacgccactgcactccagcctgggcaacagagcaagaccttgtctctgaaaaaacagaaggaaaagaaatgatagtggaatatgtagaaaaagacattgtagtgttctacgaaattaaattttctgttcattccgttattacatgtacttgagattttaaggggccatcatgtctttttgtttgaagaactagttacaaaataacattccagagaccctatagtttatactcaacagataaattttagttaataaaacatgttttcttattttaaaacaaggacaatttcaaaggatcagtttgaaaagaagaaaaatgataccttagaccccgaaccgtaagtatatagctatttcttttttactttcagttttggtttgaaatcggtaaagttactccttatggagtgggttgtgggtaaaaacattggaaatatgttgccgtaagtggaatttctggtgtgaggttatcttttagatatagatttcttttaaacttaaacaaaatatgtatgtctctgtaacatgtactctagttactggattttaacaatgataagattaaatggatgttttagttctatgagaacctctctaataatttggtcatgggtgtctttaagaagccatttagcatgaatctttagagaccaaaggttaggagtatttggtggggtagtactagtagtatcgtttaaagggaaataccagaaagaaaacctcttggaaactgctttctcaaataatgtaaagcttggcacattttcttgccattgttaagcactttttttgttgttgtttttgttttgttttgttttttgagacagtctcgctctgtccccgaggctggagtgcagtggcacgatctcggctcactgcaggctccgcctcccgggttcacgccattctcctgcctcagcctcccgagtagctgggactacaggcgcccaccaccacgcctggctaattttttgtatttttagtagagacggggtttcactgtgttagccaggatggtctcgatctcctgacctcaggtgatgtgcctgtctcggcctcccaaagtgctgggattccaggcgtgagccaccgcgcccggccctgttaagcacttttctacagtgatgagtgagagtgctgcatttgctaaccttgcttcataacagcccctaaagagacttcagatttttttcagtgtggtagcctcttcccaggtccccaatgtaaagttctgagggcgctccaaattggcatggcgatactggctattttttgtccccagggtgagcacaggctccaggagcgttggctacttgggaagtgtgggctgtgactcagccaaggcaagaaacagaccctgctctccctatcctgaccctctccagggaagccagtggctagagtggcaagcacagatttctacccaggccacctctggaaacctagcttgacttttggcaggttacttcatctctaccagcacatggtacacagacaggacgatgatgtgaaatcctagagctgtagtcttggcgagatgccagggcagagcgcccacccctctcatgaccatcggattgtttttcctgactttccacctttcttttcacattgtgtctttctctccttggctttatagtttcattattatttatatctacttttctttcctttttttttttccccctgagacaagtcttgctctgtcccccaggctggagtgcagtggcgcgatctcggctcactgcagcctccgcctcccagattcaagcaattctctgccttggcctcccaagtggctgggattacaggtgcccgccaccacgcccagctaacttatgtatgtatgtatgtatgtatttatttttatttttgagatggagtttcactcttgttgcccaggctggagtgcaatggcacaatctcagctcaccgcaacctccgtctcccgggttcaagcgattctcctgcctcagcctcccgagtagctgggattacaggcatgtgccaccacacctggctaatttttttgtatttttagtagagacggggtttcaccatgttagccaggatggtctcgatctcctgacctcgtggtccacccgcctcggcctctcaaggtgctgggattacaggtgtgagccaccgcacccagcctgtatttttagtagagacgaggtttcaccatcttgaccaggctggtcttgaactcctgacctcgtgatccacccacctcggcctcccaaagtgctgggattacaggcgtgagccaccgtgcccggccaatttatatctacttttcaacttcaaaatatattacattcaagtagtaggtgccaggcagagggaacacatggatgagtgaaggggtctccttcctgctggttgtagtctagagagacagctgggtaatggcacagcctgcagcaggagacagtacaagtgagtcccagacagaagggaccctgcttgggcagagcggcatcaccacagttgcgcctggtttcctggacaagatgacatttacattgaagctgcagagcattctagaaacaaaggcatgaaagaacacaggttgctcaataaaactacaaggcccctagagtgggtggttggtaggcagaggttaacttcatgaagggccattacactgtctcttgacgtttagactttatcctataatgtgctgaggaggttttgaagaatagcactggttctagtgtaagagggtcatctttggtctatgaggtgaactgaacagaagaggagaagacattgttctgtagtagagaagttagttaagagacacaaagcaggagaaggcaagaaactgaaacaccaattaaagcaagagcttttggagccaggcaggggggcttgctgggggactgagggaaggggagacatctagttggcccataataattgggagtgggagaaagggggaaattcaaaatggatgtcatggggtctagaatatgcagtgtgttttgtttgtttggattttgtttgttgtttttgaaacagggtcttgctgtgtcacccaggctggagtgcagtggtgcagtcatagctcactgcagccacaacctcccagacccaagcagtcctcccagctcagccttctaagtaactgggactacaggcacacaccaccatgcccagctaatttttaaattttttgtagaaatggggtctccctattttacccaggctggtctcaaactcccagtaaagcaatccttccaccccagcctctccacatgctaggattacaggtgtgagccactgcacctgtccccagtgtagttttgggggacactcctttcccctgacatgggagggaagagttgagagcaggggacctttggagacggcacaggaattgaggaagttcttggccccaacctttgaaattcttagcgttggggatgagctcagtggctgagttgtcaaagacagagcttgtggaggataagcactggaggaaaggagtgcagattcagagcagctgccacgtggaagggagaggtagccagacagagccgggctgtcagagagtgccataggaccatgaacgggtgccgccatttgtgtgtgtgtgttttttttttcacagatctgtgtgtgtgtcttttctttccctccagcagactgggcagagaagccagatgagggtagacccatggctgagggcttgcatagcacgtgcaatggacagattaaggggacgagggcaggggcacactttagaggagctgtagctcaaagctcaggagcacacagggaatcacattactcaccagtcccttcagcctatcctcggaggtatgcattgtggtggcagcaagggagggagctgacaaaaacccaaggtcttgacctcaaaatgtcatcttggcatttaagattcctgggttgaggcggttcctggaggtgacggagccctggtgggccgtggttgtgggctgccgtagaacagtgtggaggattcgtggggaatgggtggtccattctctcgcttcaccagtgtttacttgaataaacccttgtcaacttgccagtaggcctgacacattccaccttttgtaactgactcagaactggtgtttttgtgcctcgcgcctagcgtggctgctctgaactggccgtgtttcccattagtatcctcaacaattttagacttaagagcacatgtttagaactcaaagtattgttctctattttttaagtcagttttggcatgtgaaatcacctagagaaggcattgttcttgcaaatgtgtagcagtgtcagaaataccggcctgtgaaatatgtatttgtcgcagcaatttttaaaaagtaaagtttcctttctggttgcaaagggagattgggagaaaagaggaatgaagcgcttgtacaaacaaaagaagaaagctttttcctgtagaagatatcatacggatgcattgtaaaatatagctgaatcagccaacacacgcattaatgtcagcactactcaaagtaacccagagaacaaggtgtggacgcacacacagacttctacaagtgactctggtcttgtggttccgtgtgctttaacagtgcgccttctttgcctcctagtttcgttgattgcaaggagtgtggccggaagatgcatcagatttgcgttctgcactatgacatcatttggccttcagggtgagttgtttcccctggcctggagggcagttctgcacagagccagtggcggggcagttgcagtggctactgcatctcattcattgttgtcagcaagaattcagcgattaagagagatggcagttggttctaaatttaagttctaagcgtttgtccgctttaggaattgtggaatcaaagcagtctgcctcttcactctttaattttataataatgtgatttaaactgccaacaaactatctgaatgctgcattttgttggtttgacaatttacatcattatatacagtctcatcataccactattattttgcagttttgtgtgcgacaactgcttgaagaaaactggcagacctcgaaaagaaaacaaattcagtgctaagagtaagtttcgggaagctttctgtttcctggactgcacattttagaaacttgtagaaattgtccccattgttctttggttcctctcaacacatggttctgaggttcggttgtcaaagattttcgttagttttttccccagtactttgtatttttcttgtctcatccttaaggagagccaggccagtcatgagggtaagaatgcaagaatgttcttcaggggcttcactgagaataggcagcacagctgtgagtccctgaagtctgtgcttctcagaatggtcatctcagccacggggctgctgagcacagagctcagagcaggactcgcagccttgggctgtggatcttcatcaagtgtaaaacatctcagtccacccttaaagggaatatttggcctgattgttatatgaaagtcagcatttatgatcagcgcatgttttagatgaaaggttagatgtgcagtaaactttgtaaattctgagaaaatttatcaacagattattctcaagtggtttagacctaagacccctcacccctcgtgcgtgcatgtgtggtgtaatgttggccagcactctctaaccctgggccctatgtgggctgccgtgggtctgtcccgtgggtgctggcttctgctacagtggggtatgagccatggcctctgggaaccagccaccaccccaggagcggtaggagcctggcctgcatgtggacttggctggacatgttactgcagctggtggtgcctgtgcagaaatagaaggaacaacctgttactgctagaagtaactttgcatgagtagactttcttttttttttaatttgagacattctcgctctgtcgccaggctggagtgcagtggtgcaatctcagctcactgcaacctccacctcctgggttcaagcgattctcctgcctcagcctcccgagtagctgggactacaggcgcccgccaccttgcccagctaatttttgtatttttagtagagacgggtttcaccatgttggccaggacggtctcaatctcttgaccttgtgatccgcccgcctcggcctcccaaagtgctgggattacagccattagccaccgcgcccggctgacttttttttttaagaccacattgcattgttatcaaaagtttatggttatttaatctttatagagtcaattctcaagtcttgggatggccttctgcagcttgacgcgccaggctggccttttgccgagttaaccagcaaacccacacaagaacggcaactgcagcagtgttctaacattgacttgccagctgctccctacagctgtcacctttctctggcaggacaggtgactagcatgttgctcaggagatccccaatagaaccagggtcatttggggagctcagagtagaagagagatggaaatgctaggatggaccatgcactgggggaaggggaggaggaagccaccctgtagacttgagactgagtcttaattcaagttcaaactctgttgttaaccaacatccaaagttatgcaatagcttacactgcctctgttaaaaacttgtgaaatatcactcattgataaactattgtaatacttttccttagctcggtttctcaactgaggcactgttgacatttcaggccaggtaaccctctgttttaggggctgtcctgcgcattacaggattttagcagcatgcctggcctctgcccactcagtgccagtaacaccttcctcagcaattcattacgtctgtcagaaatgtctccagacattgccagatgtcccctggaggggcacagttgcctccatttgagaggccctgcttcagaggattcactctgagtgagttcgctaatgcatttgagcaaattggaagttcttccctgggccagaggctcagtagccaaaacagaattacccagagaactaggcctccgtagaacagtcattgcctgaaaggggcaggaggtgactgggcggaatggcacaagtggccccagagcaggtccagccccctcccaccgcagcatccagaaagacccgtgggcattcggtagatgagcccaagatctagaaatggaacattactggagaaaagggcctaggagactagaggtagctctactctcagtgtgagcgtgtgtcagcacaggcgttgtggtgtctgatcacagagtaaaggtatgcttccttaatcttgcattgaaaaccatctccttcgcatacaccatatgcaaaaccaaattcaggtagattaaaaagcgagaaaagtaaacaaaactgcagatgcattcaggataaaagtaagataataattttattgtgttgagttatgaaaagccttccttaaaaagatacagcccagagatgagaaaggaaaaggcacaaaaggcccctgtcatgcgccatggatgaagatacaagttgaatgccagaaagcgaggggcacaatttaaagtgttcatttttagatttagcaagtctactttcacacatgtatcctataaaaatatttgcacatatgcataacggcacatacaaggacataactgcagcaatggcaaggagtgatgaaaaagtaggaacagtggccaaatcgagtgataacagaaaaggaggcagcactgtgaggaaggttgcgcagagtgcaccgcagtgagcacggcctgcgcctagacccctgtgctgtctgagaccacctctggagtatgcagccatgtgtggatcacaggtgtcaaatagcgaagttactctggaagagttttttttgtttgtttttttggggggtttttttgttttttttttgttttgttttgtttgtgcagacagagtctcgctctgtcgcccacactggagtgcagtcacgtgatgtcggctcactgcaagctcttgcctcccgggttcacgccattcgcctgcctcagcctcccgagtagctgggactacaggcgcccgccaccatgcctgtagtcctaattttttctgttttttagtagagatggggtttcaccgtgttagccaggatggtcccgatcgcctgacctcgtgatccgcctgcctcggcctcccaaaatgctggaattacaggcatgagccatcgctcccgacttaattttgcattcttagtggagacgggggtttcaccatgttggccaggctggtctcgaactcctgacctcaggtgatccactcgcctcagcctcccaaagagctgggattacaggtgtgagtcactgcgctcagcttaattttgtatttttagtagagatggggtttctccgttttggtcaggctggtcttgaactcctgacctcaggtgatccacctgcctcggcctcccaaagtgctgggattacaggcatgagccattgtgcccggccacatttttctttttaaatcatttttattcaggtacaacttatccaaaaatcagcaccactggtttgtttattgcagaaaaatgaaatttagaagtttggtctaaattttctagctcgctaaggaatcttcgaaaattcccaattttcctatttctcactaatgtaggaaatatttaaaagccagcaaagaagaaaacatcttttaaaatctcattgtctatacgtaatcactaagaaccttttgcaactttcccttatagttttttaacctgtatatgaggcgttctctgtcctgaagtaatgtcctgcctctggctagctcctgtgacggtagccctcccggggctggccctgggtgaggaggggtggcggcggggaggtgagcccaggaaaggctgccctcgccaaggctcggaaacttcattcgtgcaccgcacgaggcgatggctcagggcaggcttggacaccaatactttgccagctcctgaggcaccggacaggctctggccagagcttaattggttagccctagaacgttccacgttcacgtcagactccatagtagggactttctcctcagagctgggcaggaggagcccactgagggtgtgccatctctgccctccagggaaagcgggaagcaacagggaaacatccatctgctccgccctagagcccctgtcaattttggacccaccgctataggtcttctgccccatactgttagaaaaagatgcaggttacctgggcacgtaaacggttttcaggagtggagtgcctgagatcccagagtccacctttcctttatataacactcgtgtcacaggacagattagatttcttccgtgtttggagaacattagtcctttaaaatatcagcctgtgctgcaaagtggggtggattctctagtctcagtcactgtctcagcagtgctgttgaagccctctcacctgctccttctggacttcctagggctgcagaccacaagactgggaaaccacttggaagaccgagtgaacaaatttttgcggcgccagaatcaccctgaagccggggaggtttttgtccgagtggtggccagctcagacaagacggtggaggtcaagcccgggatgaagtcacggtcagtgtgcctgctctctacagtgctctgcgagcagtccccacgcccgcttgccagagcctgctctctgcaaagctcttgagtttgaggtcatccttccaagactttgcagcagcgaatgcgtgcagtagccccctcagctgcggttgtcctgtctggggttttagttaccctatacagtgcagtaagctattttgagagagagaccacataccatattatagtatactgtttataattttcttattttattattacttattcttgttaatctcttgctgtgcctaatttataaattaaaattttgtgaccagtacaggtgtataagaaaaaacgcatagaggttgatactgtccatggtttccagcatccactgctggtcttggaacatacaccccgtggataagggggactgctgtatagccagtcctcctcagaatcccgtatttcattcacagaggtgcagttccctagtgagggaaactggtcagaaagcaagtgctccctgctccggggctgactggcccatagggaggactccaggccacggtctgaggaggtggccatgcctccgctcatctgcagtggccagagttagaggagcaggcctggtgtgcagaagcaccttgtcagcaacagcctttgtaaatgtccggctctggcttttgtttcaggtttgtggattctggggaaatgtctgaatctttcccatatcgaaccaaagctctgtttgcttttgaggaaattgacggcgtggatgtctgcttttttggaatgcacgtccaagaatacggctctgattgcccccctccaaacacgaggtagttttccagctccttccagggcgtgtcattcagtgagccgtgttaggatagaccagggctcttaagtgtcccagaggagcctgtgagccttcataggggattaaagtaaatgaaaccacaattaactaaccaaagtagttagttttgttttccattaaactagcgggaaatgaactgttgagatgactgcagtgagcgtgttttgtgtggcgagtctgtgtgggacccgctcttacctaacgcaggtaaacctggggagttgggatgggacagcctggcacctgaacagaggaagtagctctgccacgagggcttcatgtgcagtcaggaatctgggcaagaaggaactaaaagtggcttttctcagtttgccttaactgtggctctctgtgccgagtggtgccattcatccttttgttcagtgacgaaaactgaattccatttaactgattggcagcagggttggtgactggttggtttttgggttttggtttgtttgtttgtttatcacatcctgtttggtggccagtgtaaataccatcaaaagaaaaactggccaatcacagcactgtgggaggccgaggtgggaggataactggaccacaggagtctgagacaagtctgaacaacaaagtgagaccctagctctacaaaaaataaattatctgggcatgatggtacatgccttgtcatcctaactatgtgggagtctgaggcaggaggattgcttgagcccatgaggttgaggttgcagtgagctgtgaccgcgtcaccgcattgcagcctgaatgacagagcaagaccctgtctaaaaagtaaacttccagggtgttgtttgttgcttgtgtttgatttcagatttgagggataccctgagttaaacatgtgcctccttcccacaggcgtgtgtacatttcttatctggatagtattcatttcttccggccacgttgcctccgcacagccgtttaccatgagatccttattggatatttagagtatgtgaagaaattagggtgagtttggattaaattatttggaactagtaagaaccctttattttttactgtatgtttattccgtgaaataatgggtattttaagttttatgcgtttttatttttccatcctaagatcaattcagaatctccaaagctcctctttccaggtgctccccgagcctcacaggtctggctcctgggcacgtagcaagctctttccctacctttacttccttttcattccctttttttttttttttaactttattgaggcaaagtttacatatcatagaattccccttttttggatatatgattcagtggtttttagtaactttacccattagtgcaactatcacaagtcagtttcagaacattgttattgacctataagatccctcctgctgcggtggatcacctgaagtcaggagttcaagaccagcctgaccaacatggtgaaaccccatctctactaaaaattaaaaaaaaggccgggcgcggtggctcacacctgtaatctcagcactttgggaggccgaggcgggcggatcacaaggtcaggagtttgagaccagcctgaccaacatggtgaaaccctgtctctactaaaaatacaaaagttagccgggcatagtagcatgagcctgtaatcccagctactcaagaggctgaggcaggagaattccttgaatccaggaggcggggggttgcagtgagctgagattgtgccactgcactccagcctgggcgacagagcaagactccatctcaaaaaaagaaaaaagaaagaaaagaaaaaaagaaaaatacaaaaaaaaattggctcacctagtctgtaatcctagtactttgggaggccaaggcaggtggatcacctgagatcaggagttcaagaccagcctgaccaacatggtgaaaccctgtctgtactaaaaatacaaaaaatgagccaggcgtggtggcgggtgcctagcgtaatcccagctcctcaggaggtgggggcaggagagccactcgaaccagggagacagaggatgcgctgagtcgagatcatgccattgcactccaccctgggcaacaacaatgaaactctgccccccgcccgcaaaaaaaaaaaaagaaaaaagaaaaaaaatgttcctcctgccccttgctgttaaaccttccctgccccaggcgaccactaatctactttgtctctctgaatttgtcttttgtgaatcctttgtgtaaacggaaccctgcagcgtatgctgtcttgggtctggcttccttctctagcccttggtttctgtactctagacctgccccattcccttctgaaacttgaaaaggataggggcatttgatcaaagtgtcttgaacagaatgaatgaggtttatgttgacattgacccttggagaaaaatagtcaaccgaactgcctttacagtgcacaggaggaaggggatggcattgccttgatgagccatcatattccctggttctttaatgaggcctcaggtttcttttgcagcctcggccctgccctgtgtgtgcaccccaagggagaagtgttgcagggctaatttgcaggcttgcatttgctcaggataaagttcgagccttgcccccaccacacccagctttgtgggcattcattctctctctctggttacttctgtcctggctttagtccttgctcctctgctataactccttaaaggcagggccgatttcactggcacgttcatctgacgtgtgtgcgtgggtcctgcaggtatgtgacagggcacatctgggcctgtcctccaagtgaaggagatgattacatcttccattgccacccacctgatcaaaaaatacccaagccaaaacgactgcaggagtggtacaaaaagatgctggacaaggcgtttgcagagcggatcatccatgactacaaggtacccggcgctgaaggaaggtggtggcttttgtcacaactgaggggaggatatttgtgtgcctttttcttgcattcgcatacttgttaattaccttcacttatgaggattagaaagcagaaaaataaaagcctaaagtgagaacttagaagcattttcttcagctgattgaggctttcccctggccgtctgagagcagcacagttggagctgtttccatcagtgggcattggggcctgtgcatcactgttgcacacataggggctccagcactgtggtggggggtgcacatgtgtgggggtctgctgcactgtggtgggggggcacacatgcatgggactctgccacaccatggtgaggggcacgcttgcgtgggggtctgtcgcaccatggtggggggcacgcgtgcatggccctcatctcactgttgtgctttgcccactcaggatattttcaaacaagcaactgaagacaggctcaccagtgccaaggaactgccctattttgaaggtgatttctggcccaatgtgttagaagagagcattaaggaactagaacaagaagaagaggagaggaaaaaggaagagagcactgcagccagtgaaaccactgaggtacagacccttctctgagctccattgcccacgtgtcccgctggagctgcagggtggcaggctgggaggcgcgtgtcgactgttaggtccttcctgtggtggtgtctccgttcacacatgcacgtcgacaccacctgcagcacagggcgttggtgggcagcagtgtgggctctgcactctctgcacagtggatgctctggggagctgggggtccacttagactcggagagggaagagaggaagacagaaaatgggacatggggcagtcaggacacaacccgctgatgtaaaaagtgagtcgaggaggcacagggttgccaggccttattccgtgtttggtggccactctgcacatgatgctcatgccctgctgccctctctccttggcgctgcccctgagtgccaggcagtgcagactgagccaaacaaaaccccatccctggccaggcgcggtggctcacacctgtaaccccgcactttgggaggccgaggcaggcggatcacaaggtcaggaaagggagaccagcctggctaacacagtgaaaccccatctctactaaaaatacaaaaatttagccggttgtgggagggggcacctgtaatcccagctacgagggaggttgaggcaggagaatcgcttgaacccgggaggcggaggttgcagtgagcctagattgcgccgttgcactccagcccaggagacagtgcgagactccgtttcagaacaaacaaaaccccatctccgcccccaagggagtggctgtgtcctggtaggatgtgaaacaaaaagaacccagacccaagcatggtgtgctctgagcgtggcagagctctgaaggggaaggagccttggggaggtggcgtgtgggccagacccgcccaccacaggaaggtgctggaagaggacccgccaggcggtgggaggaggcgcgctgtgtgcgggtttgtgcggctgtctggggaagagatgatggtggcgtgggtgtgggctgtagctgtaggtgcagggagagcgatgacgaacgttgaaggctgcagccccagaacttgggacaggcgattgtgaccagtgaggaaaagcggtgaatggaggtggctcttgcgtgggctgctgccatgggtgaggcagccgggagccggctggggacatactgccactctggtgcctgtcccatatgagagcacgtctgtgaggtgggtgccggatgggctgtaggcggagcgtggggcctgggccgcttccgccacacacactcgtgctcactgcacaggtggttgagaggcagccacctgctggacggcgccccagagtgtcattcgcaggacagaggaggcgcgggcagggggtggcgtgggtttacgccctaggtggctcctaagcagagctcctggcctgttgtcttcggacttgctcccgctggagtgtagctggtctcactggtgtctggtgagttaatgcttgagttccatctcctaagggtgacacgggaggttaccgcgtccgagacaggctttgcgcagctgagttccaccccaggagggggcacctgcctgtggcatggcagcagtggggttgtccagaagacaggcctgataggggctcctgctggggcagccttccctgtgcaccggggacatgcatgtgttaggaggcgggatgctgaggtgtcggcatgtagacctgctgtcccttgtgtgtttggttcatggacaacaatgggcagggacatgccttcgtcagcaacaccccaggagctcgctctgggggtcagccttagtgagggctggtgcgtggggtggagcactgctttgctattagctctgctctgcatcatgctgtcaattctgggaaatggggaaaggctcgcgatagtgtcaggtggggcgagaaacggaaccagctccctgtgtgcagtcccagcttcgtgaggaatgtcgcaaacacggagacaaatgtgcccagggaaagctccagaacacagaacactgctgctcgggaagaccagaaaaacaaaactttttaaaattacttgtctatattttcttaatttcatgaacatatttattttataattttgtaaaaatagacttccaggccgggcgtggtggctcacgcctgtaatcccagcactttgagaggccaaggcaggtggatcacttgaggtcaggagtttgagaccagcttggccaacatggtgaaaccccgtctctactaaaaatacaaaaattagccaggtgtggtggcgcacgcctgtagtcccagctacttgggaggctgaggcaggagaatcacttgaacccgggaggcacagattgcagtgagccaagattgtgccactgcactccagcctggtgacagagcgagactccatctcaaaaaaaataggcttcctttgttttaaggctgacacaaaaattgagcacagagttccagtatattgcagcacgcagtttctcctgttactaatgtcttaccttagtgtggcacatttgctgccacggtgagccatttgttgatgttgatgcattattgttaagtctacacttcgttccaatttcctcagttttcccctgacgtcccttttctgtctctgaatcctgcggaggacccacgtgatatttgggctcctcgggctgcttgtcggtggggtgggaattttttttttttttttttgagatggagtctcgctctgtcgcccaggctggagtgcagtggcgccatctcagctcactgcaagctccgcctcccgggttcacaccattctcctgcctcagcctcccgagtaggtgggactgcaggcacccgccaccacgcctggctaattttttgtgtttttagtagagacggagtttcaccgtgttagccaggttggtcttgatttcctgacctcgagatccgcctgccttggccttccaaagtgctgggattacaggtgtgagccaccccgcccggctggattgttgaattctctctggactgacccctctctttgaacaccaagagtctctctcatcttgttaaaaatgaaactctctggctgggcacggtggctcatgcctgtaatctcagcactttgggaggctcaggcgggcggatcacccgaggtccggagttcaaggccagcctgaccaacatggtgaaaccccatctctactaaaaatacaaaaattagctgggtgtggtggcagcacctataatctcagctactagggaggttcaggcaggagaatcgcttgaaccttggaggcagaggttgcagtgagccgagatcgcgttattgcacttcagcttgggtgacaagagcgagactctgtctcaaaaaaaatgataggtagccgggcatggtggcgggtgcctataatcccagctacccaggaggctgaggcaggagaatcacttgaacccaagatgacaccactgcactccagcctggcaacaagagcaaaactccgtctctcaaaaaaaataaagctctctgttaaagtgtaagtgagtggtaatcctgcgttctttccagaggaggagcctgtgggctgagagcaagcccaccttcagccagtcaggcgcagcactgatggccccagcagggagccagcctgctctccgtgggccttgagtggaccccgcaggggcctcagagtccctgctcttgatggggcagctgcttttcccatcagcagctttcctgtctcctggaagctctcatgctttctcgggtgtgtagagccttcctcaaggcagacagctgctgaccacagttgtgacgtggaatcttccgcatctggttgtggcacagtggaaacagcccccactgccctcatttgttaatttctgaactcgcactctgggtctcttttcccctttagaggcagcgtggcataaagctgataatgacaccagcctggccgaggacaggccctgctctgtcccgaaggctgcagcacctacagccacctgtagccgttcacgtatggggtctgcctggtggtgacctactttggcctgagcttcctgatgcccacggcctgggagctgggcgtccgtgccaagtgtggaggggcacttgcctggtctcacagccttgcgtgttgttgcagggcagtcagggcgacagcaagaatgccaagaagaagaacaacaagaaaaccaacaagaacaaaagcagcatcagccgcgccaacaagaagaagcccagcatgcccaacgtgtccaatgacctgtcccagaagctgtatgccaccatggagaagcacaaggaggtaggcgtgggctgcggtgctgcagccgtgcctctggccgggaggagggaaagactcgcagctggcgggcgtgggcccgtgtgcaggtctgtggtgggagggaagtggcccccaggaaaccaagtggaccagttgggtgacatcatgcaacgtgtcaccaattttgttccatcccaaggcatcagggccatcaggctcagccacctgcctattctgcaggctgggtggctgcgcctgccctgagctcaccactggaggtgccatgtcccttgtgtgggactaaagcccctcctctcctgcaggtcttcttcgtgatccacctgcacgctgggcctgtcatcaacaccctgccccccatcgtcgaccccgaccccctgctcagctgtgacctcatggatgggcgcgacgccttcctcaccctcgccagagacaagcactgggagttctcctccttgcgccgctccaagtggtccacgctctgcatgctggtggagctgcacacccagggccaggaccgctttgtctacacctgcaacgagtgcaagcaccacgtggagacgcgctggcactgcactgtgtgcgaggtaggccctgcccccacccccacccccacagccggcctggggtctgacgaagcatcctgtccctttgcatgggtgcccgggttggtgtctgtacctgatggtggctgcactgactcctccagaactaggacagcgtcacaaggcagaaggcgttgctgtgtgtgtgtttcctaaacctgctctgtgtagccacagccacaggcctgaccctggggacggccagagggaggctctgctgggaagtctggcctgtctgtgcccagttctagtcttgctaaatggctggaaacacccgctgtcctgttggcagcttgggcccctctggccacttgttcctgaaggaccccccggtcatgctccctcactcccctctaggaattttgacccccctgtgaaatgacgtgggtgtcccttgcatgggccgagtcaggctgtgcagggcaggcaggtgacagatcccaccatccccctcccaggacagtcaccatcacctgccaacccggagcctcctcacttgctgtggtgtctgtagcggggcagagcgggtcctcagcagagcgagggcctttcttccctccccaccttcacacacttcttccgctttccacctttctccagtctcctttgtcctctttctagtttctgaatgcggcagttttcatatctttttgtgaacacagtcatggtacctggtcctagggctccatcaggttgccaggtgcgagcagttttcagtaacttgggcttgcgcgttggggaagtcccactggtgcactgcggatagctcaggccttcccagaggcacttcacggcagctgtcggcgctttgggagggaccggcctccctcagcctttcactgtctggcttcatagtttgagtacaggagttggacaggctgtggcaagggctgatgtgactcccaggtcagaggaagtcggaaggaagggggctggtgtctactgtccgtgagcttacaggccaggggttcttggggcatgggtcaggttatctttgagccttcagggctgttgccaggagtgaaggtccttgggagcaacacataggcagtccatgcccccgtcctgtccatgatcccatgttgtccatgatcccatcccgtccatgatcccatcttgtccgtgctcccgccctgtccgggtctcccacctgtccgtgctcgcatcctgtctgggtctcctatcctgcctgggtctcctggcacagacccagacttagcggtggagggaagcagccaggatgcctggtggtactgggtcccatgctgacaccggcctgtcccctttccttgcttgcaggactacgacctctgcatcaactgctataacacgaagagccatgcccataagatggtgaagtgggggctgggcctggatgacgagggcagcagccagggcgagccacagtcaaagagcccccaggagtcacgccggctgagcatccagcgctgcatccagtcgctggtgcacgcgtgccagtgccgcaacgccaactgctcgctgccatcctgccagaagatgaagcgggtggtgcagcacaccaagggctgcaaacgcaagaccaacgggggctgcccggtgtgcaagcagctcatcgccctctgctgctaccacgccaagcactgccaagaaaacaaatgccccgtgcccttctgcctcaacatcaaacacaagctccgccagcagcagatccagcaccgcctgcagcaggcccagctcatgcgccggcggatggccaccatgaacacccgcaacgtgcctcagcagagtctgccttctcctacctcagcaccgcccgggacccccacacagcagcccagcacaccccagacgccgcagccccctgcccagccccaaccctcacccgtgagcatgtcaccagctggcttccccagcgtggcccggactcagccccccaccacggtgtccacagggaagcctaccagccaggtgccggcccccccacccccggcccagccccctcctgcagcggtggaagcggctcggcagatcgagcgtgaggcccagcagcagcagcacctgtaccgggtgaacatcaacaacagcatgcccccaggacgcacgggcatggggaccccggggagccagatggcccccgtgagcctgaatgtgccccgacccaaccaggtgagcgggcccgtcatgcccagcatgcctcccgggcagtggcagcaggcgccccttccccagcagcagcccatgccaggcttgcccaggcctgtgatatccatgcaggcccaggcggccgtggctgggccccggatgcccagcgtgcagccacccaggagcatctcacccagcgctctgcaagacctgctgcggaccctgaagtcgcccagctcccctcagcagcaacagcaggtgctgaacattctcaaatcaaacccgcagctaatggcagctttcatcaaacagcgcacagccaagtacgtggccaatcagcccggcatgcagccccagcctggcctccagtcccagcccggcatgcaaccccagcctggcatgcaccagcagcccagcctgcagaacctgaatgccatgcaggctggcgtgccgcggcccggtgtgcctccacagcagcaggcgatgggaggcctgaacccccagggccaggccttgaacatcatgaacccaggacacaaccccaacatggcgagtatgaatccacagtaccgagaaatgttacggaggcagctgctgcagcagcagcagcaacagcagcagcaacaacagcagcaacagcagcagcagcaagggagtgccggcatggctgggggcatggcggggcacggccagttccagcagcctcaaggacccggaggctacccaccggccatgcagcagcagcagcgcatgcagcagcatctccccctccagggcagctccatgggccagatggcggctcagatgggacagcttggccagatggggcagccggggctgggggcagacagcacccccaacatccagcaagccctgcagcagcggattctgcagcaacagcagatgaagcagcagattgggtccccaggccagccgaaccccatgagcccccagcaacacatgctctcaggacagccacaggcctcgcatctccctggccagcagatcgccacgtcccttagtaaccaggtgcggtctccagcccctgtccagtctccacggccccagtcccagcctccacattccagcccgtcaccacggatacagccccagccttcgccacaccacgtctcaccccagactggttccccccaccccggactcgcagtcaccatggccagctccatagatcagggacacttggggaaccccgaacagagtgcaatgctcccccagctgaacacccccagcaggagtgcgctgtccagcgaactgtccctggtcggggacaccacgggggacacgctagagaagtttgtggagggcttgtagcattgtgagagcatcaccttttccctttcatgttcttggaccttttgtactgaaaatccaggcatctaggttctttttattcctagatggaactgcgacttccgagccatggaagggtggattgatgtttaaagaaacaatacaaagaatatatttttttgttaaaaaccagttgatttaaatatctggtctctctctttggtttttttttggcgggggggtggggggggttcttttttttccgttttgtttttgtttggggggaggggggttttgtttggattctttttgtcgtcattgctggtgactcatgcctttttttaacgggaaaaacaagttcattatattcatattttttatttgtattttcaagactttaaacatttatgtttaaaagtaagaagaaaaataatattcagaactgattcctgaaataatgcaagcttataatgtatcccgataactttgtgatgtttcgggaagatttttttctatagtgaactctgtgggcgtctcccagtattaccctggatgataggaattgactccggcgtgcacacacgtacacacccacacacatctatctatacataatggctgaagccaaacttgtcttgcagatgtagaaattgttgctttgtttctctgataaaactggttttagacaaaaaatagggatgatcactcttagaccatgctaatgttactagagaagaagccttcttttctttcttctatgtgaaacttgaaatgaggaaaagcaattctagtgtaaatcatgcaagcgctctaattcctataaatacgaaactcgagaagattcaatcactgtatagaatggtaaaataccaactcatttcttatatcatattgttaaataaactgtgtgcaacagacaaaaagggtggtccttcttgaattcatgtacatggtattaacacttagtgttcggggttttttgttatgaaaatgctgttttcaacattgtatttggactatgcatgtgttttttccccattgtatataaagtaccgcttaaaattgatataaattactgaggtttttaacatgtattctgttctttaagatccctgtaagaatgtttaaggtttttatttatttatatatattttttgagtctgttctttgtaagacatggttctggttgttcgctcatagcggagaggctggggctgcggttgtggttgtggcggcgtgggtggtggctgggaactgtggcccaggcttagcggccgcccggaggcttttcttcccggagactgaggtgggcgactgaggtgggcggctcagcgttggccccacacattcgaggctcacaggtgattgtcgctcacacagttagggtcgtcagttggtctgaaactgcatttggcccactcctccatcctccctgtccgtcgtagctgccacccccagaggcggcgcttcttcccgtgttcaggcggctccccccccccgtacacgactcccagaatctgaggcagagagtgctccaggctcgcgaggtgctttctgacttccccccaaatcctgccgctgccgcgcagcatgtcccgtgtggcgtttgaggaaatgctgagggacagacaccttggagcaccagctccggtccctgttacagtgagaaaggtcccccacttcgggggatacttgcacttagccacatggtcctgcctcccttggagtccagttccaggctcccttactgagtgggtgagacaagttcacaaaaaccgtaaaactgagaggaggaccatgggcaggggagctgaagttcatcccctaagtctaccacccccagcacccagagaacccactttatccctagtcccccaacaaaggctggtctaggtgggggtgatggtaattttagaaatcacgccccaaatagcttccgtttgggcccttacattcacagataggttttaaatagctgaatacttggtttgggaatctgaattcgaggaacctttctaagaagttggaaaggtccgatctagttttagcacagagctttgaaccttgagttataaaatgcagaataattcaagtaaaaataagaccaccatctggcacccctgaccagcccccattcaccccatcccaggaggggaagcacaggccgggcctccggtggagattgctgccactgctcggcctgctgggttcttaacctccagtgtcctcttcatcttttccacccgtagggaaaccttgagccatgtgttcaaacaagaagtggggctagagcccgagagcagcagctctaagcccacactcagaaagtggcgccctcctggttgtgcagccttttaatgtgggcagtggaggggcctctgtttcaggttatcctggaattcaaaacgttatgtaccaacctcatcctctttggagtctgcatcctgtgcaaccgtcttgggcaatccagatgtcgaaggatgtgaccgagagcatggtctgtggatgctaaccctaagtttgtcgtaaggaaatttctgtaagaaacctggaaagccccaacgctgtgtctcatgctgtatacttaagaggagaagaaaaagtcctatatttgtgatcaaaaagaggaaacttgaaatgtgatggtgtttataataaaagatggtaaaactacttggattcaaa

SEQ ID NO: 379 - DNA, 3160 bp, Homo sapiens
  source 1..3160: mol_type = genomic DNA; note = NC_000002.12:176116778-176119937 HOXD10 [organism=Homo sapiens] [GeneID=3236] [chromosome=2]
ctagagatgtcagcctacaaaggacacaatctctcttcttcaaattcttccccaaaatgtcctttcccaacagctctcctgctgctaatacttttttagtagattccttgatcagtgcctgcaggagtgacagtttttattccagcagcgccagcatgtacatgccaccacctagcgcagacatggggacctatggaatgcaaacctgtggactgctcccgtctctggccaaaagagaagtgaaccaccaaaatatgggtatgaatgtgcatccttatatacctcaagtagacagttggacagatccgaacagatcttgtcgaatagagcaacctgttacacagcaagtccccacttgctccttcaccaccaacattaaggaagaatccaattgctgcatgtattctgataagcgcaacaaactcatttcggccgaggtcccttcgtaccagaggctggtccctgagtcttgtcccgttgagaaccctgaggttcccgtccctggatattttagactgagtcagacctacgccaccgggaaaacccaagagtacaataatagccccgaaggcagctccactgtcatgctccagctcaaccctcgtggcgcggccaagccgcagctctccgctgcccagctgcagatggaaaagaagatgaacgagcccgtgagcggccaggagcccaccaaagtctcccaggtggagagccccgaggccaaaggcggccttcccgaagagaggagctgcctggctgaggtctccgtgtccagtcccgaagtgcaggagaaggaaagcaaaggtcggtatgagcagagttgccaccccagcggggcgcgcagcccgggaacccggcagagagggagtgccggggtgcccagcgccgagccggagcccgacttggcaggtgctgctccgcctggttttagaggggtgatctcagccctgagatagtccccgcttctcccctgctgccctggccctctccgccagtcctggccccacgctgatggcgcccgggcagaggaaaagcttgccggttttatttttcctgagctagacctgaacacaacaaaagagcgcaaaggagacctgcggctcataaacacgaccacagagcctcttttctcctgctcagatttgcagttccagttttgccttgagcccaatgatcatgttaaggtgatccagggcaccgtgttcgtgttcaagtgtatgcaccccgcatcctgcgagcttgggggtggtgaggggaaagagatggctgggctggttggtgcttgagttgggaaacagggcttactgcctttgctgggctaggtaaccttggctttgtttaggaaaagtgctgcagtctttgcaatccgtcggcaaagagggcaaaggcggagggggagagtggaacccgcattgccctccctgcaaggccagccttagggctgggctaaggcaaagagccagggatctggctttttgagaaggaaccctcctcctctcccccagtgcttagaggtgggccacagtagggggctccctttctgggggaatgctttagtgtgggggcaagaagacatgaaaattaaggaaattctggggaatgcaacaatacccaggcaaggtgggggaaggtgtctcgcttccccatttatcttttgaaagagaatgggcacctataaacctgactgtcaggattcctgactgcctaggagaggtggggaagaagtggcagatttggggacctgaggcagcagtggggttggtaggcttgtccaggtcgtggcgtattcccctccgtccctgttaggagctgaacccttagaatgttgctggggagatctggaaagtttactattctactaatgttttgtacaagtgagaaagttgaaagagagagcgagaacccaaatgcagactgtcctgccatcatgtcatttaagtaatgtggcatcaatgtaagattcccttccaaggcccacttcatgtgagtaatgtttaatactagcattttccaaagcggcctggctgccagcagggtcacggccaagggtacatttgaacagtctgaagaaaaaaacaaaaacgaaaaccaaaaccaaaaccaaaacaaaaacaaaaacaaaaacaaacaaacaaaaaacctcttgatttttttcttcttctccctttaattttgttagaggaaatcaagtctgatacaccaaccagcaattggctcactgcaaagagtggcagaaagaagaggtgcccttacactaagcaccaaacgctggaattagaaaaagagttcttgttcaatatgtacctcacccgcgagcgccgcctagagatcagtaagagcgttaacctcaccgacaggcaggtcaagatttggtttcaaaaccgccgaatgaaactcaagaagatgagccgagagaaccggatccgagaactgaccgccaacctcacgttttcttaggtctgaggccggtctgaggccggtcagaggccaggattggagagggggcaccgcgttccagggcccagtgctggaggactgggaaagcggaaacaaaaccttcaccgctctttgtttgttgttttgttgtattttgttttcctgctagaatgtgactttggggtcattatgttcgtgctgcaagtgatctgtaatccctatgagtatatatatatatatatatatatatatataaaaacttagcacgtgtaatttattattttttcatcgtaatgcagggtaactattattgcgcattttcatttgggtcttaacttattggaactgtagagcatccatccatccatccatccagcaatgtgactttttcatgtctttcctaacacaaaaggtctatgtgtgtggttagtccatgaactcatggcattttgaatacatccagtactttaaaaatgacatatatatttaaaaaaaaaagattaagaaaacccacaagttggagggagggggacttaaaaagcacattacaatgtatcttttcacaaatgaatttagcagttgtccttggtgagatgggatattggcgatttatgccttgtagcctttcccttgtggtgcatctgtggtttggtagaagtacaacagcaacctgtcctttctgtgcatgttctggtcgcatgtataatgcaataaactctggaaatga

SEQ ID NO: 380 - DNA, 2565 bp, Homo sapiens
  source 1..2565: mol_type = genomic DNA; note = NC_000022.11:c40862113-40859549 DNAJB7 [organism=Homo sapiens] [GeneID=150353] [chromosome=22]
aacataaaagtgtacctatttgcagtcactacctctatcaccaccaccagcagagcctgagctgaggaaaccacggttctcaatacccagcacacccacttccaactatctgttaaaacatggtggattactatgaagttctaggactgcaaagatatgcttcacctgaggacattaaaaaagcttatcataaagtggcacttaaatggcaccctgataaaaatccagaaaataaagaagaagcagagagaaaattcaaagaagtagctgaggcatacgaggtattatcaaatgatgagaaacgggacatttatgataaatatggcacagaaggattaaacggaggtggaagtcattttgatgatgaatgtgagtacggcttcacattccataagccagatgatgtttttaaagaaatttttcatgaaagggatccattttcttttcacttctttgaagactcgcttgaggacctgttaaatcgtccaggaagctcctatggaaacagaaacagagatgcaggatactttttctccactgccagtgaatatccaatttttgagaaattttcttcatatgatacaggatatacatcacagggttcattggggcatgaaggccttacttctttctcttccctggcttttgataatagtgggatggacaactacatatctgttacaacttcagacaaaatcgttaatggcagaaatattaatacaaagaaaattattgaaagtgatcaagaaagagaagctgaagataatggagagttgacattttttcttgtaaatagtgtggccaatgaagagggctttgcaaaagaatgcagctggagaacacagtcattcaacaactattcaccaaattctcacagctccaaacatgtatctcaatatactttcgtggacaatgatgagggaggtatatcttgggttaccagcaacagagatccccctattttctcagcaggagtcaaagagggtggtaagaggaaaaaaaagaagcgtaaagaggtgcaaaagaagtctaccaaaaggaattgttaaattgactcttcaaatatataacatttgaacacaattgtgtgtgttttggttaatcacaaattttgtagataacacttaatactatactaagagcttttcaacacttttagcaggattgtggacatttggttagtagtttttttgaatgggtatgtcagaaaaggatgagtttgtggtgacagttggtgctaataagaatttgcctgggcagtatagtgagatcttttctctacaaaaaatttaaaaattagccaagtgtggtggtgtgcacctgtagtcccagctactcgggaagctggtagaaagactgcttgagcctggaagacataggttgcagtgtaatgggatcacgccactgcactccagcttgggtgacaaagtaagaccctgtcttaaaaaaaaaaaaaaggaatttggaaaactgcaatgagttttttacttttgaatttttctttagtagagtttatagcctatttttcttttttctaattaaaaccactatacaaacttacgaaacatgcatagcattagaagacaagaatgtatcaagacacacaggttcagactacacaattattcatgaaatggctgttttccaatggaggaacagcatttgatgcattataacttaaaggtactacaaattaaaaattaaagtataaagtattttaagttagaaatagacttagctgggtgcagtggctcacacctgtaatcctagcatcttgggaggcccaggcaggagggttgaagtcagaatttcacgacagtccgggtaacataatgagacctgtcctctatgaaaaaacttttttaaaaatttagctgggtgtggtggtacgtgcctgtaggcctagctacttaggaggctgaggtgggaggattgcttgagcccaggagtttgaggttgtagggagctatgatcttgccattgcactccagctgagagtgtgaccctgtctctaaagaaaaactatagaaaatttaaaaaattaaaaaacgggtaacatggtaaattttatgtagtatattttaccacattttttttaaaggccagtcttatcctgaattcctcagagcagtctgtatggtaggccatcagtgaatcactccagacaggaaattttctatttttgtttagagtttgtacacaaaatctacaaatacattactctaaaatagcacctatagccattttaatttagtcatgttgggagaaaaatagatgggttacaaatacatcagatatcgagcaaatggtttgagttacatctagcagcactaaaacttattcaactttggccaaatacaaatgcgaaattagaaaaaaattataatatctgctatttttaaaagacagctatagtcaagagcttgtgttttgtatcggtatttgatttttagtgggcagatgggagaaggaaaggttatttattctatagaagagactgcggacaattagtattcaaagtttattttcagaaaataaaataataaaagcccagggtattttaaa

SEQ ID NO: 381 - DNA, 79378 bp, Homo sapiens
  source 1..79378: mol_type = genomic DNA; note = NC_000007.14:c108003176-107923799 LAMB1 [organism=Homo sapiens] [GeneID=3912] [chromosome=7]
aaactttctaattcccttctttgggctcgggggctcccggagcagggcgagagctcgcgtcgccgggtgaggagaacaaagtggctgcacgattttccccactttccagcccaccccccgcttccgtgggagcgacaggaaatggaagggcgcctcttctctctttgaacatttgccttttttcccctcctttccacctctccagaaaggaagacgggaagaaagggcaggcggctcggcgggcgtcttctccactcctctgccgcgtccccgtggctgcagggagccggcatggggcttctccagttgctagctttcagtttcttaggtaattccgtggaaacggtgcggggaggcggacggacttgggcatggggaaggaaaacccaaaagctgcttgctcaccttcgtgggatcctgggggcttgggagagggactggatggaaatgacgcccctgggattaaacgccaccgcccttgcttcggtggtggctggagacagcgcacgcggagcgccgcggaccctcatcccccgggctctgcgcccaagccccggcccctgcggcctcccgcggcccccgctcagggttttgcaccctcggccggttcaccctgggtttccccaccgcagagggcaggttccctggggttggcggtgctgaccgaggagggctctccaaaaatccattgcccaggagagtgcctgagctgagcggaggcttcattctgggaacagatgggggccatgtggctttaattaaccatctctgtttgtctccggatggcaccagaaacagcaggacctggcgcttccctggaatggagaagccttgaaaccactccagagccccagggactgtccatgggctcccctagctccggaaagcggcgtccaccgcgagccccggcgcctcgtccccagcgaagcgccggtgaccctcgcgcgtgcacgcacacgcactctcgcttcccaagctcacagatctccacgcgcacactcacaccgaggatgcgcgggctgccgcgtgcacgcgggttcacgtgcgtgggtgtgtggccctttgggggtcagcctccctgcgccgggctccggacacgtcgaagtggagggtctacacatccaccctttgttgggggagctgctccccggggctgatcagggtgggcgcgagcgtcggtgggtttcccgggagggaggctctcgctgctggacagacctgatgacgtgtgtgggtttctttccgtgtccttctcctttcggagtccctgccttcccagcctctcctgcgctcatctctccattgtcttttctgtgcattttgctttcttccgaatggactgtcctctctccgcacccactcccccgcccccgcttgttcgtttttttcgggctccactccctgcttgtgtccccccaactctgttgcctgtccttcccgcagccctgtgcagagcccgagtgcgcgctcaggaacccgagttcagctacggctgcgcagaaggcagctgctatcccgccacgggcgaccttctcatcggccgagcacagaagctttcggtgacctcgacgtgcgggctgcacaagcccgaaccctactgtatcgtcagccacttgcaggtgagggctgagagcggggttcgaggctctgctagcgcctcctcccgtccagacctaaggggcaggccctggggactccgcatccttccagcaatccagataggaagcgcagccagccggggagtcccgggattaggcttgtagctcaacctttcgccccatctcagtttgcacagttgcatccgccacacatttcctgccggcgcggtgagtatggaaaggcaggactgccgacagccctggctgccctgacccagagcctccaaaaggcctgattgtgtgtgtgttttttaaaactttagttttggaagtgtgcattaaaggtgatttatcctctttttaaaacccttgggtttccccacccccctctaccgcatcttcacttgggtaaagaggattccagcaatgacaggcgtcttgcaaggtgattccaatcactgaacgaacccgttttcctctcctcatttggtgctgttcccaactagatatcaggatcagatgcttgcttttacgaaatgccctggttgccatggtaccctgatacaggaagaccacagtgaaatttcagggtgttacctgtttctaaaagagggcccaaattttagatttcaggggtcatatttatacaaagtcaaaagtaattttaaaagaagacacaaagtgtaaaatattcagaatcagaatacttttccttcatttttaaaaaggaggctggccgggagcaaaatggctccatgcctgtaatcccagcacttagggaggctgaggtgggaggatcactggagcccaagtgttcaagaccagcctggacaacatagactcagtctctacaaaaaatttttaaaacttagctgggcgtggtggtccacacctgtggtcccagctgtctgggaggctgaggtgggaggatcacttgagcccagtaggtcgaggctgcagtaagcgataatcagtccactgcattccagcttgatcaacaaagggagaccctgtctcaaaaaatttttttaaataaaggctgatatttctggcctctaacaaaagcagaaagtatcagtttcacattcggggcaagttccaagctaattgctcagaacatggtcagcccacccacctgtacaattgcccttcagaaggaggacagagtattgtgtgtggtttgcacagcagatcccttaaaatggagtcacttttacaaagcagaaagcccattctggagacctgatcaattagaccaaaggaatgtggtaaagtggattccgttcatttgcttccaggtttatacagagatgtctagactgcttcctcctgattagaagggaggctgtaattaaacttttttaaactttttttttttttgagttctggtgattgttctccagtactagtttccttgactacaagttattgaaggcagttgatgttacttttctaatattagcatttaaattttacctacaatattatgctaacacttacttgagaggccaggacatcctgtaaatgaatcaccagattctgaaatcagctttgaccaaaatgagaatcacactgtttgtattaaaagcaactggaaagactatcctctcagtgatgatttctatagttcgttactagagaagtttctctaaacatgtagagagcatcagaaaccacaaaaaagaggtgcagcggtctctcctgagtgtgaagctggctcttggtattgcttcttggttcttctcttcctttgggagagtaagaggaagaggatgcagtcttagtagtttcccttaaaaaaaaaaaaaaaaaaaagcaactggagccaggctctctggtatatatgattagccatgcatttgtgaagtgcttttcacagatagggcctaaagaaagggactggacatatgcttttctcaaacatctagtgggcatcaagattgagacaggaagcttgttttatccaggctcctaatgcatccctggctttgggtctctgttttttagacagtacatcttgccagtctccaaatccttttgagaagaaggtaataactaaataaatacgatgtgaaatacaacgtaaaagtacggtcagttaattgtgtccttataagaatattacccttaaatgctgtttgtaacatacatgtgggtctctatgtatttcagtcttagcctcattttcagacttaagaatagtctgcatttcagaaaatgtaggtacagagcaaagctccttgtggaaagagaactattaagctctgttgtttatgatttgccttgatggaatgcacaggaagtagataactctcctaacccaactgcccaggtggctctggctcccattttaggagaaagaaagtaagagaaattcaaagctaacctaaaacttacagtctatcttcatcctagttcatgcccatgttggggttctttgaactggccccagattatagtgggcccaacatggcgtggtcctcccaacagcctggtcctcccttccccagatattctgagcaatttgcaggttagcctgcatgccaccaccattgattcactgctcgggcagggtggaaacgaagaaatcttgttctgtggttcccaaagcttctctaaatacttctgcctaatacttggtttctgcttcatttaggttttagaaaatcaggccaagtgaactgtatttttttctttcatttttagtttgctttatgtcagcaaaaattctctaatatctcctctgcattttactgtagagtaagcttctctagctgtttattgagattaaggtttaagcctagaaatttgattttggttaaattaatagcttgtggaaacaatgccctcttttactttagatcttgaatttgcaaggaaggaggaaattattttcaagactattttagactcagcaagttaaaagtgaaagatgtgatacaaatctcctaagcaattttcacacaattatttttcttgaagctaataggttgatttttgtattaggagcttcatggggtttttttaattaaaaatgtttttaatgagattgctttctagactgatgaactcaactttgtttgtaggaggacaaaaaatgcttcatatgcaattcccaagatccttatcatgagaccctgaatcctgacagccatctcattgaaaatgtggtcactacatttgctccaaaccgccttaagatttggtggcaatctgaaaatggtatgtggttggtgtggggacaagttccgttgagtgtgattgataacttgggtggagcttacaggttcctgggtgtttgtaattatgattcacttctctgtcctgtaattatggcctctgacagattgactgcctggagcactaacttctcttggtaaaatcttatccttcttcctgaagcatgtatttcctataagaaagcagtctgtcatgctagaccaaaggagcatttcatagtccttattctgaggggcttttggagagaatacttgtgtgccgggggctgtctggggagggtatgggtactatctcaggcccttattcttccacaaaatgtaacatctttcattttgatcaatcccaaaggaaggggcagaatcatagcccccactcctccccccactgccttccttcatctacagaaagtgtcttgatagtaatagtaacactatgaataagcagcaagatgtaattttttcaaagactctgtcaacatggatatgaccccaagtcaaatggttcctccagtgattgcatgaattacaccctttttcctgtctttgctatttgggatttggtgtaatacattcatcaaatatgattttactattgctgtgacatgaagcccagatgagtttcacatttgtttcaaactcgaatgctgaaatttggggaataaaggtagagttattgtgttcgttaattaacaatgtactgttagatctttaaaataaataaataaataagtatcctcaaagaagtgaacctaaccctggccgttaaaaagcctggagactactagatttctttattctatgcagtacacctgggcaggctttggatgccgctgcagccatctatcattctgtaaagacaaacgcccttaatagatttctttgtcattgactgtttgtttgtttgtttgtttatttttgaggcagagtctccctctttcacctaggctggaatgcaatggcgcaatctcagcttactgcaacctccacgtcctgggttcaagtgattctcctgcctcagcctcctgagtagctgggattacaggcacatgtcaccacgcccagctaattttttgtatttttagtagaggtggggtttcacggtgttagccagggtggtctcaatctcctgacctcgtgatccacccgccttggcctcccaaagtgctgggattacaggtgtgaaccaccacgcccagccatcgactgttaaattgcaatattttctagactattggtttctaaggagagttggtttgttcattggttggccttggcaattcattggttacaaacttcattgggtcatcagaaagcatttatcatttagagccatgttcattcttacgggggcatattttggttgatacttcagtgtgaaagagaagtttctgtaaatctgcagtgtaccccgaggacttctgaaacagcagcaagcttattatgaacaaagactaggaacatttcctgatctcccacattcttctagtgaaagaccgtttgaagaagatgcctcaacattaggatggagactgtccccattttagtcagcagacagtgaaacagtttatcatgtgctgtagttctagaggaaggtttttcttagttatgtcgagttaatcaacttctacaactttgaatctctgggacaaaagagaccagatgccagaaagaagagattttccagtagaggggcttgagttctctgtcactctgtcacaagagattagatgagattagactgatggaacttagtctttagaaagtcagactgattgttactataccctatcatctctctgttgtctgatcacagtttaagagtttatgaatgtgattttatctattttctgtgtgttgtgcacaagttgtgcttatacgtggcggggctaaattatcagtgtccaggcacagaaacgagcttggaatgtacgactatttttacccatcgtgatgatctcttcctaggtctgacagaaatcaaatacactatagaagaatgaccttgtttcttttctctgtggatttttcttcccatataaaaaaaagcctgtagtgctttatcaggttataaatctaaatggaatgtgcttttggtgcacacattgcagcatatgttcttaggttacagaaatggcactagtcttgctttgcactttacattattttgttatctcttaattttgaacaaatattgtaggtttttaaaagcctggaagaggagagatgtacagttgcctaacatttcactcaaaaataaatgcccagtgtagttctgtaatatggttctttttgataagttaggtaagattagttagtgtgaatataatgtttttcttttaacattccagctaactcatatccgttccaatgaccactttcctcaccccccgccccctcaattgacttggcaattttccagcaagagtttatttcaaaaggtcctcctgatttcctgaaaatacaccagtctgtgacatgattcattctgacacattcctgtctttccgcatttaagacttcttttgctctcaagatggaccccaaaagctctctcaaacacaagaagcgtggcaagcctcccttgctgaacaggcaggcttgagagctctagggactggggaggaggtgctttccatctctggaattccagtggcctttttaacgtgtttaagtgagactgactgaccctcagggcaagggtgcaaaggctcatttgtttgttcaggctttcccctgaaagagaagatgttagtatttgttctgagccagtttatttgacagattctttttttctctggcgttgtttttcattgtggaaatgcatccaaaggtttccccatcagggataggtttttctaagttgtggtataactaacatatgtggtagactcttatttattttctttgctgctgcatagagaaaaaggaatatttgtgtttctactggaggaggattgtgtccttgtgcatcagactgcaagctgaccccctactgtgcacaggaagtgcccctcccttttttcctttgagagcagcttggcttagagggttgggaagatgtttcacttctggctaggcaaaggatgtctttcttgacagcagctagaggcactctgccagatgtcttgttccagtgagcagattcaatctgttgaactccagaatgatttgtggaaaactaaagaatcattcaacttgtgctttaccacctaaataagcccatgggattattatttagtttcagcttcagcttaaggtagaatgcgaggataatttctatggggaacataaaagtaatttaaaaaatagtctcaactattcacagatgtttctatttacagtttcatttattgttttattttttttaaatctcctgtaggtgtggaaaatgtaactatccaactggatttggaagcagaattccattttactcatctcataatgactttcaaggtaagaaatccatgactttctcacaaatgacacatgagagcactgtgtaatgtcccctttcaaaatggatgtcagatgtgagttgacctaaatgggaacttaaatattattgttgccataaattggggtaattgagcagtttttaaaacgagcatgaataactgcatttaacaaatactctatcttcatgacaataagtagaaagagcctctattctaaggtaattcaactgtaaacttttaattaggtatctttttatttccccatagagtaaggcagtgttgacccttttccaaaccgcaataaaacatctggagagtaaatccctggtcccttgtgtttctgttttaatactgactttggtaactggaaaggaagtgtgttctctttggttttcagagttttgcacaatttgtgagcagattcaatctgttgaactccagaatgatttgtggaaaactaaagaatcattcgacttgtgctttaccacctaaataagcccatgggattattatttagtttcagctaaataatagcttaaggaacagttttacagttccttaagaaatgtgtaatgccttcttaaatgtggattttctcatcatttttctttgagagatgtaaaatgactccagaactagggaatgtctctgtacaaagtccctttgtttcttcttaagcagctgcctggaaatgacaggcttcacatggcttaaagtacacattggctcacagaaaacccataatttagttattgcttctcagattaaaaatcacttttgaatagctttcagttggagttgggaaccttatctacaccctctcaggataggaaaaggtgccaaggatagatttaccatgtgggcgggtagccatgaaagtctcactgtctctgccaccaaagtgggaggccaaggagctagggtgggtgtgggagtcagaatgcaactaggagggatgctgggctgtgcctctgagcctttatccccttgcccactccccagcagcctgctgttcctgctggagcaggaaggtgggcactgtgactgtgacacctggtattgagagtggtggggaaggtttcactaaataaattgtcaactactccttgtcaccaaccgcttgtcccttcattgaccacacaatctggtgattaaactgatgctcatcggcctacaaggatgttacctttatgttatgtgacacctgagaatactcaaaatcatctttattaatgtttatgatcctattttttcctttgcagagggcatctgttcatatacatggatagttctgagttcatctagatccaaaatcctttaggcacatgttttgtagttgaatactcattcaggtgaatacagtgggagaaagatgaacttacttgtgtaggcgcagaaggtaaaacgggggtgatgattgaactgagacatgcagaatggctacaagttggggccaggcgtggtggctcacacctgtaatcccagcactttgggaggccaaggcgggcagatcacttgaggtcaggagttcaagaccagcctggccaatacggtgaaaccccggctctactgaaaatacaaaaattagccaggcgtggtggcacgcgcctgtagtcccagctacttgggaggccgaggcaggagaatcgtttgaaccctgcaggcgaaggttgcagtgagccgagatcatgccactgcactccagcctgggtgacagggtgagaccctgtctcgagaaaaagaataggtacaagttatcacactggtttatgagaaaacaactcatccttcgggtcctagctccagtgagaaaagcaacatctatggggttgggtacattgggtgtgaatccctgcctgctccttcttggcatgtgtggccagagctgtgacttcctcattggtaaatgggaagaggaataatacctacatcataggacataggacagaatggtgatgttctcctgttcccctctgttttttgttttttaaatactgagtcttgctctattgcccaggctggagtgcagtggtgcaatcttggctcactacaccctccgcctcctgggtttaagcaattctcctgcctcagcctcctgagtagctggaactataggcacatgccaccacacctggctaatttttgtatttttggtagaggcaggtttcaccatgttggccaggctggtctcgaactcctaaccgcaagtgatcctcccaccttggcctcccaaagtgctgggattacaggcgtgcctaccgcgcctggcctgttcccttctgttctgggaactgggataatcttgttgccctggcggatagtgggaacctgaaagtctttataaatgcagatgcttggcatatagtaattgctctacaaatgtttactgaatgaaagaataagtggataaatgaattcaaccatcttctgtttgtaagaaactaccctactttaagccttatgggaaattgtaaagatagcacagtgactgccctccaggagcttccagtcttccagaggagaaagatatacttgcaaataacttacagtatgtgacagaatgtgctaatgactacaacagaagttcagacaatctttgttagcctggaggagggtgagattaattttagcctggaataaagaagaaacctaggactgggactgcacttgacctgggccaggaagggagagcagggatgtcagtgggaggagatggaagaaaggccattcatggccggagggaaacagtctgagagcaaggcactggtggtgggacagtgggtcaggatttgctcagcaagtgctatgtagatttgcctcgagtttggggtagtgagagaaggaaaggaaaggaaagtagaaaagcagattagatgcaaaggacattgactccttgctagggagtgtgaactttataagaaatagggagccattacaactgatgaatcttagaaattctttttttttttttttttttttgagacgaagtctcgctctctcccaggctggagtgcagtggcgcgatctcagctcactgcaagctccacctcccgggttcaagcgattcttctgccttagcctcccgagtagctaggattacgggcatgtgccaccatgcccagctaattttgtatttttagtagagacagggtttcaccatattggccaggctggtcttgaactcctgacctcatgatctgcccgcctcggcgtcacaaagtgctgggattacagacgtgagctaccgcgcccagcctaatcttagaaattcttttagtaattttttttttttttttgaggatggagtttcactcttgttgcccaggatggagtgcagtggcacgatcttggctcactgcagcctctgcctcctgggttcaagcagttctcctgcctcagccccccaagtagctgggattacacgcatgtaccaccacacccggctacttttgtatttttagtagagacggggcttcaccatgttagtcaggctggtctcaaactcctgacctcaagtgatccacctgcctctgcctcccaaagtgcagggatacaaaagaggcatgagccactgtgctcagcctcttttttgtatttttaataagaaatgaatgatcatttcttgccaaaatttgccactatgaggtgattgcaataattctgttgcaaaaacattaacatttagtatgagtcttttttactgtattcttgcagttaataactgctgctatcatgttattttgtgctttatttttgtttatgccagtcttaaagatccagatttctgaatcttttaaaaaaaattaataccaaaaaaaaattgggaaccattgacaagaaaatgagacctgtgtttcaggaaggtagcccaagaggaaatacaaagcaaggactgggatggcgagaataaagggcatgttgggaggctctgttgatgtcagcattgatgaagcattaatggagggttactgctaatgcaaaaactggctgtgattcttaagtaggagggagccttttcctgcaacccaggagtcctgtaagaatatcttagaaagctttttcaaatcccatgtgtccactcactgccatactctgatactctctgctgttaactgcctttgaggatcattgccaagatgaggtgcccctgttttctaagggcagtcatttggatactttaaaatcaaaagctgaaccatgaaatggagaaagattagaagcagaacagtggaaggaaagggctgaatcaaaaattacttagggctgctctgcttatggagtagccattcttttcttcctttactttcttaataaacttgctttcacttaaaaaaaaattagttagtcaagtgaaataactaggaagatggtgaagccactgacagtagtgaaatcaggaagagaactgaggttgttgatttttttcccccaagttcgccatagagatggctaattgctaagtggatttagactagcaaaagctcatttagcatgtacacagtatgtttttctatattactagatgtttcaaaactcataactcttggccaggcatagtggctcatgcctgtaatcccaacacttgggggtgctgaggtggggggatcgcttgagcttcaggagttcaagaccagcctggacagcatagcaagaccctgtctctacaaaaaattaaaaaattagccaggcatggtggcacacgcctgtagtcccagctactcaggaggctgaggttggaggattgcttgagcccgggaggtcaaggctgcagtgaactatgattgtactagtgcactccagcctgggcaacagagcaagactctatctcaaaaaacaaaacaaacaaacaaaaaaaaacacaaaaaactcataggtcttttgtttattataaatttggaggcaactgtgcagcaatggcaggcctgggaaggttgatgactaagcagagagtatggaaaggattctattcgttaggtaaaatgtgttgttctggtttccagcagcttcttaactccacgggaaattggatgactcgtcaatggtcctttgggacttaaaagtttccaaaagagagggagaaggaagcacagccagaaatggctttcacagagccattggcacagagaagtccgattagaccttcccctctcttcctctccccaagcctcccagccaggctctcacggggagtttgccatggtacgtggcacacatggttcagttagtccttagggatttttctctcttactttaaaattcttaggctgatattctcttgagttgaatacggtatcattttcttatattcctgggtaggtgaaaaataaacctaagcagctagtgagtgaataagtcaaagaatctgtcaaaatgtaattgtccatgttcttatccttgacatcttttatcagagaaaaagctcagcaggattattaaggagggctaaaggaagcctaagcatgtttctagttttcaccattaaccctcacccaaatttctgtcaagcgttggttttaattcggaagtaagtgtctttatttaggttctgttttctaggtcagctgaaatttcctttgatctttttcccttgtaatctgacttccaattccccaaaatgcatcactgtgttggttagtgtcaaaacctttgcctgtttgcctatttttcagcgctctttctgcttcatcttttacttccagttgaccctgttcactacaccctcctaaatctccctcctgccttggtttcagaagactgcctttttttctcttttccctctgacactcatttttcagtcttctgtgccttcagccagtgagggagaaagataggaatggatttgaatctaagctctgcctgtaactagcaagtcagtgtctccgagcctcaattttctcatttgtcagacaaatgtgttgtgagggtgccttggtttcctagggatgccataacaaagtgtcacggactgggtggcttaaacaacagaaatgtgtcttctcacagttccataggctaggaatctcagggtaaggtgttggcagggttggtttctgctgaggcctctctccttggttcgggatggctgtcttctccctgtgtcttcacatggtcttccctctgtgcatgtgtgtgtcctcatctgttcttataaggacaccagacatatgattacagcccaccctcatgacctcatttaaccttaatcacctctttaaagagcccatctccacatctagtgacctgaagtatggagttaggtcttcagcatatgaaacttgcagacacacaaatcagcccaaattatagagagttaaagtaaagaatgtaatgaggggtactggcaccactctgttttccttgtctagcccctggttgatacgtttttctagagcacagacttaggctctctttatcttacccattccttttttctttttttttgtttgagacatcatatacttggaggtttcaaatatgtgtgtgcagtgactcccaaattcatgtttcaagctccattcttgcagctgagtgccagaccactttttccaagtgtctgatgggtgtctccaagtggacatcacacatgtgactaattagcctacaaccaaatgctttcacgcctcttccacgttgtcgtcattggcaacacagctacctggctacccaagttcaggtgcctgtatttctttcctcaccctgccttttccactacaatctaattgatcaccaagtgtaattcaatagagtcttctgtcactaaattttcagagtggtcagttccatccctttctatctacattgtaatttctcaggttaaaaccgtcatcttttttctttcacttggttttcctgtgttttgtatcatccatgtccagtaactaccacaagagttatttttctaaagtgcaatctgatcatttcatttgtccacttaaattttttagtgttctcttttccttgcaaaaacgtaagtcccttagcatggcaacttcttacctgccccgaccaacctcttctgccacgtgcagccgcctccacccactgcctggaaaacaccttgttgcccttttaagatccagtttggcccaggcgcgggggctcacacttgtaatcccctcactttgggaggccaaggcaggtggatcacctgaggtcaggagttctaaaccagcctggccaacatggtgaaaccccatctctactaaaaaatagaaaaattagccaggcgtggtggtgcgtgtttgtaatcccagctactcgggaggctgagacagaagaattgtttgaacccaggaggcggaggatgcattgaactgagatcgtgccactgcactccagcctgggccacagcgagactctgcctcaaaaaaagatccaatttgatgccttcttctctgtgaagtattcctagctttttttttcttggcagtaaaatatccataacagaaagtttaccattttaaccatttttaagtgtataaatcaatggtgttaggtatagtcacaatgttgagcaaccactaagactgtctatttccagaactttttcatcaccccaaacagaaattctgtggccactgtccctctgcccagcccctggtaactgctaatcaactttgtgtctctgtctacttaaccaattctaggtatttcatacaagtggaatcacacaatatttgtccttttgtgtggcttatttctcttagcataatgctttcaaggttcatccatgttgtagcatgtattggcatttcattcctctttatggctgagtaatatttcacagcatgtatatatcatattttgtttatcttcatcagttgatgggtacatgggttgttcccgccttctggctattgtgaataatactgctgtggtgaacattcatgtacaagtgtctgtttgagttcctgttttcaattcttccgggtgtatacctaataatgtggaattgctcgattttccagcttcttgagttattaatttcttcctcttgcttttccaaagcacattgcatgcaaccctactatggtgtttgacatagcatattgcaaattattgacacccatatctgcacctcattggactgtgtataacatatacaacatatagtccactggctgatactaaggaggtagtcatacctttattgaatgattaaatgaacgaatgaaggaacgagcactcaaacttgccactcatattacagtggacatggtgactaaatatacgaaagtgtgtttgctatttaggcctgtttataatcagcttctaaagagaaacagtttacttatccagtagggtggggaaaagtatacattttagaggttagacattttccttgcaagaagagtctctgtggaacagcttgaattatttgaaatccagccacagtctgaaatacaaaccatatgcagttcaagtttgtggcatgcagttgagtgacatttttacctgagattaaaaaaagtagagactaccaataaaaaacatcaaatgagatttttgctcctgcctttagacattccgtccagctgctatgctgatagaacgatcgtccgactttgggaaaacctggggtgtgtatagatacttcgcctatgactgtgaggcctcgtttccaggcatttcaactggccccatgaaaaaagtcgatgacataatttgtgattctcgatattctgacattgaaccctcaactgaaggagaggtttgtttgcttctgtgttttacattctacttgcaaatctactttttgattattgcagaagtaccaattactcttgtttccatttttaggtgatatttcgtgctttagatcctgctttcaaaatagaagatccttatagcccaaggatacagagtaagttcattttcaaacaaaagtgttttttgttagtttgtttgtttgttttgttttgttttttgagacagagttccgctcttgttgcccaggctggagtgcaatggtgcgatctctgctcattgcaacctccgcctcccgggttcaagtgattctcctgcctcagcctcctaagtagctggaattacaggcatgtgccaccacgcccagctaattttgtatttttagtagagacggggtttctccatgttggtcaggctagtcttgaactcccaacctcgggtgatctgctcacctcagcctcccaaagtgctgggattacaggcatgagccaccacgcctgacccaaataaaattttttgtttgtttgttttgttttgttttgtttttttgagatggagtttcactcttattgcccaggctggagtgcagtggcgcgatctaggctcactgcaacctctgcctcccaggttcaagtgattctcctgcctcagcctcccgagtagctgggattacaggtgcccgccaccatgcccagctagtttatttttgtatttttagtagagacgggttttcaccatgttggccaggctgggtctcgaactcctgacctcaggtgatccacccgcctcagcctcccaaagtgctgggattacaggcgtgaaccagcgcgcctggcccaaataaaagttttgatggtaaacagcagccatggaataagtcttactcagaatctaaatattcagtgctaaatctacctttttcattttccttctttctctgtgttacctgaccagagggtcttgaaattagcaataattactctccactgatagggaatacatttacatctgatataagatgtaaatacaatacatccgatataagattgataggttatcaagtaattgtgttgatcataataccttattttattgctcagtatattagggtatatattgggcttttgtatcaaagagtctccccaaatctagttgttcaaataaggtgaaagtttctttctctcttacaaaacccaccaaagagttttctagagaagaagtgtagctcaattgccataattaagcttaccagataaaatacaggatgatgcccagttacatttgcaaataaataattcttttttttagcataactatatcccatatatcccatataatatttgtgactagtacaagtgtgtctcatgcaatatttgtggttggtataaccatgtcctatgtgatatttgagacatactttatcctaaaaaatagttgtttatctgcaattcaaatttaactgagtgtcatttatatttacttgttaaatctggcaaccctagttataaggccatccatgtttccaggtttattcacatggttagagttagaccaccaccactatgtcctcacctcaactcgggagaagagggaagacgaggcaagcaaattccatttaaagatgagacatgggccaggcgtggaggctcactccgtaatccccagcactttgggaggccaaggcaggcggatcacttgaggtcaggaattcgagactagcctggccaacatggtaaaaccgtgtctctactaaaaatataaaaattagctgacatggtggcatatgcctgtaatcccagctactcaggaggctgaggcaggagaatcgcttgaacccaggaggtggaggttgcagggagccaagatcgtgccactgcactccagcctgggtgacagagcaagactctgtctcaaaaaaacaaaaaaatgagatgtggaagttgcacacgtcacttctgctcacatctcattggccagaattagtcacgtggctatactgcaggagacactgggaaacatctctaggtgtttcatgtgctctactaacactcttggcgagggctcttactgtcaaaggaacaagggaagaaagaatactgaagagaaatcagaagtctctgccattctcaatatactcaataaaatgagggttgcatttccgtttaatagaaaaataagctgaagcttatagagttggatgttattacgtaaagtgatatggctattaaatggcagtcagatcttgaatccatatgttacggtgctcagttcagagctctttaccacattcaacaactgctcttattacacaattacattttaatcttcttgggaggcatgtatggtaattaaaagaatgggctcactgggcgcggtggctcacacctgtaatcccagcactttgagaggcctaggcgggtggatcacgaggtcaggagtttgagaccatcctgaccaacatggtgaaaccccgtctctactaaaaatagaaaagttagccaggtatggtggtgcgtgcctgtcgcttgaacccgggaggcagaggttgcagtgagctgagatcacaccattgcactccagtctgggtgacagagcaagactctgtctcaaaaaaaaaaaaaaaaaaaaaaagggctttggagtcacaaagtcctggatttaaatgtgttcataaatcataaatgtgttcagtacatcaaagctgttgctacatttgttgctgttgatgttgctgtgactatcagctttggtttgggttttgcacaggactagttccaaatgttggaatgaaaggtgagcctgcctctcctgctactaaggtgcaaccagttgagtagaggcggggctgattcttgctgatctttcccagctgcacaaggccctatttttaaccaaggccccaaaaaacttccaagcttgaagcaaggaagagtggagtggaagaagtccagggaatattgccagaaaaatgctgcttccccatttaaattaattttacatgtggcccagcctgtctctggtctgtaatttactcattcattctcttgtaaaacaaatatttaatagatgtgtccagctctgtgccaatttctgagtgagccatgaggcctttcctgcatgtctcaaaatgcagttatgaaaaacgtccacaagggctctgggacagacaccccctaagtccctaaaaggactcaaccatctgctccctttaaggtgaaatttgtgggacttggaggatgtgttgtctttataattttgattcttttgtcttttgtggttaaatgacatcggagaatctttttctatgttacggaagcatgcatgttagctgatcatgcatttgatttactttgtaatcaagggagcaatatctctttagttgtctattgttgagacctgagactcacttcaaaagtgatttgccacttagaatagcagtcaagatgaggctcgctttttaaatatggcaggagagagtggggggagcatatttgctctactgaggggtttccacaaaggtcagttcaagggtttctaaatactccagctgctcttcaagtttgttgtttggcctcttgtcaataggcgcttgtgctcattttgtgcaggaggatttgtgcaggagaaaatgttggcgttcataactgccattcagttggggagtaccacggtttctctgtttagtttttgattttacaaagaacctaagtttaacacatggacttttcctttctacccgcagccatttctatagcttcattgtaagctatgcatgtattaaaagcatttgaaattgtatttgggctgtgaaaatatctgatgtactgggccactaccctgttgtcttatgttgtaatttataagaatgcacagacataaatgacagtaaagaaccgtttcaggctacagagcttgagagtgcagacagatgaatcaatctctggggatccagttcagcatgaagaacttagtaactcacgaaaaccccgtggagaaggttgaatggctcttcgtttgtctagttactatagaatgaattggtagcccagcatttacaataagcagaagtctgcagacctaggaagaagagggaaagataaaattgatttagaggtaacttgtatttgagaaaaaataatttgccccacatcctaatactaagcttatttatgcttatgtcactatataatattgagaaacgtggaaacgttttgtaaaactgggacaaaaaagttgtggaccaaaatgttgcttaaaaacttgaaatgttctctccttaggttgtagttattctatagcgttaacactattttggtaacttggatgtcatttaagcggtgggaaatttcaaattttcccttccaaaaatagagacaaaaatgtttctaactatcttataataacaatgagaactggagtgctttgataaatcttttcctacctgaatggaattttctcatgttgaaactgacattaattgctgtgggaagcagatggcattgtgctacttcaaattactgtctgcccgcaggttccagcagtcatgcagctgcgttcttataatttctccactttcacacttcttcctaaatagctgttctgcaaacagacccatcacagaatagctactcttttttgttgtcgttcaggcaactctcctgcctcaacctccagagtaactgggattacagatgcctgccaccacacctggctaattttttttttttttttttaaacagttttgctcttgtcgttcaggctggagtgcaatggcacaatctcggctcactgcaacctccacctcccaggttcaagcgattctcctgcctcagtctccctagtagctgggattacaggcggatgccatgatgcccagctactttttgtatttttagtagagatggggtttcaccatgttggtcaaggctggttttgaactcctgacctcaggtgatccgcccacctcggcctcccaaaatgctgggaatacaggtgtgagccaccgcgcccggtctaatttttgtatttttttagagatggggttttgccatgttggccaggcaggtctcgaactcctgacctcaagtgatccacctgccttggcctcccaaagtgctggaattacaggtgtgagctaccacgcccggccgacattcttatgaaactgatgagagggcagtaacctttcctctttgcagtcatgttatgttaggcttcactattggagtcatctagatcatacaagaggaggaacttaagctattttcatgtgtcatgcctttctctaaaaagaaatgatgcaaggaaaaaaaaaaaaacttcttgcttgtctgatcagacttttcatcttcttgatgaccttcctagatttattaaaaattaccaacttgagaatcaagtttgtgaaactgcatactttgggagataaccttctggattccaggatggaaatcagagaaaagtattattatgcagtttatgatatggtggttcgaggaaattgcttctgctatggtcatgccagcgaatgtgcccctgtggatggattcaatgaagaagtggaaggaatggtaagtaagccctctgtgcacctttctcctttatgtggctggtaataaaatgcaaagtgaagctagtcttaccttaagccttttacattttctgggggttttagttttacagagttacatttagccctttgcaccatacaggtagctgattgttgattttctctttgaagagtttcttggacacggagaatgtacagactactcatttcatagacgatgaatttttggaatttgttgcttcaggctattgctaaagtagatattttagtcaacaaggattaaaaagttgtctaaataacaattgagtctgcctttacatagggaagattaaaaaccgcagttatgctagaaggcataaattgatctcaacccaaagaaatggatttttttttttttttcttgagacagagtcttgctgtgttgcccagactggagtgcagtggtgcaatttcagctcactgcaccatccgcatcctgggttcaagcaattcttgtgcctcagcctcccaaatacctgggattataggcccacaccaccatgtctggctaatttttgtgtttttagtagaggtggggtttcatcatgttggctaggctgatctcaaactcctgacctcaagtgatccacacacctcagcctcccaagtagctgggattacaggcatgtgccaccgtatctggctaattttgtatttttagtagagacagggcttctccatattggtcaggctgatctcaaactcctgacctcaagtgatccgcacacctctgcctcccaaagtgctggaattacaggcgtgagccaatgcgccctgcccacggctggaaaattttaacccacacccatgggatatcattttagggatcaaatggagttggtttctttctatcttttcctcctaattccattcttttccccacttttatgccacatttgcaacttatgtacattttgaaatttgggatttgggtgatttgccaaatggatagatgagtttattctattagtatctaggagaattcttacagacctagaggattttaaggccagataggacttatgagatcacctagaccaactattggtgatagagcccaaggattaagtaatttactagagagccctaagtaaatgagcagcaggtggaagctcaagcctctcctcactcagccccagggttccttcccctaagctgtggcctcccctcatgaaggctgtgcttatgtgctgttgccttttcaaagattgttagtccttagaaggtacaggattgagtgtattcagccctttaaaaacttctgccttccctttactccagttagaacttttgttgcacaacagaagttgaatttttgacggagcctgaaggggagggaggtatttctctaatcttattggtccatctttcagaatgctaggtagattatgttccctttacggcataacaaatcagctgtgtagctaatgtcctgttactatcacgggtctcacagcatgtgctgttgattcaggcccagtagggtcttatggtatgtgctttggaactggttttcagtttatgtaaaaccacctggtaataacaggactttagtcttctgctaactgcattcccaccaaggtgggtccaggagggacctgtctgtcctgttcctgaattccattctgtagaaactcttgttaaggtgagatgcccatatacatgcatatttagtggaccaaaaggccgtaattcatttatcatttatatgcctcaagggtcgtaagtgtgccttacagtgacacaaggcaaaatcatatatcatgggcctttcatcaggcaaattaatatatttcttttacgagatcttatatttccttacataaaaggaaaacataaatgtaaatgtgataaatgattaatttttaaaattttactgtcattgaaagaaaaatttaagtgctatgcctgaagtaaaaaaaactaaaataagctagctaacaaaaacctttttaaaaaaatggtgatttggctaagtggtaaatcgtgcagtaatataaattggtttccaggtggtatgtatgcatttagttctacattataacttttgtagatttctattacaataggttttcttaaaaaaatcttaagtaactagtttttttttttttttttaattttaagtaattttcttcatctgggttcttttcatagatactcagtaaaatatttcttgtgcatccactatgtaataggaacattctagagatgaggcatgtagccatcaacaagacagacaactcactgcaggcagggagaaaataaaaacaaccaaacaacccttttctgtggtgagctagagattagtatgaaaaagggttttaaactttcaattgattatggagaaacgtggctattcatacatctcttcctttgttctctcctgtttttataactttcaaggttcacggacactgcatgtgcaggcataacaccaagggcttaaactgtgaactctgcatggatttctaccatgatttaccttggagacctgctgaaggccgaaacagcaacgcctgtaaaagtaagtctgtgttgaagggacattttaaatccattcaggctctagtatccatttcctaattagaggtactgtaacagtgtactgttttgcagagggtagaaaagttactgtcttttttccagcttcaccctgatactcctagacaaccaacaatctgcattcagttaattaatattcactgaacagcctctgtgtgtttgacactgagctgagtagtttggcagctacagtagaaaactaaggtgctgtccttgacattgtatctgttttgttttttggtttttttttgtcgcctaggctgtagtgcagtggcacaggcggctcactgcaacctctgcctcccaggttcaagcgattctcctggagtagctgagattacaggcacgcgccaccatgccctgctaattttttttgtaattttagtagaggagaggtttcatcgtgttagtcaggctggtcttgaactcctgacctcaagtgatctacccaccttggcctcccaaagtgctgggagtttacagatgtgagccaccgcgccagggctgtttttaaggcaagatgaccgtgagagaaaaatgaaagaactatatggcagggtagctgatgaaggtctaagagatatggagtagcatttttggccttgtttctgtgccagtccagctgcggcctctggcatacctccctccatccatctcaggggttttctccgggtggagatgtagccggcaacaccactgcccctccccactccacaaacagtgattctgatgcatgtcctccccttgaagagcagctccgcctctgcccccactgagaaggactattatagaagttcagcagccagtgagagctggagtggtcaaggcttgctttgtaggtaaaaaccagatggcccttgatggatacttaacatggagaaggaagggagggagggaggaagggaaggggaggaaaggaaggaaggagagagaggaaaggaaggaaggagggagaggaaaggaaggaaggagggagaggaaaggaaggaaggagagagaggaaaggaaggaaggaggaagaggaaaggaaggaaggagggagaggaaaggaaggaaggagggagaggaaaggaaggaaggagagagaggaaaggaaggaaggagcaagaggaaaggaaggaaggagcaagaggaaaggaaggaaggaaggagaggaaaggaaggaaggagagagaggaaagaaaaggaaaagagaggaaggaagatgggagggagttcaggtaagaacaacaatgtgaagcacaaggccgcaaggatgttcttgaaaccatcacagagtccatgctgggaaggattactccaaggttcacttcaaccagtgtattgagagcagtactctgttgggcaccaaggatgtgagtagataagacacagtccctcttctgcaggctgttgtgttgcagggggagacaggcaaggtgggaggctggagtgcagaggctcaggagggccaggctgagtcaagcttccctgtgcaaagacaagaatgggattgttaagcccgagagcgagatgattaaagctgggtggcaccaagatgaccgccgaatgggctcgcagaaggaagcgctgcacccaagggggtcagctagctggctgttaaacagacctaccttccttactatggcctggcctggtgtggtggtgggaatatgggaatacggagaagggaatccatccttcaggcctcacggtccttgaagcagggagcccgtggacaggctttcctagcagcacatcatctggaaggtccctcgctacagtgttcttccatccagtcccacctcgagtggaccagaaagcgccctcagtgggatggcagccatcctctgtcatacacttccaaagggactttcccttagagttttccatttttcatagcccattctcttccacagaggtcagataactgtttattttataaagttcacatttttgagatttctcatctactttagggtttaaacagtgtcatcggtggatgcgtcctttttccccaggagtcctgcttgttgactgccattttgtctgaacttagtccctggtttcctaaaggatcttcctgccacccccatcctccattggtccatagatttaaaaagcttttcttgacgttgctcttgtcacgcagaatgtaactgcaatgaacattccatctcttgtcactttgacatggctgtttacctggccacggggaacgtcagcggaggcgtgtgtgatgactgtcagcacaacaccatggggcgcaactgtgagcagtgcaagccgttttactaccagcacccagagagggacatccgagatcctaatttctgtgaacgtatgttgagaaatgtcactcactgtgtgggacctacttcagattgccttccaaactgaatagtcagtagtctcagagctcatagtatgagcagtaaagccagcattgttattgtaattgcagttgaagacgctgggagtggaatttacttggtagttgtgctgcttttagtcgacttttgtgagatttagagggaggaagggaatatatgtatttatacaaagatacattgagtttcctcctgattttaacctggtgctttgcattcttctcaggatgtacgtgtgacccagctggctctcaaaatgagggaatttgtgacagctatactgatttttctactggtctcattgctggccagtgtcggtgtaaattaaatgtggaaggagaacattgtgatgtttgcaaagaaggcttctatgatttaagcagtgaagatccatttggttgtaaatgtaggtctgtttgctaaaaagtttgggagttttcttgtgtttgaaattcccattttactttgtaattccaaagccagattattatttgaaactcacgtggtctgtgtttctccacttcattttgttttaatacagcttgtgcttgcaatcctctgggaacaattcctggagggaatccttgtgattccgagacaggtcactgctactgcaagcgtctggtgacaggacagcattgtgaccagtgcctggtaagtaaatcctcattacgtgggatgggtggttggtgaggatgacatgttttaatagagaagccttttcgccattgtagagtctgcgatcaccctcacgtgtacgtgttaaaagacatgagtagacaatgcacacaataggaattactaatggatgatttcacaagatgttcaccatccctgttagaagtgtaaaggaaagccacaataaaataccacttttatagacacaattaacacaagtttttaaaaatgggaatgtttactattaggatatcatgaggtactgctacttcttggctgctggtgggcatccatattggtttgtacttttgtgaaaagcattttggagatacatatcagtagcttgtagaaatgggcataccctttgacccagtaaccccacctctgggaatctattctaatgaaataatcagaaaattggacaaagatttattctccagaagactcattgcatcttttattaatcatagcagaagacttggaaacaacagtggaaaaatagttaagtgtggggacttctatacaatgtaatatttggttgccactgaaaatgacaataacatcaggaaatgctcatgctgcttgctatatttaaaaaaaaaaacacacacaggatatgaatagtatcttgattaagtaggaaataaaattcatcaaggaaaacaaaatctggaaggaaatacaccaaaaagttcactgtaataattccaagtaggataattatgagataagtttttaaaaatctgtatttttaataacattgttatactttctaatttagggaggattcactacccccaaattattaccattaaatatgtatatttatatataatcttaatatattcttaaaggagatttctggaagtctaaattgatgagcctggtcaggtgtgatgactcatacttgtaatctcagtgctttgggtggccaaggcaggaggaatgcttgagatcatgagtttgagaccagcaagaccccatctctaaaattttttaaaatcataaataaaataggctgggcacaatggctcacacctgtaatcccaccactttgggaggctgaggcaggtggatcacttgtcaggagttcaagactagcctggccaacatgatgaaacgccatctctactaaaaataatagaaaaattagctgggtgtggtggcacatgcctgtaatcccagctactcgggaggctaaggcaggaaaattgcttgaaaccaggaggcggaggttgtagtgagctgggatcacaccactgcactccagcctgggcaacagagcaagacttcatctcaaaaaaataaataaaataaattggtgaacctgtttttatatactcatttttgaagtgcacagagctcctcttccctactgttccatttctctttatttccatctctggtgctctaaagatctgatttcctcgtggctcagtggtgagaatagtcgtagctgtatgctacatttccacataaattcttggagggctttctgtatgggattgatgacagactgaactgagggcagatttaaaggcctgccaaatccttgccataattctcttacagccagagtaattataatgaggaaaattggtatctttactgcttgctcttcttagttgttggatggaggttatctatagggcagagcagctagtctttgacctggcacgatcctgtgattgtgaacggctctcttacgccagtgcctacagctcaggtttcttgatttcagaatactccttccttttgttggctttctgctttaatgatgaaaatgagcatttggtggaacagccgaaacaagctttaacttgcttgttgctgagtctgttgcataattacagaaacctaccgttacatgtttcacgttttgttctgcagccagagcactggggcttaagcaatgatttggatggatgtcgaccatgtgactgtgaccttgggggagccttaaacaacaggtaaatggagctctacgtatgctcttgtcctcagtcttccaggaaagtcatgacttacaggaatgggtgacattcagttgtttctcaaaaagacatgcaaaatattttttgtatgtcttgataaatgtgtgtaggtacctctatggactagattcccagtgatggaactgctaagtcaaagtacatatgtatttttaattttaatagagaatgttaggttgttccagacatattgaactagtttattttcctatcagttacaaaagtaccttttcccccatccccagcaacagttggtatcatcaaccattttatttttcaacaatctaagcacatggaaaatggactcctgttttgatttgtgtagagaatcttttcattttctttttttcttttttttttttgtgacttccaagtccattaatgaaaatcacatgagataatgttgagctacttaaatatgctagtattccttgaataaatgaagcataaagctccaccagaagctatcagaacacacatttggcaagatgttaaatctgtgggagtttaaccaccttcgagtcaaagagaatgttggtctctgttcctggctcagagtcagaacatctggaacagatagtgtaagtgactgctgagagaatagacagatgtttccctgtggccttgagtcttcccagagagaacactctgaattcattgagcaagcttcatgtactcaaaaatggactttctttcccaattatttcccaacaccatagtagtctgctgggaaggaatgaggtattcagcagcaagaacatgttgtgtttgtcctctttatttgggtttgttctgttcgaggtcgtgccatagacccagtacagcatgtagcctctgaaatccggtgtgaatatctgttcttagaaaacctccagagaggaggaagctaggataattccataaaagcagggaagaaagacagaatgctgtctgcttgtggaatcacttttctgacttttcctttgtgactcccagaacacatgttgaatcctttagtaaatgactcctcagttcaaagctgtcatcactcctaaagtccttcttgatgagataaaagtggcatatgcaattccccaaattatgtcataaactcaggaatgtcctatgattcttaaccctaagtaagttttgttcctacactcccttcctctttttctctattccatacacacttcctgtctgtctccacccacgcacaggccctagcctgccctctaatctcttgtgcaaaaatttataaaaaccagaatgtattcaccaagagagtttgggaagcaaaattgtctagtaaagatttttaaagcaggtaatcatctgatctttctagcatgattgatgggatgccctatctttgagaatcattggtggaggggaaaaaaagaacatttaaagatgccttgtagtctggtgactctagagtgttttatggtgagccttttcaaagttgttgtccctcaagaggaatttccccaggagccccttaggcagggtcaactgaagcactgattctactgggagatgtgcacagatgccgcttgggaaatgtttactggatgattggtttgttgcaatcactcatcaaaaccttttacctgatatttctttttacgtagtaaaagaaatacgttgtaggtactgaataaatgctgattgagtagaatttaaaaataaaagatttctaagatgttaaaaactagatatgtactccttagagaggcaatctctaaatgtgatcccagacactccttagttactttgttgagggacagaattaaccataaaaatcactggaagtggtaaaagctttaagatgttttgtatagtgagctaaatggatttttggtagtacaacaaaagtttaataatccatgtctattatattgacaactaacctgaactttggaataattaaagaagtggccaggcgcgttggctcatgcctgtaatcctagcactttgggaggccggcgcgccagatcacctgaggtcaggagttcaagaccaaccaggccaacatggtgaaaccctgtctctactaaaaatacaaaaattagccaggcgtggtggcacctacctgtaatctcagctacttgggaggctgaggcagggagaatcgcttgaacctagaaaacagaggttgcagtgaaccaagatcacgccattgcactccagcctaggcaacagagcaagactctgtctcaaagaaaaaaaaaaaataataagacctaattaatttaaataatctaactgaagccaagttaatgaagttttgcctagtagattacctgttttaatgaaaaagaattggcattggttgctaggtaaatgctacttgtaaatgtttaataacattgaaaaatataaacatttttacagcatccttcaagattattttaacaatgaaatgtagagttttcatatctggcttgaagcccacccccccctttttttttttttttttgagacagagtttcgctttgtcacctagactggagtgcagtggcattgatcttggctcactgcaacctccgcctcctgggttcaagcgattctcccacctcagcctcccgagtagttgggactacaggcaccagctaccacactcagctaatttttgtatttttagtagagacggggtttcaccatgttggtcaggctggtcttgaacttctgaccctcaagtgatctgtctgcctcaggctcccaatgtgctgggattataggcatgagccaccatgcctggccccacctcttttttgaactcaccgtggtgaagccccgaaccctcccttgatgcattgcttctgcatctcttttagcatttattttgctcttatagttgtgttaaaaaggtctctttggacagagattatgtcatctttgtttttgcatctcacttggcacccagcacggtggacctggcaggtactcaataaatgagggactaaaatttattgtacttcgaatccagaacggaagttagtagatatttttatcattgtattgaatgactatggtgtagctaaccctttgttaattataatcatgtactgcataataacatttcagtcaaggatggaccacacatacaacggtggtcccataagatactgtatttttactgtagcttttctacattttgatatggttgaatacacaagttcttgtcattgtgttacaattgcctatggtattcaatacagtaatatgctgtacaggtttgtagcttaggagcaataggctatactctacagcctgggtgtgtagtaagctataccatctaggtttgtgtaagtacactatgatggtcacacaacaacaaaattggcgaacaacacatttctcagaacatatcccagtcattaagtgacacatgactatactgtgatagaacaggattataggacgtaggtcttaccaaaaagaaagtgtcctagttgggggtggggaggaatgccaccctgagaaaatgaatggtgctgacggaacactgtggttggttattatgaatgatgttttttatgctttaatatttttctgcctaattccttagtaatagggaaatgttaaaattccattttctttattcaccaccatttaaatgaaatggaatttttaaatgttgccaatttctatatttatgattttttttttttttttttgagacggagtctcgctctgtcgcccaggctggagtgcagtggcgcgatcttggctcactgcaagctccgcatcccaggttcatgccattctcccgcctcagcctcccaagtagctgggactacaggcacctgccaccatgcccggctaattttttgtatttttagtggagatggggtttcaccgtgttagccaggatggtctcaatctcctgacctcttgatccgctcgcctcggactcccaaagtgctgggattacaggcgtgagccaccacacccagccataaatgtatttttttaagaaataatcttggccttcacccactgagaaaacatagagcctgtatcagttttctattgctgccataacaaattaccacaatttggttgtttaaaacaatataagtttattattttccagttctatgtgtcaaatacagtctcagtggaccaaaatcacgatgttggtagggctgcattgttttctaaggctctaaaggagaatctgtttccagctaatttgggttgttggcaggattctgctccttgcagtcgtaggctgaggttccccttcttttgctggctgtcatctaagggctattcttgtcctctagagctgcccacattccttgactcatggtcccctctctccatcttcaaaggtaccactgggtcaaatccttcttatgtcacagctctctgacctacttacttccctgcctgcctctcccacttttaagaatttatgtgattagattggacccacccagatcatccaataatcgctccatcttgatgtccttacccttaatcacatctgcaaagttccttttgccatatgaggtaacatcccacagataacagggatgaggatgtggacatctttgggggccattattctgcctcacacaggccttatttattttatgtccttattctcccttactgatttaatgaaattgaatctctagtttacagagaaatttgtagagaatacataagaatctaagatgtgccatttctatcagatttgatttttacttgaacacaggagagagtaattacatgtaataaatcattggtatcactgtgaagaagccaggatttgtgcttgagttttgaaagctgagatttgaaaggtgcgattagtgagcaggggagggcctccgagctgggagggaaaagatgggtaaaggcacagagatgggaatgactgtagcaaggtcgagatctggtctgatcttgaccatctctgcccacattcccccatcaccctctttgctcctgttattcctgtcctctctctgcctgtcaagtcctctccaggctttaaggacacctctttcatgacgcctccctcagtcttctcaatcagatgaatcatatcttcttctcccttagtgctttgcttgtaactctatcaatgcataggttcttactgcattttgatttgttgcattggttaatttctttattgtttatccccaattagactgtaagttcttgaagacagggactatttttttttctatttctctttctgtatatcatttagccagaaataatagacttagtgaggaagtaaggattcattcagaacaaagttcacaatggactaaaatgtgagaatacctgcactgggaagcaaggctgctagggccaatatttgatcagtaaatatttgctgaagagtatgaggagtgtggctcattggaaagcaaagagtcggcaccagaaagagaagccgttttcagaggatgggttatggaggctgcagaaagccaggcagaggcatcatggcttgatatcataagaaacaattgtgggttttcgtgaaacaatgaaagcagcactgtaggaagatcggttggcccgtggtagacaggatggactaggcagaagaggaagaagaatttgagaggtcagtttaggagattgttagagtaacaggtatggggtgatgccatcctggactgacgcagtggcagtggcagtgacaatgagaggaagctgctaagttgagaaacattttgaagtaaaagctgagtattgggataaaggaaagagaaggtgatgtctcacctataccatgagaagaattttaaatctactggcagaaacagcagagctgaggataagaagtcagtgtgggtggtgatgatctgtttgggacaagatgaattagagatgacagctggccagtccatggaaatgtcccattgatggctggaaatagagaagcagagcccagccacctgctgggtgctgagagctgtagggtgagggccatctgcataggaaagccacaagaatgagttcactgaaggagccagtgttgaatcagagccatgcctatctgtgatgacaattcaagcctgtggacacagacttgtgattggcagggccgctgttaagggaattcctttcacatgatcagctctcatggagccattccttgtttagaattgtgctgcagatagaggcagcaccgggagcctgctggcgcctttgtcctcaccttcatttgctcgttctctaatggttgcatgtgaaggtctagttgttttcttctttggtggttcatgttttggatatttgttgtctcagtaaacatctggggaggaaagaattttcttttgtccatatgatgtaatgtctgatgcctgaatttctgaaaatagcttttgttcatggactgtgccaaaagaaggctaggtcctaattggaacaagctttcctttcttgggaattggctatgggacgttaagaattcctattcctggctgggcgtggtggcttacacctgtaatcccagcactttgggagaccgaagcagatggatcacgaggtcaggagattgagaccagcctggccaatatggtgaaaccctgtctctactaaaaatacaaaaattagccaggcatggtggcagtcgcctatagtcccagctactcaggaggctgaggtgggagaatcgcttgaacccaagaggcggaggttgcagtgaaccgagatcgttccactgtactccagcgtgggcgacagtgcgagactccatctcaaaaataaaaaaataataataataaaaagagttcctattcctgtaggataacaacatgatacacaaaaagaggacttcagctatgctgcggcagggtcgtttaggattttatttatttatttatttattttgagatgaagtctcactctgtcacccaggctggagtgcaatggcatgatctcggctcactgcaacttccacctcctggtttcaagtgattctcctgtctcagcctcccgagtagctgagattacaggtgtgtgcccctacacctggctaattttttgtattttcagtagagacggggtttcaccatgttggccaggctggtctcaaactcctgcaagtgatccacctgccttggcctcccaaagtgtgggattatagacgtgagccactgcgcacccggccttgggacatttttaataagcctgtgagtgcaaagtgttcctgtgagttgcaacttgccttaggtaccttgtttaaaactttgggatgagaaaaaaagaaagaacaaaccttgagaatgagttgaaagtaacaattccaaaccacagctcttctttaagtgaagtaaaaatggatacatgtaatttgagttttgtattgtatacaaaattatgatactaataaaagggacataagctgagaacagaagtttcactcttgttgcccaggctggagtgcaatggcgtgatctcagctcacctcaacctctgcctcccgggttcaagcgattctcgtgcctcagcctcccaagtatctgggattacaggcctgcgccaccacgcccagctaattttgtatttttagtagagatggggtttctccatgttggtgaggctggtctcgaactcccaacctcaggtgatccgcctgtctcggcctcccaaagtgctgagattacaggcgtgagccaccgtgcccagccgcatttcttatatttagcatagcatagccaatggaaagggggaagagagacacaagatgcagaagtaaaaatcacagaatttggttcctgatggagtgtgaagaaagaatctggagaagaacggggactaaatttctgacttggttgactcagcaggtggtagtgccttcaccctgatagagaccatccgagggattgagggcttctgtcttagatccgttggtttgggatgctctgggacagccaagctggagatgttcttcagggagctggatatttgagcctaaatctcaggaaataagcaaaagatgtaacatgccaaagcaagaaggtttgggatgtggaaaaccttcatgtgatgcggacggcgtgttagtcaagagagggcaagggaggtaaaaccgagaagaccaggttctcagccacgcttctggagtttgggattaatccataggcactacttttttccacatatgtattttctgaagaaaacaagaacatgctatgtatttggtcctgtgtactgagtaatggcagctgtagagctgcttctggcgggttgactcgcgtgaccatgaactcagctgatgtggctcctcctcccttccagttgctttgcggagtcaggccagtgctcatgccggcctcacatgattggacgtcagtgcaacgaagtggaacctggttactactttgccaccctggatcactacctctatgaagcggaggaagccaacttggggcctgtgagtaggggagtgtgtggcaggtcggtaaagcagtgttttggggtgtagtggaacatacatgctttgtaaagaccccatttcagaagcatttttatagctttgtcagtgagcacaaaataaggatcaggaccatgccttcctgagaagagtcatatttaaagctaagtaattctataactcacaaattggctttggagcattcactgataaggcttttggttggtttaagaaatgtgtctttacaagaaacttttcttctctctacttatgctccaaagttatcaacctagcatggtaaatactgaggcaaggatattttttcatctattcatccccaaatttagtgactttaaatgtatgcctggctcttgagctggggtggctgaaacagctggaggctggctgggcatttctctccacacgaacacgacctttcttttttctttttttcgagactgagtttcgctcttattgcccaggctggagtgcagtggcactatctcagctcaccacaacctccgcctgctgggttgaagcgattctcctgcttcagcttcccgagtagctcgattataggcatgtgccaccacgcctggctaattttgtatttttagtagggatggggtttcatcatgttggtcaggctggtctcgaactcccgacctcaggtgatccgcccgccttggcctcccaaagtgttgggattacaggcgtgagccactgtgcctggcgatagtgagatttcttagatggcttccagcttccaaaaagaggaaacaagctgccagctctctgaaagcttggactcagaagtcctagaaagttcctcaggttctgttggtcacaagtcacaaggattcatggaaaggataacatagtttgcacctcttgatgggtaaggccacacacgggtacatacagatacatacagggaatgaaagagttgatcccagccatttttggatatgaccaaccacaggtattaaaaaataaccctgtaaacaattaatcagaattaactcatcagttgtgaacattcattatatcaagtttcttcacttgaaaatggagcctgaaactaatgccagtatgagagacagaaatccactagatactggactaaccttatggagaatctgggaagcaccttatgattcctagacttgcttataacggcatgtgggatgttctcttttttcttttatgcttactctcctggtcatatcaaataaggtatatcccaagcctttgagtgctatatccagtgtcccaagactgctccaaccacaaaactaaaaagaaaccagtttcctgtttggatatcagaaactttttacaatctattaggggagatttgactataaaaaatagacataaggtagccaccctttttgaatctttgggtgacttcggattactttgactattgaaaattattgaattccatttcaaatacagaataaccattgtttgccatgccctcagggggttagcatagtggagcggcaatatatccaggaccggattccctcctggactggagccggcttcgtccgagtgcctgaaggggcttatttggagtttttcattgacaacataccatattccatggagtacgacatcctaattcgctacgagccacaggtaaagaaaccacttagtggactggtggaggagggaggggagaatcagtagaaaaatagtacttctaatgggtattatatatagttatgaaatatggaggttgcattagaacagatcagattcctatagtctcacctcctccatggaagttaaaataaatgtaccattttctttctttcttttttttttttttttttgagtctcgctctgttgtccaggctggagtgcagtggtgccatctcggctcactgcaatctccgcctcccgggttcaagcgattctcctgcctcagcctcctgagtagctgggattacaggcatgcgccaccatgcccagctaatttttgtatttttaatagagacggggtttcgccatgttggccaggctgatcttgaactcctgacctcaggtgattcgcccgcctcagcctcccaaagtgctgggattacaggcgtgagccaccacacccagtcaaaacgtaccattttcttgaatccagtttctcaaacgtagtgatcttttgtgaggcactcaaccttgctgacgactgaggtggtgatgaggatgtatgagatcctctccttccctcacaacctggctgtgcagtgacagactgaagccccgaactgtaacgaaagactgaaggtgacggtgtaacagcagagagatgcatgatcctagaagatgggcatgcaccagccagcccgagccagggctaccaaaacgttttcctagagaatcagagctaggccttaaagtgtgaatggaattgtggaaagttggcacaaaagtaagaaatagtgtgagtggaagagagaagagagggttttgtttttattgagaatcattccacatagcttgatgagagatatggttggagatgctgttggcaaaaatactaggattagtaaaggaatttggactataatattcacaggaagctattgaagcatttcaagcaggggattgtcattatctgagctgctttaaagtggactgaaagggacattgggaagaggcagaaaacagttgagaggtgtttcagcatccagggcagaagggatttgggctggaaccaggggagtagcagaggtagtagtaaagagaaaagtgaagagcaactgtttgttttccatttcaacttggcaattgattgattcagagaggtctttttataaacaggcagtggtgggctaactatcttttcattgtttgtttcttattctagctacccgaccactgggaaaaagctgtcatcacagtgcagcgacctggaaggattccaaccagcagccgatgtggtaataccatccccgatgatgacaaccaggtggtgtcattatcaccaggctcaaggtcagtgtgacggtggtttggcagctcaacgggcttcatatgcaaattagtatttttctaatattttgcgagttttcaagtcaccatttcagagccagacgttgactgctgacttttttcctttggaattatcgatgcagagctttgtttttaatttttattttttggatgcatgaaggttgactttcgttgttgtctttcttttttgtttgggggcagatatgtcgtccttcctcggccggtgtgctttgagaagggaacaaactacacggtgaggttggagctgcctcagtacacctcctctgatagcgacgtggagagcccctacacgctgatcgattctgtaagtgcgagattgcttctggcatatgcaggaaagcctgggcggaaagtgcccagctgctctcagggtgttttgttgaggggtaatgctgaggccagcgtaagcagaatcattctttcttgcctccacggttactttgcttatactccaccccatggaaaggatttattccttctaaaaatataaaatgtcttttaaaaaaaacagcatttcactaggcgtagtgactcacacctgtaatcccaacactttgggatgctgaggcaggaggatcatttgaggccaggagttcaagaccagcctgggcgacaaagcaagaccccatctctaaaataaaaataaatagcatttaaaagccatcaagctgtgtaaaacatatctaaaatttcctgccaagagtatttaggaatagggaggtttatactttatttaatgagtctaatgatttctgttcaagggtcaaagaagcatttgggttttctacacgtttgcttgcttaaacccatgccatggggcaccactgtaaggatgtttggccgttctcatttcttcacagcttgttctcatgccatactgtaaatcactggacatcttcaccgtgggaggttcaggagatggggtggtcaccaacagtgcctgggaaacctttcagagataccgatgtctagagaacagcagaagcgttgtgaaaacaccgatgacagatgtttgcagaaacatcatctttagcatttctgccctgttacaccagacaggcctgggtaggtattgctgggcagctgcagcagctgctgtttctggctctgagtatatctggcacatgaagtacagtggagtgcccaccccctagccctgtgttaggcagcacaagggaaatagtgtctcagttacagtttgtctttatctttttaagtaatatttcagtgaaagagcaccactgaagatggaattgatattcaagaaatatgcaaataacaggtgaccaggggaaaagtccatgaggataaagcatttccataagcagggtagggagaggggaatggaatcagagaagcatcaaatacctgaaatgtatgtttttctctttgaaacgtcagaccatcctctgaaggtcactgggctttggtctaatgtcctgtgatatttgagctttgaaggcaaggggagaaaacattaatgacctcctgcctagaaaaactgttttgatctgccaactctgcctcccctttcttcccttccgctcatcatagggatgatactgttttaaaccagaactctgaataatccaaagtagttaaaggagaaaggatcagggagagcccgatgatgtgctgctccgtgtcatgggttctggcctctctttacccacagcttgtgaatgcgaccctcagggttcgttaagttccgtgtgtgatcccaacggaggccagtgccagtgccggcccaacgtggttggaagaacctgcaacagatgtgcacctggaacttttggctttggccccagtggatgcaaacgtaggttcctcaaaagcattgttatgcattcattcagattaactcagccattgtggcagggttccattgctgcagagccgatgcttccctcctgaagttgatcacaccaacccatgagcattctgaattggggacagggtgcttataaaaggagcatgtttccattgaatgagtttctcaaggcagttccttgtttgcctgtttctttagcttgtgagtgccatctgcaaggatctgtcaatgccttctgcaatcccgtcactggccagtgccactgtttccagggagtgtatgctcggcagtgtgatcggtgcttacctgggcactggggctttccaagttgccagccctgccagtgcaatggccacgccgatgactgcgacccagtgactggggagtgcttgaactgccaggactacaccatgggtcataactgtgaaaggtatgcagatgctgaaagtaaggagaatgtagtgatctctggctgagcagacagcatcttagaccaaccacagaattcatctccaccaggcttcagctcgctcattcatttctgaccacctcactattttctaggatcttgtttgtttatccagtacatattgagttgacatcctctatgtgccaggcaccgttctggtgctggagataccgcagagaacaaaactgacatgaatccgtcctcttggcgagtcaccctagagcttaccatagggctgtatagaaattctgtctgtctcagcagattctggcggaggataagagttgtgaaatgctcctgcctaatttaggcgaaaggagaaactaatccaaatgggattagtcattttaaatagctttgtttttcagaacgttttatgcaactacagtttccaggagactctataaaacatgcctaagtagatctgttctccagttagcaaatgtcagttgaataatcattatggatgtgctagatgtagagtaagaataggagagagaatatacctccataacattaataggatagctcaatagataaaaaatactccgtatgaaaaagttacctgctgacttacactgtttattactaattaagaaatgcagacagtactgttagaactggctttttgggcgtaatagtctccaccttttcactgtgataatttttctctcttccaacatccattcgccctatcgaagatatttgtttttaaaagtcacttgtgaaacattgcagcaagtgcttcagtcagtggtgaagttactcatcaggtgaaagagaaattgttagtgaaaaactgagtatgtgattaacttttggcatgaagatgttcatggaggcaaacacgtggctctcggctcaatgctagaacggtactcaagaatttggaggtcccacggactaccctttgaataaaaattatcccttccaaccttaaaattgtgttgtagaaagatagcaaggacacagttatacaacagtgaaaggaggaaattaatattttggggtcatctttttcttttcagccgttttccattattgttttttcaaagagagatggagaataagtacgagagaaagatatgagaaaacagagaaagacatgagaaaaagattaacagggagcagagagaggagggggaacagaagcaaacagcaaagggagctgccacaatgctgattcagaatcagcactcacactgtagaatgcatttgaacgaacatcatgtcagaatggcatagttgatatctgtgaccagctttggattttatttgtaaagggttttgagaatgagaaagggtatgggagaaggaagatttttaacaataggtttgggtggcaaacacttgattttaagtatttggaattctactatctagtttgagccagtttctcatcattcttttttctcattccaagataaccagagtttcaatcctgtgaatttacaaaaaaactctacacttagattgtccccaaggggaggcaagaaatgaacactcagtttctatcatgatgtatttggattgcctccaaaagacttgagaaacaaattgaattggaaatccttggacctcagttcctggcccaattctgcttctaacttgctttctaaccttgggtgagttaggatatccagcttctagaaaatttttttgagacggagttttgctcttgttgcccaggctgaagtacagtggtgcaatctcagctcactgcaacctctgactcgcaggttcaagcaattctcctgcctcagcctcccaagtagctgggattacaggctttttgttgttgttgttgtttgtttgttttgagatggagtctcattctgttgctcaggctggagtgcaatggtgcgatcttggctcactgcaacctctgcctcctgggttcaggtgattctcctgtctcagcctcccaagtagctgggattacaggcacaggccaccatgcctggctaatcttttgtatttttaagggagatggggtttcaccatgttggccaggctggtctcaaactcccaacctcaggtgatccacccgctgcagcctcccaaaatgctgggattacaggggtgagccaccgcacctggccggaatatccagcttttcataagtagaataactaggttggatgagattgtctccaaagttccttcaagatgttatgttgtaggacataaaaaagtaacataattaccattcaccttgacaagcaggctaacatagtaaaagaatgtattgctttaaggaccccaaattcaaattctggctcattatttaactagttgtataaactttgagaatcctttgacctccctgtatttgttatctttaaagagtgggattgacatgttggatatgggaattaataagtaacatgacccatccctgcctgagtttggaaccacctgagagacaaacacaggggctacacagctggagagcacccctgtcaccccctcagctccagtactgggaaaagctgggttatagcacatggctttagacctgtggccaccgtgggcttgccaacacatcacccctctcaggcataggcagaggctgacaggtataagccccgcctaggaggacagactctgtaatacaaggagggagcagaactgaatggtcaggacaggcaggcagctgatagaacaatcaagtgcacatggggagaggtggctcttcctctggggagcagtgagtgaggggccagatgaagccatgggtgtcactcgaacgcagtggtcctgcaagtaggatccctagatcagcagcatcaatattatcggggacctactgaatcagaaactcggtgggaggagcccagtcatctgtttcaggtgattgtgattgaagctaaagtttgagaaccactgttcccatagtaaatcttccacatgaaaacataaagagaggtgggcagatcacctgaggtcaggagtttgagaccagcttgaccaacatggtgaaaccccatctctactaaaaatataaaaattaggctgggtatggtggctcacacctgtaatcccagcactttgggaggctgaggtgggtggatcacctgagatcaggagttcaagaccagcctggccaacatggtgaaaccctgtctctactaaaaatacaaaaattagccgggcatggtggtgcatgcctataatcccagctacctgggaggctgaggcaggagaattgtttgaaccaggaggtggaggttgcagcgtgctgagatcgtgccactgcactccagcctgcgcaacagagcgcgactccatctcaaaaacaaacaaaaaaacagccaggtgtggtggtgtgtgcctgtagtcccagctacttgggaggctgaggcaggagaatcacttgaacccaaaaaacagaggttacagtgagctgagatagtgccactgcactccagcctgggtgacagagcaagattctgtctcaaagaaaacatgaggagtggagaagagtgtgcccaaacagaacagttttcaagactttccttggaacaggtttcttagaactgtggggtcatggcctgttctcttctgtgactgatgcaggtgcttggctggttactatggcgaccccatcattgggtcaggagatcactgccgcccttgcccttgcccagatggtcccgacagtggacgccagtttgccaggagctgctaccaagatcctgttactttacagcttgcctgtgtttgtgatcctggatacattggtaagtcgtgtgcatactttgggaggcaaagagagagaaaaagatgtctttatgagttcattgttaatgagaaaaaaagatgcaaagtgaaccaattaagtctacttttataatttttaattaaaaattagaaaagatgctcttttcctatttggcacatggagtggagtcaattcatattgagtctctgataagaacgttataacacaaagcaggaaagtaagctcgtggaaatctagaaaccctgtggaacacttttctgttattaaacattagaaagattaacttaagttttactcctgcctttctttatccaactcctagcaaaagtatctcaaagctgtgaggttaccaaatagtagtcagaagaaagaaataatatcatccagggaatcacaagatggccgaatatattcttcactgttaatgatactcacattatctatcaagattcaattaatctagctgggttgttaaaaactccctcttatttcatccttgaagccactgttacaaatactgattatgtttatatgtaactcagtaaaatttttttgcatataatttcagaatttcttagggaaattggtcatcattaaagatcccatttttcaggttgctcacagaggagtggtaacttttcagtttctgtaattctttgttttgttttgtttttgagacggggtctcactctgtcacccaggctggagtgcagtggcacaatctgggctcactgcaagctccgcctcccaggttcacgccattctccagcctcagcctcccgagtagctggggctacaggcacctgccaccatgccccaccaccacgcctggctaattttgtttttgtatttttggtagagatggggtttcaccatgttagccaggatggtctcgatctcctgacttcgtgatccacccacctcggcctcccaaagtgctgggattacaggcgtgagccactgcgcccagcccactttctgtaattcttgaattaggctgggtgtggtggctcatgcttgtagttccagcactttgggaggctgaggcaggaggattgcttgagcccaggagtaagagaccagcgtgggcaagatggcgagacaccatctctccaaaaaaaaaaaaaaaaaaattttacaaaattagtcaggtgtagtgccgcaaacctgtagtcccagctgctgggaaagctgaagtgggagaattccttgagcccggaaattcagggctgcagtgagctattatcatgtcactgcattccaacctgggtgataaagcaaggccccatgtcttaaaaaaatgtaatccttggattaggatttctacatgaagctatgctttacattgttagtttgctcccaacatgctccacccccatgtgctcagaagctaaagtctcatgtgctaggacctaactgtccacagccgctgtggcctctggggcagttgcaacactgttagagactacaaaacattagattggtgcaaaaagttactatggtttttgccactgaaagtaatactgccttcctctcacaactcaaagcctattctttccccttcagatgtgatcaccctgggctctttaaacagtgcagtgaagatgaagcaccgccacgatcagctctctctaggcatgagtgtcggtgcactggtgagctttcagtcaataagctaaacatcttgtgtttggttttatcgggtgacaggttccagatgtgacgactgtgcctcaggatactttggcaatccatcagaagttggggggtcgtgtcagccttgccagtgtcacaacaacattgacacgacagacccagaagcctgtgacaaggagactgggaggtgtctcaagtgcctgtaccacacggaaggggaacactgtcagttctgccggtttggatactatggtgatgccctccagcaggactgtcgaagtaagatgcacatttattctgcccacttcttagaatgacttccacctttttttcattatcagcagattttattcttcctgtatttatttcacttgggaaaacacttgttcagagaggtaaaatttcactttcaactaaggaaagatgagaccaattttttttttttttttaatgagacagagtctcactctatcacccaggctggagtgcagtggcatgatctcagctcactataacctctgcctccagagttcaagtgattctcatgcctcagcctcccgagtaggtgggattgcaggcaccccccaccatgcccaggtaatttttgtatttttaatagagacggggtttcaccatgttggtcaggttggtctcgaactcctgacctcaggtgatccacccgcctcggccttccaaagtgctgggattacaggcgtgagccgttgcacctggtcatttttatttttttctttacatccacattttctggcaggagtgaggtctcaagatgtgactcagtgcctgggagagataacaggaaagaaaaaccatgtagctgtccccatgataaatggcatccagtagagggtactgatggtatgctctgcccatgaacttgctggttggatggacttcgaaatcctaaatacccactgtggtcccaccttttctagtggcattgatggaatagagccttccagcttaaggaagagaaagaagtagcatctctaacatctctcttttggacctctttatttctctcttaccgagatcaactagcatttcctcttgctgcagctgcacagcccccaggctcctggctttgtttatacaaacatgtgtggaatgctagggaccagcaggactggattccttaaaagccttagtagcttaaagggcttttacctgctatgtccaacacgtttattacggctgttctctgccaagagtttgaaattattagatatctcaattcccactggcattttttaaaattatttccagttaagccttcaattttaaaatgactcaccagcatcttgtcaaatctgtgtattttgaacatacttttaggtgaaatgtgtcattgtgtgtatctgggaaatgtcagaactgtgtaagaaatcacgagaacttctaaacagtaattttagctttatttttgaatcacctccatttctttccttctttgcatttcaaggtcaagatgtgaagtgggaacatcttagcatttagatgtggctaacatccgcatgcctgtgtatttgggagtgtgacaataagtaaatgtgatgttcttttgcagagtgtgtctgtaattacctgggcaccgtgcaagagcactgtaacggctctgactgccagtgcgacaaagccactggtcagtgcttgtgtcttcctaatgtgatcgggcagaactgtgaccgctgtgcgcccaatacctggcagctggccagtggcactggctgtgacccatgcaactgcaatgctgctcattccttcgggccatcttgcaatgaggtgaggggctgctgctggggatgatgcctttatgagctcaggtgtcagcccatggtgactttgccccagttagagcaaggcaccagggcacacagcttgaaacacagcgtggcctggatcttagccctcatttgtaccccttggctgggtctacataactgtgcacagagtccccatcagacacatccatagcatttcagtagagggtcccagctgcagatgcagactcacttaacaatagacaagggtgtgctatttctcttcagtacctgggcgctgaagcagactcttttcttagcttctcgaaaggaaccaattagccatacccagcattgtaaaaagtgctgttgtttcctgacacatgctaaggagggcatactccctaagtcaggcgagtcaaaggtggcccaggattgtggctgatctgtgaggataaaagtgaggaaatatgtaaataaataataacatgccacagacctttccaagccctgttgcaaaagagcacttagatgctggcatggggctctcgacacctacgattgaagtgggagtcccttttcctagtcaatggagaccttctcaggtaaacagttcattcctacttctaagtggcagctagaaaaaaaagatgacaactggcttctggcctgaagcctgcttgaccaaggtctgtgttctggccgcagttcacggggcagtgccagtgcatgcctgggtttggaggccgcacctgcagcgagtgccaggaactcttctggggagaccccgacgtggagtgccgaggtgagttgtgggcgttctcgcattgacttgatcagagagtggagggaactggggttctacaagagccttctgtaaattataaaacacagtacaaattaacgtgtctataagaacctgtatttaattgcaaaataaattaacactgattgtttaaaaaacaatctaacaaatctagccctgcccataagtataggtagtcaagagtggatgtgcatactctcccggcctcacaccctggggtaaagtttgtttctgtgtgtaagcacacacacacacacacacacacacacacacacacacaccacaaatacacacagagctgctttttaaaatacttttaaccaaggtgggaccatgtgaaccctatgtttggcaaagtgactttttatcccctctgaacagtattttgtggccaacttccttgatggcacaagaagaggtaaatggttatcctagtaagatcactggattcagtggatcaactagactctgttgacagtttaagctcttggcgtatgtgtgtaagataacatccccaccagtgaaaactggagggcaatgtcatggagacttcgtgcacaacaaagggctccaaggtcaggggctccaagtcagtttaatgtgaataaaacccagattttcacctaagcttatgattaaacaaacaaacaaaaaaagatggaaatgacattttcttacaaacaaaaacttgttaaaattatgtgaatcatcaggattgcttgatttttatggtattgcagtttttttgacctggaaaattatttttcagatcttaaagtcaaaatatggaaaagactgaataggctgttgcaactctgtttttatattctttctttcctacttgattttcttccctgtttttaattgatcattatggataaaaattttctgtagtttcttaagtgctctttcgtatatttgttgcacatctgaaattataggtctctgttggactcttgaattttttttttttttgagacggagtctcgctctgtcacctaggccggaatgcagtggcataatctcggcttactgcaacctccacctcctgggttcaagcgattctcctgcctcagcctcccaaataactggagttacaggcaagcgccaccacgcccggctaatttttgtatttttagtagagatggggtttcaccatattggtcaggctggtctcaaactcctgacctcatgattcacccgcctcggcctcccaaagttctagaattacaggtgtgagccactgtgcctggccaggactcttaaatttttaaaatgaccgttttctttttttggacacaactacagcaagaaataatacagatcttcaagttggcaactcattcaatatctcctacagaaggtcaggaacctagaaactgtgttccttcagggtgcaaacccatgtgttccttaacagcagaaaaaggtcagtgggcaagaccagaacaaattagatatgatttgttttttaagttgaggcttagccagaagggtttgtatggacctcttagattaaggtttgtttcacagtggggataatgtttgctatgtcaataaacaggtacttttctttcatcattctccaaatttggttcttaatgagatctgacatcccctcttccattagaaggtattgaaatccagtggaccagtttctccaagatgtctcttgaaagtaaaactctgcttaaaatctgttttttccagggctctaatcactactctgttaaattcctcaaacttgtaatgccccaaggcttgattttttccagataatggctctatcgttgcacataccctgattctgtcagcatgtgtcattggcaaaatagctttctctgccaaagctttctgacctttggctccatcttagctttgttagcaggaaaggcctgctacccagagtcagagtcaatcagagaattgttcatgtggtccttagaactttactccttacccttttatcttttctttaaactttcgcctctaaatctgccagggaaattgtgacttatagaaaccttgtcaacttgtttgggtcaaaagttagatcctgttttagaaactctgcaaagagtgagattcatggcatcattgttcgccaacttctttgttcctttcatccagaagaaaggtcagctcattacgtaagaaacttttcatcaggaaaagcaaacaaccgataaaaaacagaaactaagtattctgcaaggaaacctggtttaaggagaatgtattgaaactggatatgtctgttcctttttactcctccctttggcatttcctttttttttctgtaagataatcatagaaatttagttaatggaggaactacaaagatcacatggctttatggtttgcctattatgctggccaatcccggtggcacgagggcagcagggatgcagacagatgaagaggtcccatagccaagagtgtaggtcctggagccagactgcccacattcacttcaagcaattggtactcctgtattagaagaaaacaaagtcccttctcatctcctcacccagtatactcctctttttactcagcttgataggaatctttccagtcctctctgcatttatatgtatacatcattcgtattcgtgaccctaataatgatacccagtcagctcacaccagcaagaaaaagtatttttcaagccctctggaagcattggaagctccaagtgagcataagtgaaaataccctaagagatacttccaggttctagatccaggtgtttcattttccccttgttttcccactacattgtcatctctccaaccttatctttagttttgtttttttcatggaagaccagaaagcccctttccccaaagtgttaaaatctggggtgaaggcaactgacctcattgcatactttggcaattcaaagttataaaatgttagccgggcacggtggttcacgcctgtaatcccaacactttgggaggccaaggcgggcggatcacttgaggtcaggagtccgacaccagccggaccaacatggtgaaaccccatctctactaaaaatacgaaaattaatcaggtgagatggcgcacacctataatcccagctacttgggaggctgaggcatgagaatcgcttgaacccaggaggcagaggttgcagtgagtgagcagagatcgtgccactgccctccagcctgggtgacagagcaagactgtctcaaaaaaaaaaaaaaaaaaagaagaagaagatataaaatgttggggcatctttatttggggtgttaaagtagatactgtctctcctttgtgcccacagtggctgagctggggtggggacatttggaaatttgggaggaggggagtattttgggtcatcaccataatggggtcattgctataggcacttggtatgcaggagccaataataataaatgtcccacagtgcttaaggcagtctgtcaaacagagaatgtgtcggatcctcaatgcttttagcactctttggagaaagctcataacctacaaagcacccagagagagtgagaattgatttgagtggacaatgggggattgattcatggccagctatggggtctggtgcagacagggtggcaacaggagtaggaccagtgtggcctgtgaaggcaggggccaagatgcagaggcagacaaggctcttggttatgtttgtgctggaatgcattcacgattagaaacaggagcacaggggctttctgaagggatgggcccagagatcagcagggacaagaagaggtgtcattcaaaattagatggaactatgcaaaaagaacatcagctcttttctccagttatgtaattgcttgacaaatatgttttcagttgaattggttgttagagggcataaatttagactttctgatgccaactagctaacaatatgcttatagaaagatttaagtcctagctaagtattctccttatggaaaaaaagaatgtagttatgtaaaagacaaatgagttgagcctccaacttacagattgttgaatgttcctattgtccaggcgggttggggctgttggtcgatggtgccaagcctgaacaagcccaccactgtgctgggatggagagggaatctcatccacccaccatgaacgtgctggagaaaacagcctggagcgctgcattgtcctcctcaggagtcaaagagtcacaggaggaatctttctgttgattcatagatagcaaaaaggaagggtaaagtttccatttggggcctctggctcttggaaaagggcagtgtctctaaacccaggcaaacggtaaatgtggggcataggcaagagggtccgggtagtggccacttccccatcatgctcgtttctcattttgtgttttttagtagaaaaacacagtgtgttcttttgcccagacattaatctttagaatgcctgtattttctaatgttgggatttctttcacaaccacccaccttaatatttccattgtgactcagaaaatcagacttcattcgattctttagagaactataaatactgttgtcagtagagtgaagtcttgtcttatgtaatcctaattacagaatgtgttctcagaagaggtaggctagaccagagctgggcagaccacaggcagaggccaaatccagccccctgccgatagtagctaatataagttttacacccacttgttcatgtattttccctggctacttgtgggcagcaatgccagagtcaagtcatcataacagagacagaatggcctgaaagctggatttactatttcaacttttacattaaaacttgatgacccctgtgctagacaggcagctcatttctgcaggtaaaattatattcatctcccaactttcattccaaaattgaacctatattactgaggccaaaaagggaaaaggataaaagagaatgtcagaaaaaagaaaatcccatgtaagaaataaaaattatttaaattgcccttgcttttagtaaatagaaatgcctaagtaaagtatcagtaaaattcttggcattgcagcagatcctggagtcccacgttgctttgaggcaaggtccacggcagaagaaaaccccattacctgaatcttagggtgtagcagtttctctgtcccaaggcaaatttaagtttccaacaaaaaggaggataatcagcccagtactgagtgaccaatggtatagagtggggagtggacacagagagaacagctgatactgttctgccacttgcaggctatttggggacatggggtacataaaatgaagtaacaagatagcagaaagtaagtggcacaaacttttcagttgtcagaagagggcaagatcagtaggaaatggagtcattagggaagggtttgcagaaaagattagctctagtggccatctacagagaacgtgctgagtgccaagcacttttaggcatattatataagtattcttaattttatccttgcaacaaagaacctatgggggtaagtatcatctccatttcacacttgactaatctcagactcagagaggttaagggacttgcccaaagtgaggaaagaactgggatctgaagccaggcctatgtggccctgtgtcccagctgtttccacaagcctgggggctcctcattgacagctggtatttagagaggaaattatcatccaagctaaaggacaacacagacaacatgaagcagcatggctctgggaggtgccctcgggaaacagtctcagctggagagtcatggagagatttggtttcaccagattgtgtgaagccttcggtgctgggccattaagggtagactttgttcagtgggcacaggaaggtctggaggaggagagggaaggatgtaaaggaagcaggcaagttaggtctatgtgataaatgggtacatagactatttcccattgtggcattgacttgctagtgttttcctctggaccttagtatctttaaaatcggtacaatagctttcatttacctacttcttaacaattatgtttgaaatgataagaaaacttagtaaaaatagaggaagcctactggccacagaacagagagtgtgtttacagatgaaagtcaaattattatggcttgttaaaatgagtatctcatttaaaaaatactattcttcatcttcatgatttgttcatcttaaagattaggcaacaacttttgctatgtatgctctcctttccaagagaaagtttctgattctctgccaagtaatcccatttcttaaaataagactgctttatctaggtcatttggattctgattcctttctcttaagagagaaggagcccactggacctcatcagctgcagcctgaatagtcagttcacagtttttcagatcctggtgggtgtgtgagatgatgggagaatctcctccatacattagtgtccatgaagttttactaacttgtcaagtgtgaactgacctttctgcttcagccacgtgagtgtgggagtttcactgaaaatattcttgaagtggagggggtctttttacaaggttgtaaaatgtgggccttctggtgcctgcctcttaggtgactccaagagaagcaattctggaaattcaatagccagggaaggaagcacatgaccaggggcttcagcttgaaatcaaaacctggtacatttgagactagttatttggtgccctcccggagagtcaggcccaactttttcaataatgacactgcaatccggtcatctgtgagatttgatggtttacttttcaggtgggagaaaggaatgttggtcagtttggctgaactggttgttgacttctggagagagccgaagctctgctagctcattggaactcttacccaggctaatttccctcggccagataaagagggaagccttatctgccttttaagtctttcagggttgggctgttttccccttaaagatgcctatgacagaatgggagcaagacatgtctttggcaacgaaataaatgaaaaatgatcacagaaattaaaaataaatcaacgtatgcatgcatcccttgccccaagcatgaatccagcaaaaacctaatgtttaggactgaacaaaggtatacctttgcatcatctatgggaaagaaataattgtctaagcaaactataagcatatgcaactctgcctcagttgtgtcaagtctaagggagatgggtgagtaggccccagagggctgcctcaccctgaccactggctggtagacaaggtaagttttattacaaatggcatcacttcttcctctgttacgtaagtcctgagatttgtgcatcagcctacattgctgaacttccgaagtcgtgattctgctccagctccaccttttgaagggtatctctttctccatctctcacacagacacacagatacacacacacgcacatgctctctttttttctctaatatacagaaggcgggcagaaacagctgggaaagtaacagtcagtgctccacaaaacggggtcgcgtgactgtgaacatcagtatctcctgggaacgtgatagaaataaaaatagttctgggccccacccagacctactgaatcagaatctggggatgggaggagagtagagaagcaatctgttttttatgaaccttccaggtgattctgatacctacccaagtttgagaggtgaggacccaggtgactcgggggtaacttttagctttctggaagatgactaaattttaccaaatgataatggaaatgtattcctaaaatctaaacaacataaactcttaaggtactaagttatttaagttatttgtaagttatctaagttcttcctaatctcagaaatcgattaatgtagtggttttcccaagcctttctcattatttctcttgggtgtcactggcattgacttccactaaaaaaagatcccatggtcaaatgactttggcatacatacaactggataaaaacaatataaaacagtttttcctgcagaactcttctgagtctgtaatatgctgacacttgtttttaatcttcaagataaggatacagaacttttcatcatgggatagttttttcaaggaacacatcatagaacgtatggtctacggatcaccattaaagttatccatggtttgcctaaacagcttcctgattcattacgagaatattccccaaacaagaaaaatgaaacatactttaagtacctggaaaggatctgttttttgaaaagcatacacccaagttttacttttgaaatcctaaggtcttggttttgaaaaccccaggcgctaaggaaattacatgttttaaaatcctaaaggttgaggaattaatattctaaacttcaaatttttgaataatcatgacgttattggcaaatacatataaataaacatataaccggaacacgtttttcccctttatccaatggaaatacgatcaagcatcactcttagcagaagactaccagacacttgtagggacacgaaaagtgataataaaaacaatttatttattgaatgcttgctatagaccagatgctcttctaagcactttgtaattattttatcttgaaagcagtcctgtatttataatcattacctcttcttacagatgtggaagacgtgactcagtttcctgattacccagggtcacataacatgtgtggagaaggcaggatttaccacctcagtccgcagttcatgctcttaaccataatgctgtactcctcaaacctgccactcgagagcttggaatgtagggggagaacaaagacaataaaaagataaactagcaatacaaggcaggatgtggtgagggccaaatgaatgggccacaaacacacacctctgggttgaaaggatggtgatgttatagcagatctcaggaccctcagtataactggttctgggagatgttccattagaaagtttttcagaggaaggccgggcgcggtggctcacgcctgtaatcccagcacttcgggaggccaaggtgggcggatcacaaggtgaagagatggagaccatgctggccaacatggtgaaaccccgtctctactaaaaatacaaaaattagctgggcatggtggtgcatgcctgtagtcccagctatttaggaggcagaggcagaatagcttgaacccgggaagtggaggttgcagtgagccgagatcatgccactgcactccagcctgggagacagagtgagactcttccaaaaaaaaaaaaagtttttcagaggcaaatcacagctattgacccaagagtggctcacacctgtaatctcagcactttgggaggccaaggcaggcagatcacctgaggtcgggagttccagaccagcctgaccaacatggagaaacaccgtctcttaaaaaaaaaaaaaaaaaaaaaaaaaaaaaaaaaaaagccgggtgtggtggcgcatgcctgtaatcccagctactcgggaggctgaggcaggggaattgcttgaacccagccaggaggcagaggttgcagtgagccgagatcgcgccattgtactccagcctgagcaacaagagcaaaacctccgtctcaaaaaaaaaaaaaaatccgagaaagcatgaatctgttgtgctttgccacagttgacattgcacttcaggaggattattttcttttatgaaggtatgtaagtgtccttgcatgcctagactaaaatgaggttagggcttcatttggcaaagacgtttggattctgattgcaagttaaccctgagtccgatgctgaaaaacgaaaaatggtttaagatgtgcccctgcccttggagtccacaatccagttagggaaataagatagtatattctttatttattcctgtctttcctcagaatgggtggaagcccagcgataagatgttagcataaggcctttcgtaattcaaaccctgtataaatactttcaaatgtcagatgttgatataaaaatgatttggtcacctgaaatttgggaatctaagccagggttcaagggcacagccactgtgctaagtaatctcagccacagctactggccaagaacacattttgtcctgtacggcacgtgattttcctgtgccatttggctttgcatgaggtgccaaccctattgggcctgtgagacgctgagactgaatggctcccaagatccctgcttgtagtactggcagtggtcatcacaatggcagacacccccaagttagattatacttagttgaaagcctttaaactggatacttagaattcctttgggttttgttttgttttgatcatgtttattgcatttcatcaagtatgttttgttgtgagatagagtcaggtacgtaaagagcttctcatttgtgatgtatccgatgccaggtggcacattatcaggatgtaacctggattgtttgtacagacatggtctgtggggaaatcctaagtaagggggaggcaaaggcaggacggaggtgaagagtatagactccggagttgcaaagaactgaatcagaattctggcgtggccttttccttgcagtgagacttggggcatgttacataatctctctgatctctgagttcccacatctgtgaaatagtgattattataacacgtatcccatagggttattgtgagagttaaatgggatcattcatataaaacatttctgtttaaagtattattactgctaagaaggggttagcaaccactgaagtcacgcatgtgctagaggaagctgctacagtctctacctgagccattggtcaattgttgtcgatggttgacaccttcccattttcacagtgaagtgagtattctaaatgccacatcttgtcactgaggttcatgattaagtagatcagctagcattgcttattcccttctagcctgtgactgtgaccccaggggcattgagacgccacagtgtgaccagtccacgggccagtgtgtctgcgttgagggtgttgagggtccacgctgtgacaagtgcacgcgagggtactcgggggtcttccctgactgcacaccctgccaccagtgctttgctctctgggatgtgatcattgccgagctgaccaacaggacacacagattcctggagaaagccaaggccttgaagatcagtggtgtgatcgggccttaccgtgagactgtggactcggtggagaggaaagtcagcgagataaaagacatcctggcgcagagccccgcagcagagccactgaaaaacattgggaatctctttgaggaagcagagtaagtagttaatgagccagaggaattactcataaagctgaaaaaatattgtgagttaacagcaaagatttcctggcatggtgcttccatcaggaggttttgttagtcctgtgggtgagaacagattctgagccatttattttccagcagtcttgactgggcatttgggtgagtgaacgttggcacatcagtggggaccagccttctggaggctgcagtacagaatatgcaagcattatattcagtgctcctccttgcaaatcatgttctaagtcagtaaaatgggaggaatgctggatttagaagacaaagatccataattgagtcttggctctgatgctaggcttgtgaacttggatgactcaattcctgagcctgtattttctctcctgtggagaaggggtaggataatatatgccattaccttatgaagtaatgaaaggatttatatataaaataacaacaggattgcagaaaattataaattaagtattgctactatgggggaaattccattacctcaaaataagactgcttacttcaagttttttctgcttctccgccattagtccaccagaccagtgcttcattcatctagttataacagctgctctatgctgaaaagtcctcatcccaccccttctctaggtaatcttccctctgattggacagtgtttgttagtggaagcctagagaattgaccttctcaaggatcatttatctaccctttctcctacctcccctctcttgcccctaaacttcccaactccttttgccaaaaaggaacccccaaaacagcacaataagacctaagtgctaaaggacaaaaatagaaaagggtatgaggcatctgtgcttccctagatgctatggttttttcactgcagactcaccatctaggcctgaggggactgcttcacagttaaatcctgcacactgaggtgtttatatgacgaaatgacagtaacattttttgtgtgtgatgagactttaatcagcacctttaagaagccagagggacttttcatctcataccaggcatgagtagcagaggacagctgacattagctcaagcgacttgaaggaggtccttcctagacctagatttaaagtaactggaccttgatgtcaagccttgggttttatgcccaagaccatgtagctggccagagtgttaggaaacgtctgatgtagagtgacaatgcatttagtgaggcattttacctcactgaaaagactaagcctcctaatgtgcagagatcacagttttggcaggccgtggtccgaatgcaagcccatttaggaaatgatccttggcctgggtcttaggcatctctgggaggaagaaaaaaatctggtgtcctttgagagcctgccagaagagagattacattcccaaaacagctctgtttctaccgtcactattcatttaactagacagattgtaataatcacaggaaaactagttccattactcttttttttcaacatactatccaaggatacatgttttaggaaccaaagtggccttattttaaaatacgatgttagatttgcttgttttaaaaaaaattgtatcattttatgagacctgagaagaaatgaaagccttctgtgagtcatataattaataaaagcaaagcactgaaaaaagaaactatgtatattagcctcaggaaaaaaaggcactgaaatgtaatttaatctaccattttaaaccatccctttaagtactttttctttgagttgggttatagttttatctcagccttacatatcatttttctaatggctcccaacctttcagcatctttacattttcctggttttttatactattatatcgccaagaagacaattacattcaattaggtgaaccagtaatacccagaggtaaaatctgctcaaatattactttctttacaatacacatacaaccctacccacacccacctggagcacactcgcatgtgcacacacacacccatatccacactatgtacacaataatatacaaatagatgtcaaaagtacggctttgtaggtttgaaagtacagaacaaaatgcagtttagattccaaattaaatactgtgaaagctaaatcttcttatttcattcttagtagatgctattttcttataaaaaataaaaaggctgttggtagaaggaggcccctctgacggaagagaggagtgtatgaaagctgatactggtggctcctgttgtctttgtggcaggctatagggcttcccctctgcatgttccatcttgaaggagatccctgaggcttagggaagaatgttttgggcttgtggctgggaggcctaattgtataactggagtcatttatgtcttcagttttcacaattgtaagggcttgaagctgcctgtgaatagagccagaactccacactctgacctgtgctcatcttacagcagaaatttggaatcccttaaatggcttgtctgccacaactcagctgagtggtacttctgtgtttctctcaaaagtcattgaacaaagaaaaattgttagatttaatactatctgttataaggaaaataaaactagcacttagggatgaaatgttacaaattactgaattggtttgaaattagtaatggatacagtactagtagaaaatatgaaacgtgaaagttctcccttgggtttattttatgtaagtaagcttaactttctctttacaggaaactgattaaagatgttacagaaatgatggctcaagtagaagtgaaattatctgacacaacttcccaaagcaacagcacagccaaagaactggattctctacagacagaagccgaaagcctagacaacactgtgaaagaacttgctgaacaactggaatttatcaaaaactcagatattcggggtgagcattttttggtgcaaatagtcccagacaatggatttaacgatatgtctaacgttttaatatagcacttttggggaaaaaaaaaagttttctaataaattttaaaacttttgctcatccagtttctggcacaaatgaggatcaaagtccccattttacaaatgtgggacttgggcacagagaacctaagagacatagcaaaggtcccacagagtgaatggcagtagttgtatcagaatggtatccatttcctgattttttttttttccctccagttagtagtttaatcccctggccttttcttggaagggggttcttttgaatagttaaggtattaatacttctgcaaatcctttcacattcaagaatgctgcttggtcagaaaaaaacttttgcaaatcattatttatatcatagactgtaaaggatcctcagcaaaaagtgaatgtagaaatatgttacatcatactgtccaactatccatactgttttatgcatgattgcttttggactaaagctaaaaacatgtcatgctgttatatataataccgtcatcccttggtatccatgggggattggttccaggacccactgcagaaaccaaaatccacaggtggtcaagtccgttatataaaatggcacttgcatataacctatgcatatcctcctatatacttctttctttttctctctctctctttctttctttctttaagagatgggctcttgctatgctgctcaggctggtcttgaactcctggactcaagtgatcctcccgtctcagacttctgaatagctgagattatagaggtgaaccaccacacccagctttacttttttctttttttcccttcagtatatttaaaagtaatctgtagattacttacaatacctaatacaatgtaaatgctatgtaaatagttgttatactttattgtttaggaaataatggcaagaaaaaagtctgtacacattcagtacagatacaaccattttttccaaatgctttccatccacagttggttgaatccacatatgtggaacctacaaatatggagggctactatattagtcatttgagtggatccgaataaaggattgagaaaagtcatctagtcatataatcttcaggctgcctgaaaccagctatttataaagaactggatgtttgcttgtgtatagaaacaagattgcatgattttcttaatttttcatttttcacccagatgtttgccatactcgagctggagtaggtgctaatgggacaaaacatattcattgctcatgaaaactgtacttcataaatattttttcttgaattttaaaactttacagtaaatttaggacccgaagacaccaaatatagacactgcttggggaggaagcctagtatgatgaggttaactgtgggcaatttcatttcctaccctaggtgccttggatagcattaccaagtatttccagatgtctcttgaggcagaggagagggtgaatgcctccaccacagaacccaacagcactgtggagcagtcagccctcatgagagacagagtagaagacgtgatgatggagcgagaatcccagttcaaggaaaaacaagaggagcaggctcgcctccttgatgaactggcaggcaagctacaaagcctagacctttcagccgctgccgaaatggtaaggtttggggatgtggccttactgctatggtgccaagcaaaaaaaaaaaaaaaaaaaaaaaaaacaaagaaaaacaaaccatcttttgtcattattacaataatttgcaaatgaatcagcaggactgaaactcctaggctgaggtctctggatcctggaatggggtatctgtaaccaagacagattaaaagcagcagcatatgggtttccagccttcccctcttctgtttctctgtggtcctcaactaaagaatgaatcatgactattctcccatactgttttagctactcagtgacaccgcactgaaacttgatcctttttacactgtggacatttctttaatattttttttcctaagtagagacagggtctcactacattgctcaggctagtcttgaactccgggtctccagcaatcctcctctcacctcagcctcctcccaaagtgctgggattacaggctaacaccccagcccacccccacccccgcttttttttttttttttttaaagagatggagtctcactacgttgcccaggctgacctcaaactcctaggctgaagcgatcttcccacctcaccctcctgagtagctgagatgacaggcatgtgccaccacacccagcttggacattccttttttagtttgttctgatttgaattataaaacccatctcagtgtaggaattcagagtcattctagaaggggcttccattaaaaattaaagggagcaaaagaattttttcacgggtattagctattatgttcctttgttccagtaactttacctggtgaagattaaccctgaaaccagcctagaaagtagattcatttcccagaagcttttaaaaaggaactctggagccaaatgaaattgggttgtgagtttaatgaaaatcaggcagaaggccccaaaaaagcctaactgagcctgtttcttcctcttccttcctgtgttttcaaggaaggatacctatgtgaaataatttggagggtattttttatagactaaggtttgtgttctcttagcccagagacacagagaaagttaaagatggaaggtacataggcgcagaagagttcaaacttcattacagctttgtcttagtgatgcttcctccctcctctcatcactttctctgaaatagacaaaattggtcacaatataagacagtgtttattgatgcctgctaggtttcatactcattatcttctgaaactttatagcaaatagggagcaaataatctgtcatttattaaatggaaaaataaaagatgaagaaaaaagaaaaatgaaggcttagagcaatgtgtaaattgcagctaacaggagacaaagttatgaagcatgaaatgccaattctctccatctttcccttcagcattgattccttccttacatattgtagttaaaaaaaaaaaatcagttatcacaaacaagttctgtgtgacctacaagaaacagctaagcatgctaaaggatttttgtcttgaaccggaggcatctccgtgggcggcagggagatgcatgggcggtgggtggggttcggggttcctctggcctttcaaatgtgtgcccttccctgtgcttgcttttccacctggtaaactacctagggattagcagctgcttcagttctcttactgtgtttttgtctttgttaatgatcctgtgagaattctttctgtaagttctttactgccatttccttgtgtagagagagttttgtccttttgtttttcaggtacttctagttctgtatctttgtggatgtttagctagagccatactgtgtttttttttttccatgtctgccccatctgttgaaacaaaacagatcttctatgtgtgctgtcagattgtttttagaaagcaaccgaggttttacacttatgttcttaagactcatgttttacagcatgcagaatacactttattttctgaagctttttgtttttgtaagccagataaatgacttatttagttgtaatttgagatataatggaattataattatcttaaaattattaggctaaatagttgattgtatttatttaaaaactacttttttgtactttttaataacaatacttgtttgggaatattctgttaactccttttcactgcagtaaatctttgtcttcttttcagtatgagaatttccacaaacagctctaaatgcaattttctccctgctcagccttttctatcatatagcacacttgtattataatttatcaatttgcatttgtatgccatgaccaagtggtgatctttgagaggttttggtaggtaagaaaggaggactctatgcatgtgtgatggcagtcgggggtggtaatttgggaacacttcatctacctttgttcctttgtttgtactgttttctttaacctgtggaatgttttcccacttcccctgctcaaatcccaccagccaacagcttcttcagctacaactgtagcattcctctgcagtctctcctttgtctactttctttcatagtgactgcatctgacctattcttggctattttatgtggaatgatccagtcctaactagatgggaagttactaaaacgctaggtaatagatcttttatgtcaccatatttactggaggagttaacatggtgctggtgctggtcccaaagatggttcacaataggttttttttttaaactctaactggttagaaaaaaaggaaggcattccttggcccttgcactggcagaattcaacttgatatagcagatgtttgcatcctgggcagagctcatatagtattttaactcatttgggcagaagatattgatgagttgtaaacttccattgtttccttggaaataagcaggttagtttactcctaaactctctgctcctctctccattctgtctcccaaacactgttttcaagcacccttgctgaggaccacctacacattctctggggccacccaggccctgcacagctgttttgctgcagcagattcactatccgaagtattgtgcctgatccttggcttgttgcagacctgtggaacacccccaggggcctcctgttccgagactgaatgtggcgggccaaactgcagaactgacgaaggagagaggaagtgtggggggcctggctgtggtggtctggttactgttgcacacaacgcctggcagaaagccatggacttggaccaagatgtcctgagtgccctggctgaagtggaacagctctccaagatggtaactcagtggatggcctcagtttttgttatgtatgtttgctttcagctgtggactaaaggatctgaaagggagaaatcaattctaaatgctaactgaaatgaaaagggcatatcacaatcaaatatgaaagttcatgtttctgtgaggtcagagaaagagatggggagattttcttcacagataaagaatttgctttctcctcactcaacacatgctttagagcaagatgtttaaatcttatactggataatttgagatagccatcttacttttctgactccagggttataaatacatccagctgtatgacaaaaactctatactaagcaattgagcatttattcttctaaagtgacacacactttttaagtatttatgtgggcacctgagaaaaagactcaggactattttataggccaggagttaaaaaacaacttgaaaaattttaaatgctagttctatttatatcagaatactgtttaggaatctctatactgaatacttgcagtctgtaagatacaatactttgttgaatgggagaaagttgtttcccagacatatgattccaagtacatagtttttcaacatcatttttgagccatttccaatattctggtctcctttagaaagaatgaaagtcttccctgggtaatttattcttcatatttaggtctctgaagcaaaactgagggcagatgaggcaaaacaaagtgctgaagacattctgttgaagacaaatgctaccaaagaaaaaatggacaagagcaatgaggagctgagaaatctaatcaagcaaatcagaaactttttgacccgtaagaaattttttcattttacttttagacatttgtttctgtgtgattctctgtttacattttagataaaatccatttctgtcagggtactaagtgacatttccaaataagaaaaacgtccgtatattaaatgtttccacttcttaaacttatatatgtgtatcaaataactttctccaatgttacgcagatacagacacacctgatgggatactcaggtagccaatcaaaagtcaaatatttacattgaaaattgaacgtggaatttgttagaaattacgtatagtaatttctaaccttaaagaagtggagtttgttattttggcattgcccccaaagctttgtaattctattatttacaggatattatacctatagttagttaagagtgttgctagtcacagttcaagtgttaccagtaaagatggttttggctgcaaattacagaaaactctcaagtgaaagggacttaatcaaaaaggatgtttattatctcacatcttaataagatatccagtagcaggatagcttcctgggtctgcgacccacatacttttcatctttctactctaccatcttaagcatatcagctttgtcctctagctcctcatggttacaaggtagctgccaaagttccagacatcatataaagattaataatggaagaagagaccacctattccttgcatctttttaaaaaggaggaagtcttccctagaagcctttaagcagtcatccttataaacctcactggccagcaataagtcacatgccaatgcataaatgtcactggaaaatggaaatgcgattacagtaattcacaaactaatatttaatgctgggttgataattttacctgacttagaggcaggtacctgaaaaaaaatcagtattctgttagcaagaaaaaaggcatggctaataaggagtcaacagtatttgctaaggatatcttaggtaatattttatggaagccatcattcaagtacatattttatttgaataaatcctctggggtccatttttatgttcaatagtttaaaacataagcaaagcttgaaagtaaatgaggatctgacgtatttgaagcttaacttcataaactttttttttcaccatcttccacattttacatttgaaactccttggctttgttgacaacccattattccggttctcctgcttctataattttctccctttctataatttcctgaatctagatcatttgtaggaaatatcaaatctccatatctgcattcacaagtttctgagctattcgtccaacctcaattaaaagatttcattgcctttaagtctcagctttaagctctggccctctatggttttccacaatgttcagattcactctgctatactttcccgtaacatactctgccgttcctgtctccccatctggaattgtcctttcttctttcaaattctattatcccttaaaatctgatcagctcctcatcttccacgaaggtttccctcactacccagcctaaaacaaattctagtagtactcaattgtctgcagttacttttttgtgtgtgtaggtctcatctcccctcaaaatcccagatagattataaactcttaaacaggaagttagtgtctcttggtgtgtaaccccaccatgctagtccatagtagatgaccagtaagtggttgaatgaatgaaccatctattcttttcacctctttttggggacatctttgcttttcacagaggatagtgctgatttggacagcattgaagcagttgctaatgaagtattgaaaatggagatgcctagcaccccacagcagttacagaacttgacagaagatatacgtgaacgagttgaaagcctttctcaagtagaggttattcttcagcatagtgctgctgacattgccagagctgagatgttgttagaagaagctaaaagagcaaggtatctaaagacatggcatctaaggggcttattttgtgtatctatcatggagtaaaaagtatctctttaaccaatgaaacttctaagaaggacctatgcgagtctctctgggtcatttcaggaaggctattctttaaagaaaagaacactgagagtacttttttcatgttcagcaacaatatactgtctcattattttttactcagcaaaagtgcaacagatgttaaagtcactgcagatatggtaaaggaagctctggaagaagcagaaaaggcccaggtcgcagcagagaaggcaattaaacaagcagatgaagacattcaaggaacccagaacctgttaacttcggtaggcatacacaatcattacatgaatgggaacacacctacatatacacttaccagaaaagtacatttgttatctatgaacagaaattcttacaactcaacattaaaggattcctttaataaatctaaactactccgttagcatggatgctaaaaataagtggagataggttttcaaggaataaaaggactctgattcagacactggaccattacgtcccatctcattttctcccccacaaagtctgagaaagataaaaacttctattcttgggcgggcatggtggctcacgcctgtaattccagcattttgggaggccgaggtgggtgggtcatttgaggtcagtagttcaagaccagcgtggccaacatggcaaaaccccttctctactaaagatacaaaagttagctgggcatagtggtgtgtgcctgtagtcccagctacctgggaggctaaggcaggagaattgcttgaaccggggaggtcgaggttgcaatgagctgagatcacaccactgtactccagtctgggcaacagagactccatctcaaaaaaaaaaaaagcactcctattcattgaggaaacagcatatactctgttcagtagtatgaagtataataattttagaaaactgtcctgatgttataaagcagcttatctggttaagaaggccaatgtctcaagattttggtcatcaaacattttactatatagtagttttggaaactatgggagaacagtcagtctgctttcaatacccaattctagagaaacctaatagagcacttatagctaaacaatctgttctgtttagaatgcatggaaaacttaatgttttttataagaaatatactgtgactaccagatattaaaagtactcattacgaatttttcatagggatctagcaccttgctctaaaaatcctctttatctcttaaaagaagtaatgcaaacataattccattaaattcttttgtttctcagaaagttaatgttttcgttccaattttacgagtttttaaaaaatgaagaaaattgatgagttatctaatccctatacaggttctcagaatatactttgaaattaaatgctcccatacccagcattgtcagccttctcaggccaatcctccatgtgtttaaaacctgggaagatgaattttcaacatgcttttcttaccattagttggtaaaaacctgtgttcccctattctattgctgtcagttaaatgaaggccaataattctgtccattttcctccttaaatttcgagtatcaataagactttttcttcaggctatttgttcaagtttagaaaaattatgttttcccaccagactataaatattttgatgtttcgatctctaggtttttccattttctcagtttgctgttaatattttagtgaatattatgtcagtgactgtagaaattattgttttgaaagccaggtgcagcagtgtgtgcctgtagtcccagccacttgggaggtggaggtgagaggatcacttaaggccaagagtttgagactatagtgcactatgatcatgcctgtaaacaaacagtcactgcactccagcctgggaaatatagcaagaccctgtttcttgaaaaaaattgttctgaaaagcaaattagaaaatactgaattataggtgagatgtggcttgatgatgcaagttaataattggggttctgtttttcaggggccctagggggcaggaagtgttttaggttagtaacaataagaaacaaagagaacctctaactaaactgtgttcatgaaagcttatcagaaacaattcactcaaactttatcttctaagaattataatttctaagaattttattctaattaaagggtccttaggtttgaaatatttacaaattttagcctatgtcttatactgacccttattaacttcattatagcagtactgttattcagttaattctatgtaattagacccatccttgaagatcattttaaagaaaaattgagtgctcagtgaaattgattcttttgtcatgggctcaactgcttactttggctagcttttaaaagtcaatgtttattgattctactttgaaaggagatcagatgtggatcctcaccagttgcccagatatttttttttccctaaataactttgtgtatttagagtttacagctgtaacgttcccagaccatacatcatctcacaattctatagaaattcaaagaacatccctagtctccatgtcttcagtaattagctgaaatctccactactagagtttaacatttattttcccactcacattaagttggaaatttatgtggaaatccctcttcgcacagctgcttatttgtgaatgttctttagccaaagtttgcaggtgtccttaaaatgctttctcaacacatcatgctccttggggaggtggggttttttgtttttttttactgtcagaaaaaattttacatcaatctcagcttagatcatcagaagtactgaaagaatgaagtgaatatatgaaatgtagcaaagactaaagttagatacttcatgtaacttttcctgaaatattctttttagtaattacttcttttggtctagagcaaaatggcacagcagacttttaaatcttcctccaaacttgtactcatagtaattccatttcttaaactaatgtcttgctggaaaattgacatgcttttagattgagtctgaaacagcagcttctgaggaaaccttgttcaacgcgtcccagcgcatcagcgagttagagaggaatgtggaagaacttaagcggaaagctgcccaaaactccggggaggcagaatatattgaaaaagtagtatatactgtgaagcaaagtgcagaagatgttaagaaggtacgtaaatctttgtaatttcagagctatgttgttaaaggagccaccagtctcctccttgcctgccttagagtaagggacatggacctaacagaaacagaattcatcagaaatatcaaatgacctgttttgcaacagccgtctttagaagtgtggatgggaaagaatatggaaatatctaataagtatgacctatgtcctcaaatccaaatttggacaagagtttagaagaacggaattaacttaggggtagaagtctcaaaacaggctttttttttttttttaaaccaactatattgacaaaaaccagtcatattgaacttttatttctgtgcggtagtcagttaaattcttcatggcatatagtaattatcaggccatttgagaatattttacaagcaggttggaacagagaacaggtagtaggaaaccaaatcttatctctttgagactcattttgaattaactacccctcacctctcattcgaaggcactatattttgcagagaaaaactcacacaacccaaatgtttaatcagaagccatgtaataactgaaacacatgttcagtttctcaataatgcttatttctaaagagaacattaaaaacttggtggcgccggggtggggcttaaaaccattgaatcactggtccccaacttttttggcaccaaggaccagtttcctggaagacaatttttccagactcgggggtggggatggtttcaggatgaaactgttccagctcagatcaggcattagattccataaggagtgcacaacctagatcccttgcatgcacagttcccaataggattcgtgctcctatgagaatctaatgtcaccactgatctgacagaaggtggagctcaggcaataatacttgcctgcccacccagttcctaactggtccgtaggcctgggggcacctgcatttactgacctaatttcagtatttaactccctactattcaaaaattttctggaagttactgtagcttttcgggcattacgtaagagtaactttccctacctctctctaggttgggaaagagaacaaaacaatgagaaaagttcactgccacaatatcagacagctgtcttttctgttttggtttgtgtggtttcctgcagtactgaggacacaaatttctcaagtactctgcttcagggcattttgcataatgacattttatcacaagagaaaggaacaaaatctcttgaaatgaaatttccataaatggctatttgaacagtttctaaaaagaatcatttgcattccaaccccacaccccatttctcttctcctcactcacttcttgcatatgctacaatctcacctttccttcctgtatcttttgtttaatctttttcctctgatttccttataagcaagtcttcacaaatcctaatttagtcaagatccaaagagcctccacttcttcaatatgggcttctctaatgtctaatctacttttgaaaaatctgcgcttctctatgtaatttgcaatacaattatgctacaacttttctatagaaaagtaataatcaggagaatgaggacttagccctaaggatttgctgcaactccagaattttttgaaatgttctttaaaatcatgtcaattttgcattcaattccactgtttgaagataaaattttaaattacttaccagtgaatatccttggtggcccttaatccagaatgcatgccatgattacactattgctcttaaatgtaattactgacactaacattaccacttctttctgtctaaatgtggaactatagactttagatggtgaacttgatgaaaagtataaaaaagtagaaaatttaattgccaaaaaaactgaagagtcagctgatgccagaaggaaagccgaaatgctacaaaatgaagcaaaaactcttttagctcaagcaaatagcaagctgcaactgctcaaaggtgggtcttttcacacaggcttattttttaaattactttaaggcatccatagtttatttaaaagtgaaaaatatattcactttgtcttgagatcatcatagtataaattgctcagactttatatatatatatctccccacagatttagaaagaaaatatgaagacaatcaaagatacttagaagataaagctcaagaattagcaagactggaaggagaagtccgttcactcctaaaggatataagccagaaagttgctgtgtatagcacatgcttgtaacagaggagaataaaaaatggctgaggtgaacaaggtaaaacaactacattttaaaaactgacttaatgctcttcaaaataaaacatcacctatttaatgtttttaatcacattttgtatggagttaaataaagtacagtgcttttgtatata

SEQ ID NO: 382 - DNA, 35897 bp, Homo sapiens
  source 1..35897: mol_type = genomic DNA; note = NC_000020.11:c33443853-33407957 SNTA1 [organism=Homo sapiens] [GeneID=6640] [chromosome=20]
ccctcggctcccgggccccgccccggcctcctgcatttgcccgaggccccctccccagcactggccacaccccagggtagccccgcccccagagctcctcccccagcggccggggtagggtggcggctggcccagccgggcccccgctgccctctgccctgggcgcttggtcggagcgggctgggcaaagcgggacagggcgagcgcggcggcccgggggctcggaggcgaagatggcgtccggcaggcgcgccccgcgcaccgggctgctggagctgcgcgccggggcgggctcgggggccggcggcgagcgatggcagcgggtgctgctgagtctggcggaggacgtgctgaccgtgagccccgccgacggcgaccctggtcccgagcccggcgctccgcgggagcaggagcccgcgcagctcaacggcgccgcggagccgggcgccgggcccccgcagctgccagaggcgctactgctccagcggcgccgcgtgacggtgcgcaaggccgacgccggtgggctgggcatcagcatcaaaggtgggcgcgggacaccgagggcgcggggtcgtggtgtctgggggcagccgagggcgcagggggctggcagcgcgcccaggacatggagctggaggcttcctgtctgggggtaaggggggtctgaggaaacaggtaacggagggcactgggcacaccaaggttggagggggtttcagtagttggtggccttagggggcacggaagacacaggtgtggataagattgtgggagcaccaaggacacgtgggtgggagttctgtgtggaggcgggggggtctgaggggtaaccagcatgaacatcaaggacaagaggggtcccccggaaagcagagtgtggagaaagggggttgaggccgggacaccagtgggacagggaggagggagtccctgagaagcaaccaaggtgggtgcagaggggaagcctggagtctgggaagcacaggggtggataggaggcctgggtgcaggcacaggctggggtcacaggcagaaggccagcaaggacctaggaatctaaggacccaggaaggctgcagggagccctgacagctggatttgggtctcctgatctgactatctccaccttgcacaggatagagctttcagcccccaggactgaccgctagtggggtgcagttagggtgcaaccagactgtgtttgaatccaggatcagctgtgtgaggttgcaaaagtcccgtcccgcctctgaatctgtttcctcaactgtataagaggatgacagagttgtgatgtttctgagagcagggctcaccacaccagcacactgtaggtgcctagttaattactgctgttagcggagaggaaaaatggaggccagcagatactcccaaagcaactaaacatagttgttaaaatccttgcacacccccagctgctgggttcactattcctgcccatctgtttctcagggtcccagcccccagcaggtgctttgggaaagggtatcagcctttgtctccaccttgaatacataccgtaccctctggggtctccctggtactggttctgttgactagtgcctccagaccgtttggcttggctgaggcggtggggatggtggtgaatgccaccactgtgtgccaggtgctgtgcccaggacactagtctcatgatccacttcatcctggcaacaagtggtgaaaggtagggagtataattcccatattgcaggtgaagaaactgagactcagaaagttaaaatgattttcccacgattacatagtgagtgtcagtgctgggatttgaaccttaattatcagctactgtccctcagagagtgctcagggaagttgattctttcctgtagaagggcagatccccaggcagccaaccaagaggggctaaaaaggagaaatgagaaaatgagggtatgggcaccagtcttacccccaatctccagcatgggatagggcaacagatgaatccaaaaattatacactcagtgtgtcaaagcaggaaggaacttattcatacagaattccattctgcagatggacacactgagactcagagaggagcagggactttgcaaggtcacacaaagttactccccagctccataattctaggtggaggggagggtacttttaggagacttcaggtatttccattggatccaaatctgggctcctgttgccatggtaacccctcctataaagtctagcttagtctgaggcagccatgagtgatcatagcttcaaactgaactgaagcccctagtttcaggtgggggagggcagatataaatagaaaccccttcctctcctagacttcaagctctgtgcagataagcaaacggtcgggcctgtgtgggcgtcaagagaggtgttccagtcccagctccgccaccagacttgtgtgaccttggaacaatgacctcccactctgggccactaattcttcatcttcagtattctggggatgagccaggagtgtgatatctgagggcctgacttgtcgtctgtggtagggctaatagtgttggttctggagcctggaggcctaggtgcaaatactggcttcgctacttactagtggagtgaccttggacaaggggcttccctccacacttcagtttccctaataggaaactgaacatacctatgtgatggggtattgtaaagacgcaatgaatcaacattgaaagcatttagcacagtgcttggcatttggtaagtgcaactaaggtgaactcttattactatttcttattttaaaagggcatttaagagtttggtaataaagatgtttagtaaaatgtattagcttcttttgtatccaagatgccattcaggcaggtttttagaatctctagactctaaggctttggtttccagcctggactttggattgtaaaacattatgattgctaaagcagtcttttgaggccataggaatagccgacttgtctcttgattccggtttgaggggtatcagtgggttcccacattgttgcctttttgtgtgtgtgtgtgagacagtcttgctctgttgcccagggtggagtgcagtggtgcgatctcggctcactgcaatctccacctcctgggttcaagcagttctcgtgcctcagcctcctgagtagctggaattataggcacacaccgccatgcctggctaatttttgtatttttgttttattttgagatggagtcttgttctgtcgcccatgctggagtgcagtggtgtgatcttggctcactgcaacctccacctcctgggttcaagcaattctgctgcctcagcctcctgagtagctgggactacaggcatgtgccaccaggcccagctaattttttgtgtttgtatttatttatttatttatttattttttgagatggagtttcgctcttattgcccaggctggagtgcaatggtgcaatcttggctcattgcaacctcagcctcccggttcaagcaattctcctgactcagcctcccgagtaactgggattacaggcatgcgcccccatgcccggctaatgtttgtacttttagaagagatggggttttgccatgttggccaggctggtcttgaacccctaacctcaggtgatctgcccatcttggcctcccaaagtgctgggattacaggcgtgagccaccacgcccagccatatttttttatttgtttatttttttattatgtatttatttacttttttgagcagagtttcacttttgttgcccaggctagagagcaatggcgtgatctcagctcactgcaacctccgcctcctgggtccaagtgattctcctgcctcagcctcccgagtagctgggattacaggcatccgctaccacgcccagttaattttttgtatttttggtagggacagggtttcactatgttggccaggctggtctcgaactcctgaccttaggtgatccacctggcagccttggcctcccaaagtgctgggattacaggcataagccaccgcacctggcccttttttgtgtttttagtagaggcaggatttcgctatgttggccaggctggtctcaaactactggtctcaagtgatccgaccaccttggcctcccaaagtgttgggattacaggtgtgagccactttgtccggttattttcatttttaatttttgtgcgtacatagtaggcatatatatttatgggttacatgagaaaatcgaaaacatttaagaaaaagtgattgaagcactttgtaagttgcacaaacactggtgaacacccaaagcacttaatcaaaagatccagggatcaaactatagcattatgaattttgaaaatgatttatttaattaattaatttattgagacagggtctccttctgccacccaagctggagtgcagtggcacaatctcagctcactgcagcctcgacctcctgggctcaagtgatcctcctacttcagcttccctagtagctgagaccacaggtgcctggctaatttttgtatttttagtagaggcggggttttcccatgttgcccaggctgatcctgaactcctgacctcaggtgacctgcccacctcagccttctaaggtgctgggattacaggcatgagccaccggacctaatcaaaaatgatttattattagtgttactagtgtcccaaacttccaagatttttctcagattccctttattctcccattgccttttccagcactgggctaggcaccaagggaagccttcagaaataattgtgtcttgatgtgactcccaagtgttggagtatctgcctaagtcttgtcctccttctgtacctgtgcaggcggccgggagaacaagatgcctattctcatttccaagatcttcaagggattggcagctgaccagacagaggccctttttgtgggggatgccatcctgtctgtgaatggggaagacttgtcctctgctacccatgatgaggcggtgcaggtcctcaagaagacaggcaaggaggtggtgctggagggtaagcactgacgttccagggttcagaggggctgggtggaggtgttccactgcttctctacctcccccaggcctcagaaggccccatcccagcactgggggctgggaggtgggcaggactgaaaacagaaacagaatttggggacctgcctgaagacagtgtggggtggtggagggagagttggcatagagccaagcagacctgatttgcattttctgtcttccagtcactagctgtgtagccctggacaagtcacttcatttccctgatccttagtttcctcatttgtaaaacagggatgtagctcctgcctttctgggttgttgcgactagggcaaaaatgtacatggcagagtgtgccagcacctgagtgacacagggagagaggggtgcggactggggaaggggcaggtcagattctttcctgtggggcctggagagctcttgacttcaggttcttttagtgcctgggccttaaaaccccaagacccatcctcctttgggagaagccttggcttttattttactttattttttttttgagatggaatcttgctctgttgtccaggctggaatacagtggcatgatcttggttcatcgcaacctctgcctcctgggttcaagtgatcctcctgcctcagcctcccaagtagctgggattacaggtgtgcgtcaccatgcccagctaatttttatatttttgtagagacagggttttgccatgttggccaggctagtcttgaactcctggccttaggtgatccacccacctcagtctcccaaagtgctgagattacaggcatgagccaccacgcccagaggccttggcttttatagagtaggacatcaaatccttccagccaggatcagagaggagttttgtggaggaaccttggttgaatggctttctccactgttccctcacagtgtggtcttgggtgggacccttgccctctgtgggcctcggtttccccatcagttgttacacgcctcctgctgaggttgtcccatgaccatcttgtgccatgtctctcaagaggtttctgctttgctcagccctttcctcaaactctgtcagctctggaagccccgtgggggcctgaggaatgtgtctctggcttatggcccagaacaggcacagggaggtggcgggggctgatggagaataacacggccagagaagctgctgagttgagtcccaggcccaaatcctggtgggttgccttggtttccctaaaggagtgtccaagaggccacagaagcaaataggttctcggtccttggttgacccagatataaaataaaataaaatttaaataaagaaaataaaatgtaaagttttattttatattttaggtatatctatttaaatgccatggatgcatttttttttcttgttttttttttttttcgagacagggtcttgctctatcacccaggctggagtacagtagtatgatcttggctcaatgcaccctccaccccccggggctcaaacaatcctcccacctcaacctcctgagtggctgggactacagatgcatgccaccacacctggttaatttttttttttttctgagatggagtctcactctgttgcccaggctggagtgcagtggcatgatctcggctcactgcaacctccgtctcccgggttcaagcaattcttctgcctccgcctcctgagtagctgggattacaggcacccaccaccatgcccggctaatttttttatttttagtagagatgaggtttcaccatattggccaggctggtctcaaactcctgagcttgtgatccacctgcctcagcctccaaaagtgctgggattacaggtgtgagcccctgcgcctagcttttttttttttttttttttgagatggagtcttactctgtcgcccaggctggagcagtggcgcgatcttggctcactgcatcctccgccttccaggttcaagcgattcttctgccttagccttccgagtagctgggactacaggtgcgcactaccacgcctggctaattttttttttgtatttttagtagagacagggtttcaccatattggccaggctggtctcgaactcctgacctcgtgatctgcctgcctcggcctcccaaagtgctgggattacaggcgtgagccaccacacctagccaattttttgtagagacagggtttcaccatgttgcctgggctggtctccaactcctgggcttaagggatcctcccacctaagtctcccaaagtgctgggattgcaggccacagtgcccagtctagatgcatttttttgatacttaaaaaaagctgactctagagtgttgatccttagaagcttaagtgtatcaatcatattttaatggcaaagttaaataatagaatgccacataaatgatatggatataagagactttccccacatgcctcattactttgatatttatagtcagcaatgcggtttgaaaccactgacattcatcgaaatgtcatattttagttgacttgaaagctcttttagcttctgttgtttgaaagtttagtctatggtaaaatttctgctatagacacaattcaaatccacattcacacggaggtcccctcacctcctcatctttattttttatttttatttatttatatttttgagacagagtcttgctctgtcacccaggttggagtgcagtggcgggatctcggctcactgcaagctccgcctcccgggttcacgccattctcctgctcagcctcccaagtagctgggactacaggtgcccgccaccacgcctggctaattttttgtattattagtagagatgtggtttcaccgtgttagccaggatggtctcgatctcctgaccttgtgatctgcccgccccggcctcccaaagtgctgggattacacgcgtgagccaccgcgcccggcccacctcctcatctttagattaaaaatgtatctatctgggttcccatgtatgtcgttttgagaaggtagtatctgtaaatgtgtgaccttgaagcatcttctgactttaggagtgaatactcaagccttccctctaactcatgtcatgcattcctcctcactaagccaagagacattcatggacatctactgtgtgcctgctgtgtatattaaggtcagaagctaaactacacccagggcctctcctgaaggagctcaccatgtggtagggtagacaaaacataaacactatctcctctacacaaactgtgtttttttcttgaggcagggtctcactctgttgcccaggctggagtgcagtagtgcgatctcagcttactgcaacctccttctcccaggttcaagcgattctctgcctcagttctgtagctggaattacaggtgtgcaccaccacggcctggttaatttttgtatttttagtagagacagggttttgccatgttggccaggctggtctcgaactcccggcctcagtgatctgcctgcctgggcctcccaaagtgctgggattacagacgtgagccaccatgcctggcctacagaaactctttaaaagccggtggctaggtgctgtgactcacgcctgtaatcccagcactttgggaggctgaggcgggtggatcacctgaggccaggagtttgagaccagcctggccaacatggcgaaaccccgtctctactaaaaatacaaaaattagctgagccatggtggcgcgtgcctgtaatcccagctactcaggaggctgaggtaggaaaatcttgaacacgggaggcggaggttgcagtgagccgtgattgtgccgctgcactccagcctgggcgacaagagcaagaatccatctcaaaaaaaaaaaaaaaaaaaaaaaaaaagctggtgcctgaaatcctgtctgctctgcaataaatctctgtttggccttgggtaagacccttgccttctaggggactcagttttcctattgaagttaggctagatcagaggtgatcaatagcttttatttagagtggcagctccaggcaggcgtggtggcttacgcctgtaatcccaacactttgggaggcttaggtgggcagatcacttgagcccaggagttcgagaccagcttgggcaacacagtgagatttcatctctgtaggaaaaaaaaaaaaaagagtgtaagcgtcagctccactggtggttctgtgagttccatatttggaaggattgggaggctttgtctgggctcagcagaaaggagctggaattgattagcaatgtctactacagatgcagtagagaagtaacatgtgtatcatcccaggactgaggggcccctgctcttatattctctgagatgtttcacaggacgagatcattccttggtgaaccctgcctatggcctgggtaagagaaagaagaatgtggccttcatgtttttccccacttttccttagttgaagtctttttcgacctattctcctggcccaagatctcatggaaggaggtcattccactcaagatagcacaaagaggggaggaggagtggtggaaggcactggagtcaggaatctctgaatggcaagagtgatcagagaggtctgaaggataggaggatgctgggctgtggctggtccttgagactttggggagtggagaaggtctgggcctggcagttgcaccagtctggagcagccagggttcctgggaccctctctgggcctaggtttccccggagttgaatcactgaccacattgttcaacatttccccactcacatcccattactgaggacgcctccaaggggccatggaaggatggcctgtcctttggatgtgaacttggcaaggcaactggatatttttccagctcagtggatagtgaatcccctgaggatgtcctgggagaacaagcattaccagcaaactccaggtgtcagctagagccttacttccctggcctaagttgggggctcagctgagcctcagcaaccccaacctgcctcctagaacatttcttctactaggtcaggggtttgcagaaatgtcctgatcctgttctcagccagaggggtgtgtttgtgaccacagtctgggcccaagttggcagccaacaagtgtctgtccgctgcttcgagaggcccgttgtgtgtgcagacctcaagccagggccagcctgggcccttgaaggccaggcctgggggaagagggagggacagcctcaaggaaaacacccttccctcctcccattccagtgtggctggcaggactgtgacaacagtgagcctgtcatgcattaaaaataatgctggctgggcgcggtgactcatgcctgtaatcctagcactttgggaggctgaggcaggcagatcaactgaggtcaggggttcgagactagcctgggcaacatggtgaaaccccgtctctactaataatatacaaaaattagctgagcatggtgacacgcgcctgtaatcccagctactcgggaggctgaggtaggagaattgcttgaacccaggaggcagaggtttcagtgagccaagatcgaaccattgtactccagcctggggcaacaagagcaaaactccatctcaaaaaaaaaagaaaaaagaaaaacccgacaaaaaacaaaaaataatactaaggccaggcaaggtggctcacgcctgtaatcccagcactttgggaggctgaggtgggtggaccacctgaggtcaggagttcgagaccagcctggccaaaatggtgaaactccatctctacgaaaaatataaaaattagctgggcgtggtggcaggcacctgtaatcccagctactcaggaggctgagacaggagaatcacttgaacccaggaggtggatgtcgcagtgagccaagattgcaccactgcattccagcttgggtgacagagtgagtctctatctcaaaaaaaaaaaattaataaagtgaattttagtgctttatataaagtaaggaaggtatagccctcatagagatcaggcttttatttatttatttaggatctcactctgttgcccagcctatagcacagaggtgtgattgcagctcactgcagcctcaactcctgggctcaagcgatcctcctatctcagcctctcaagtagctgggacgacggcatgtgctaccacacctgcctaattaaaaaaaattaatagaaacagggtctccctgtgttgtccaggctagtcttgaactcctgggctctagcagtcctcccaaagtgctggggttacaggcatgagccactgcgcctgatcctgttattgttttctttagtaaactggaagctgtttgagggcaggaaccacatgtagcttgtctctcagcccccaggtctggcactgagcccaacatacattagatcttggtgagtgtttggagactgatcagtggggtatatcttggaccctttctactttacctttcaccttttcaattgctgttgactttcctaaatgtttaagatgggacttgagaatcatgctgagcttgactgactcttgagcttttctgttctgagtcctcagaactctaaggccagctccctactggctcttcccaggaagatggccactgccaggtgtcctgcctttgatctggcttgatgcatcaccactgtcaaaagcgggatgtcattctggatgtagctaatttggggccaccctgtttcaacttagctgagtcatgctgtgccccagagatgctggagggacccctgtcccaggaagagggcatgaatggaactcctgttcagttctcccatggccgcaaagacctgttgttctgaccattgttctcaaggaaaagtttacttggctgtgcacacgcatagctttggaccatgtgactccccacaaacaaaacttggcttaatccagccctggcctgttccccggaccttgattaaaatgtcttgtgggcctctgtaggcaggttctggccctgacgagctgtgtgaccctggctgctgctggtggtggaggaaataatagtgataataatcaggatggtagcatctgctgcttattgagcatccacactgtgctcaacaccatgagcacctactgtgctaagtcccttccctatgcttgtttttttctttgagatggagtctcgctccattgcccaggctggagtacagtggcacgatctcggctcactgcaacctccacctccctggttcaagcgattctcctacttcagcctcccgagtagctgggactacaggcgcgtgccaccatgcctggctaattttttgtatttttagtagagatggggtttcaccatgttggccaggctggtctcgaactcctgacctcaggtgatccacccgcctcggcctcccaaagtgctgggattacaggtgtgagccaccgtgcccggcccttccctatgttatttaattgaatcctcaatgtcatccctgtgaattaggtacattgttcattgtatagatgagaacactgaagctcagagaggtgacattacttgcccaaggtcacagtatggcagagatggaatatgagctcaagtctttcagatgccaaaactcatatatatatattttaatcaaaaacaaaaattttgtaagagacagggtctcactctgtcatgcaggctggaatgcagttgcatgatcacggctcactgtagcctcgacttcctgggctcaagtgatcctcccaccacagcctctccagtagctgggactacaggcatgtgccaccatacccagctattattgttttgattttttgtagagacagggtctcactatattgtccaggctggtctcaaactcctggactcaagtgattctcctgcctcagcctcctgacgtgctgggattacaggtgtgagccagtgtgcctggctgaaaacccataatctttttttttttttgagacggagtctcgctctgttgcccaggctggagtacagtggcacgatctcggctcactgcaatctgcgcctccccagttcaagtgattcttctgcctcagtctctaaagtagctgggattacaggcatgtgccaccacacctggctaatttttgtatttttagtagagatgagatctcaccatgttagccaggctggtctcgaattcctgacctcatgtgatccgccctcctctgccttccaaagtgctgggatttacaggtgtgagccactgcgcccggcgaaaactcattttcttaaatacttatctgcactacaggttatgtcacttctctgagactcagtttactcacccattaaataaagatactatggctgggtgcggtggctcccacctgttatcccagcactttgggaggctgaggcgggtggatcacctgaggtcaggagttcaagactagcctggtaaacatggtgaaaccccgtctctactaaaaatacaaaatttagcgcgtgcctgtagtcccagctactcaggaggctgaggcaggagaattgcttgagcccaggaggtggaggttgcagtgagctgagatcacgccacggcactccagcctgggcgacagagtgagactccgtctcaaaaaaaaaaaaaaaaaaagaaaaaagtaataaaaatgaacataaataaggatattaattcatctcatcaaattggtgaaataaggtgaaggtgtgttcgagagagttgagcttggccccaatatatagtaggcgctcaataagtactgctttctcccatcactaagattctagaaccctgaatctaggcttccgagttgatacgagcattatctctgaactatggcttgtatggcttggtatgtggtggtatatttttgaaaaataaactagattttttagaaaatttaaaaagtaatacatactcattcaaaaatatccagcttagcctgagcaacatagcgaaaccctgtctctccaaaaaaaagttacaaaaattagccaggcatggtggcacattcctgtagtcccagctacttgggatgctgaggctgaaggatcatttgagcctgggatgtggaggatggagtgagctgagattgtgccattgcactccaacttgggtgacagagtgagaccctgtctcgaaaaaaaaataagtggctcatgcctataattccagcactttcagaggctgaggtgggaggattccttgagaccaggagttcgagactagcctaggcaacatggcaaggcctcgtctctacaatttttttgtttttgtttttgtttttttgagatggagtttctctcttgttggccaggctggagtgcaatggcatgatctcggctcactgcaacctctgcctcctgggttcaagcgattctcgtgcctcagcctcccgagtagctaggattacaggcgcgcaccaacacatctggctaatttttgtatttttagtagagatggggtttcgccactcctggcctcaggtgatccacctgcctcggactcccaaagtgctaggattacaggcatgagccactatgcctgacccaattttttttttttttttttttttttttttttttaggtggagtcttactgtgttacccaggctggagtgcagtggactatcttggctcaatcaaacctccacctcctgggttcaagcaattctcctacctcaccttctcaagtagctgggatcacaggcatgtgccaccatgcctggctaatttctgtatatagtataggtggggtttcaccatgttggccaagtctcaaactcctgacctcaagtgatctgcctaaggcctcccaaagtcctgggattacaggcataagccaccgtgcctggcctacaaaaaatttttgttttttttgagaccgagtcttgctttgttgcccaggttgcagtgcagtggtacgatcttggctcactgcaacctttgcctctcaggttcaagcagttttcctgcctcagcctcccaagtagctgggattataggcgcctgccaccacacctggctaatttttgtatttttagtagggatggggtttcaccatcttggtcaggctggttttgaactcctgacctcaagcaatccacctgcctcggcctcccagactgctggaattacaggcgtgagccactgtgcctggccaaaaaattttttaaaaattagctgggcatagtgttgtgcacctgtaatcccagctactcaggaggctgggtaggaggattgcttgagcccaggagttcaaggctgtacccaaactatgattatgccactgtactctaatctgggcaacaaagcaagacactgtctcttaaaaaaaaaaaattaccaacgagagtgtaaagggatcatcttatagagataaccagtgttgatactttcacacattttcttccagtaagtttccatatttgcttttatcacgtaataagttgagaacatgtaagtctcattcttttttatctttttaatattttttattttataatttttttgagacagtgtctcactctgttgcccaggttggagtgcagtggcataatcattgctcactgcagcctcgacctcctggattcaagcgatcctcccatctcagcctcctgaatagctgggactacaggtgcacaccaccacacccagctaaatttttgtgctttttgtggagatgggatttcgccatgttgcccaggctggtcttgaactactgagctcaggtgatctgcccaccatcggcctcccaaagtgctgggattacacgtgtgagccactgtgcccggcccctcattctttttaatggttatgtggtgtcccattattgggctggaggactacacatctgtagtcctatttactcctgaagctgaggttggaggattgtttgaggccaggaattcgaggccggagtgcactatgatgcacctgtgaacagccactgcactccagcttggacaacatagcaagaccccatgtctacaaattaaaaaaaaaaatcccatggatttgtttattcatgtaacatatatttactgagcccctgctctgtgccaggactagatgcaggcaccaaggatatagctatgaacaagactgagtagtgagtgtctgccagtcagggagttcacatcttgtttttagcagcccctattcatgaatattcaagttgtccctagcctcttgcaggatggacaatagcgctataagccttctgtgcacctgtgagcactcatctgaagggtggttcctggaagggttgctgttaggtcaaaagggtcacatgcttttgggattttgtataggttgtaacccctgtactactcaagggtgtggtaaggtgagattttatcccccaaagtgtggcaacccctgggctctgctggtcatccctgttatagggcctgccagagtctggggactatttatagttcagccttgctagaccagcaagaccttaaaggtcatcccttccagggcctgttggaatcccaagtcctcttcacaccatcctgggtggatgggtgggcagctggaacttgaatcctcaagttcaagttgagggttgacatatcagtgcccattatataggcaaagaaactgaggctcagagagaccttgcctcatgcaagtgatattacggggcctggattcaaatccttgtctgcctgtcaccacattacatgcctatccccttatactgtcacactaggaacagcagcagaaatcataaccacactgctatctccagacagccctgttctatgccaggcaggagaaggtgctttacaggtattgaatctttcacttatttatttatttttaaattggcttttttttttttttttttgagacagggtttctctctgtcacccaggctagagtacagtggcacaatcacagctcactttagcctcaacctcctgggctcaagtgatcctcccacctcagcctcctgagtagctgggattataggtgtgcaccaccacacctggctaattttgtgtatttttggtagagacggagttttgccatgttggccaggctgctcttaaactcctgggctcaagcgatcgtcctgccttgaactcccaaagtgctcacaggtgtgagccactgagcccagacaaatctttttttttgtttttgtttgtttgtttgagatgtctgtcacccaggctggagtgcaatgtcacgatcttggctcactgcaacctctgcctcccgggttcaagtgattctcctgcctcagcctcccaagtagttgggattacaggtgtctgccaccatgcctgactaatttttgtatttttaggagagacgaggtttcatcatgttggccaggctggtctcgaactcctgacctcaagtgatccgcccgcctcggccacccaaagtgctgggattacaggcatgagccactgtgcccaacctgcagctgaatcttttttttttttttttggagaaggagtctcgctctgtcaccctggctggagtgcagtggggcgatcctggctcactgcaacctctgcctcctgagttcaagcgattctcctgcctcagcctcccaagtagctgggattacaggcgtgtgccaccacacctggctaatttttttgtatttttagtagagacagggtttcaccatgttggccaggctggtcttgaactcctgccctcaggtgatctgcccacctcagcctcccaaactgctgggattacaggcgtgagtcactgcgcctggcccagctgaatcttttaataccctttaaagtagatatattttacttctatttttacttttatttttttttaatgttttattgattgattgattgagacggagtcttgctctgtcacgcaggctggagtgccatggtacgatcttggctcactgcaacctctgtctccctgattcaagcgattctcctgtctcagcctcccaagtagctgggattataggcatgtaccaccatgcctggctaatttttttttgtatttttagtggagatagggtttcaccatgttggccaggctggtctcgaacttctgacctcagttgatctgcccgcctcgacctcgcgaagcactgggattacaggcgggagccagtgtgcccggcccttccatttttaaaataaggaaacagaggctcgcagaggtcaagtcacttgttcaaggtcacagagcaaggacgttattacaagcctgcctcactccagggcccactttctttctttcctttttgttttagacaggttctcactgtgtggcccaggctggagtgctgtggcacaatcatggctcactgcaacctctgccttccaggctcaagtaattctcccatctcagcctccctagtaggtaggactatagctgcacactaccacacctggctaattttttgtatatttagtagagatggggtttcgctatgttgcccaagctggtcttgaactcctgggctcaaaagattccccctgcctcggcctcccacagtgctggaattataggtgtgagccaccatgcccggccccagacccactttcaatgtttttgctccacactgagaagccccagggctttcagtgtttattcatctaacacatttttttcttttatttacttacgtacttatttatagatacagggtcttgttctgtcacccaggccggagtgtagttgcatgatcatagcagccttgacctccctggctcaagtgatcctcccatctcagcctcctgagtagctggggctacaggtgtgctctaccatgcccggctaattttttttttttgagatggagtctcgctctgtcacctagggtggagtgcagtggcgtgatctcggctcactgcaacctctgcttcctgggttcaagcgattctcctgcctcagcctcccgagtggctgggactacaggcgtgtgccaccacttctggctaatttgttgtagttttagtagagacggggtttcaccgtgttagtcaggatggtcttaatctcttgaccttgtgatctgcccgcgtcggccccccaaagtgctgggattacaggcacgagccactgtgcccggcctagtttttaaaaattttttgtaggccaggcacggtggctcaaacctgtaatcccagcacattggaggttgagatgggtgggttgcttgagcccaggaatttgagactaacctgggcaacaagacaaaaccccatctctacaaaaaataaaaaaattagccaggcataataacatgagcctctgatcccagctactcggaaggctgaggtgggaggatcgcttaagcctaggaggtcaagactgcagtgagctgtgatcataccaccgcactccagcctgggtgagagtgagtccctgtctcaaaatttttttttttttaattttttcaagacagggtctccctatgtcacccaggctggtttcaaactcctgggctcaagcaatcctcccacctaaggcttccaaagtcctgggattacaggtgtgagccactgtgcctggcccagatttcttttactgcttacttggtatatgtcaagtactattttctttttttttctttctttctttttttttttttgagatggcgtttcactcttgttgcccaggctggagtgcaatggtacaatcttggctcactgcaacctctgcctcccacgttcaagccactctcctgcctcagcctcccaagtagttgggattacaggcatgcgcaaccacatccagctaattttgtatttttagtagagacagggtttcaccatgttggtcaggctggtctccaactcccgacctcaggtgatccactcgcctcggcctcccaaagtgttgggaatacaggtgtgagccaccgcgcccggccgtcaggtactattcttgatggtgaggataccctagtgaactggaaaacagggcagcccctgctctccgggaactgacattctggttaggggagaaaggccatgggctagtaaacaaatggctctatcatctaatttcaagcagcggtaagtaaatgaccacccactgaacagacaaggaacagcttgagcttagaggacaggcttcccttcagccaggacattcagtcacagacatttattaagcactgggataagtactggagatcctgttgcccaaacagatgtgttcccttctctcagcaacgcatatgtgacccccagtccacttatactgggcctgatgagtgatcctgccctgtttctcttccatgtgtttccagtggaatctattcctggctctttggggccagagccagatcctggcttccctccttggcagagctggagctccctggaaattggggcctctgtttataggtgcctcagcttccctgaggaggaagggcccatgtgtcactgcttatcaggctcccaggccaggggcttggctggggagggtgggggcactggccgggcctatctttggagtctcgagaatgctggccacagggctgtggtcgtgccctcagctctctaggccataggctttggcagccccaccctgccttgtcgggtgactcaggcagaaatcagagaggggaggaggcctcagagttgggctatttatggccacactccggggcccccaggaccccacccccactctgggacaggccacttggtttgtgaaatgcaagccctgattctggcatcagctggtatgctgtccatttatagcatgttcctgtgggaaaggagggggacccagatctgggatggctgggcgagcaggggatctggcagtttctctggcttcaaagttgacaaatgttcatttgctgagcatgtagcgtatgagatctctgctggattctggggacacagagaagagtcagaccaggtccctgccctcaaagtgctctcagcctagttggggacacagaccctacacagacaatcacaggggagtgaggcgtaggggactgcggaggtgatgggtgtgatggatccagactgagcatctgatcacctcttctgaggtgacctctgagctgggcctgtctcctgggctatggcacctcttccctcctgctaaatgagcctgtcctgccctggcattcatttttccattcacagaacactgattctgggttggttggtttgtttgaaatgggtcttgctctgttatccaggctgactatagcctcaaccttctgggctcaagcaagcctcccaccttagcctcccatctcaccctcccaagtacctaggactacagatgcacaccaccatgcccagctagttttttgtatttttggtagagacagggttttgccatgttgcccaggctgctctcaaactcctaggctcaagcgatctgcctgcctcagcctccccaagtgctgggactacaggcgtgagctactgcccagccaactctgggtttgaagagcaagcccagtttctttctttttcttttctttttttttttttgagacagagtcttgctctgtcgcccaggctggagtgcaatggcacgatctcagctcactgcaacttccacctcctgggttcaagcgattctcctgcctcagcctcctgagtagctgggactataggtgcacgccaccatgcccggctaatttttgtaattttagtagagacgaggtttcaccacgttggccaagatggtctcgatctcctgacctcgtgatccacccgcctcggcctcccaagtgctgggattacaggcgtgaggcactgtgcccggcaatttcttttaggagttcccagttttgtggaggagacaaccctaacacacagaatcggagacctaggaagtatgggcaagaaaggctgataagtgagaaacacctgcttcttgagtccttaatactcaccacatgccttacaacattttatttaatcctgacatctctctgaggcagacttttttttttttttttttttttttggagacagggtcttgctctgtcgcccaggctggagtgcagtggcataatcttggcttactgcaacctctgcctcctgggctcaagcaatcctcccacctcagcctcccgagtagctgggactacaggcgcacactaccatgcctggctaatgttttgtgtttttggtagagacaaggttttgctatgttgcccaacctggtcttgaactcctgggctcaagcagtctgcctgcctcgggctcccaaagtgctgggattacaggcgtgagccaccatgtctggctgtagttattaatcttttatttttattattttattattttttatttttattattatttttttgagacggagtttcactcttgttgcccaggctggagtgcaatggcacaatcttggctcactgcagcctttgcctcctgtgttcaagcaattctcctgcctcagcctcctgagtagctgggattacaggtgtgcactaccatggcctggctaatttttgtatttttagtagagacagggtttcgccatgttggccaggtggtcttgaactcccagcctcaggtgatcctcccgcctcagcctcccaaagtgctgggattacaggcgtgagccactgtgcccagccctattcatcttttactgactagcagattgaggcccagagaggtaaatgaccttgtccatggttacacagttagacagtgctggagctggaattcaaatccaagagcatctgactccagagggaattgcattttctttctttctcttttttttttttttgagacagggtatcactctgttaccagactggagtgcaatggcgtaatcatggcttgctgcagcctctgcttgctgggttcaagcgatcctcctgcctcagcctcttgattagctggaatcacaggcatgtgtcaccacacctggctaatttttttttaaattttactttctttttcttttttttttttgagacggggtcttgctctgtccctcaggctggagtgcagtggcgcaatcttggctcactggaacctccgcctcccgggttcaagcaattctcctgcctcagcctcccaagtagctgggattacaggtgcccacgaccacgcccagctaatttttttctgtatttttagtaaagacagggtttcaccatgttggccaggctcgtctcaaactcctgagctcaagcgatccacccactgtggcctaccaaagtgctgggattacagacatgagccaccgcacaaggccgggaactgcattttcaatagtgtggaagtttggaagctcatacagcctctgagtagttagtgtgattggaccagagggtgagattagggatatggcaagaagtgaagccagggaggaagacaggacctgtgggcagggcccatgtcctagagggcattgaagttaggcaaagggtgcaggggaggcagagcagggctttgagcaggacgtggccacttgtagcaaggagatgtagcagttgcaccattgggggctgtatttgtcaggatgcttttgactgcaagtaacaggaatccaattcaatgaggtttaaacatcaaagaaaatgtgttatcctcccgaacatcttgagacagcatggctccagggaagattaatttaggggctcatggtatcatcgaaaactcaggtctctccatctttctgcttcaccatcctcaatgtgtggatcccaaactttgtggtcaaaaagtaggctgggcacagtggttcatgcctgtaatcccagcacttttggaggctgaggccggcggagcacctgaggtcaggaattcaagatcagcctggccaacatggcgaaaccccatctctactaaaaatacaaaaattagctgggtgtggtggtacgcacctgtaatcccagctacttgggaggctgaggcaggagattcgcttgaacccgggaggcagaggttgcagtgagccaatactgcaccattgcactccagcctgggcgacagagtgagactctgtcacaaaaaaaagaaagaaaaaaaaagtggctgtcgttgcactaggaacaagctccctcccagcaactttgaaaggctaaaggaggagaaaaggaaggcagtgtttttttcctcacatctcattggccagaactgtatcatttgcccctttctaaaccaatcacaagcaaaaaggatggaatgatcatgatttgatttgaccaatcaagattctccctctaagctggggagaagctgagcctctagggctcagggttctcttagcaaaggaaaaagaggggagatggtttttggctgtcaagtaggctgtgatatgtcccacttctgctgccctttgagacataatccaatagtcagtcctggggtaagtcgttgctacagtgatgataagtcatttgagtcctagtccccaaaagtcagacccaggcttgcttctcccaaaaaaacctgaccctggtttctttcaacattgcttctatcccaaccccaatagggtttgtaactccctcttatttgcctccatttgctttgaatcctatctgagcctcagaggcatctcctgcgacagaaatagcttcttatctggttcttccagggaggtgggccaagaattacttcctaactccttcctgggctgtccactcacagggcacgttggctgggctttgactgcagacgtcagatagctagcaagccagatggccctgggagcaggtgtggttgagagcagaggaagagaggctgcccacgggctagcaggcatcaggcacccacagagggtatatccttgttgggagaagagagacaaggtcttgggaaagtcatcatttttttttttttgaggcagtcgcacttcatcgtccaggctggagtgcgcaatcttggctcattgcaacctttgcttcccatgttcaagtgattctcatgcctcagcctctcgagtagctgggattacaggcatgcaccaccctgcccagctaacctttgtattattagtagagacagggtttcaccttgttggccagggtggtcttgaactcctgacatcaagtgatccacactgccttggcctcccaaagtgctggaattacaggcatgagccaccatgcccagcctgggagtcttttttttttttttttttttttttttttttgagacagagtcttgttatgtcacccaggctggagtacagtggcacaatcttggctcactgcaacctcctcctcccgggttcaagtgattctcctgcctcagcctccccagtagctgggattacaggtgcgagccaccacgcccggctagcttttgtattttcagtagagacggggtttcaccatgttggtcaggctggtttcaaacttttgacctcaaatgatctgcccgccttggcctcccaaagtgctaggattacaggcatgagccaacatgcccagcctgggaaagtcttgtaaccaccttcttgtatacactgtctaggagttcaagaccagcaacatggcgtgaccccatctctacaaaaaattaatagctgggtgtggtagtgcgtacctgtagacccagctacttggggagctgaggtgggaggattgattgatctgggagattgaggctgtagcgagctgtgatcacaccatggcactctagtctgggtgacagagagaaactgtctcaaaaaaaaaaaaaaaaaagtcacatggccacacctcactgcaaaggaggctgggaaatagagtctttcttccaggtggctgtatgtctattaaccatggggaaaatgagagaagggatataggcgggccctatctctatatagggatagagagaagggatacagtattttctgctccactgccctgtcagagactttaacttagaagaatttgttaatatcactactggactcttgcttactaagggtctaatagtgacacgtaaattaaactcttaataaattagtgacaattgtgatatgtgctgggagcccatgtcacagtggtgactgctgatgtctctcccaatcagtcaagtatatgaaggacgtctcaccgtatttcaagaactctactggtgggacctcggtcggctgggactcacctcctgcctcaccccttcagcggcagccttcctcccctggccccacaccccggaacttcagcgaggccaaacacatgtccttgaagatggcatatgtctcgaagaggtgcacccccaatgacccggagcccaggtaaggctggggttgggagcaactcagatggacagatgccctggcgtcaggtggtgggaccaatggaaagacacctctgtgttgtacgaatgaccagcacaatgccaggacatagtaggtgcttaaaaaatagattgactggaagcctgagtgaagccatggagatgatggtgtgctttgcttctcacttcttcctctgggcagctcacatctggggatgaacttggtctgaggaagaaccctgcgttccagtcctggtcctctttgaactaggcccttttcctcactgacctttagattctccattgtgagatgaggttgttggactcactgatcctctcgtctcttcccactctgctggagctctgagatgtctggtaacctttttatcagggccatggaaggttacatccttcacatctgagcagcctttaacagttcattgataatactgaaaccacctaacatttactgagtgtttactgtgtacccagcactgtgttgagtgctttccctgtgcaatattatttagctctcacagaggcccaatgggcaaagtcctattatttcacctccattttattttattttattattatttttgagccagagttttgctctgtcgcccaggctggagtgcagtggtgcaaagatcttggctcactgcaatttctgcctcctgggttcaagtgattctcctgccttagcctcctaagtagctgggactacaggcgcccaccaccacacctggctaacttttttttttttttttttttttttgacagagtctcactctgttgcccaggttggagtgcaatggcatgatcttggctcactgaaacctctgccttccaggttcaagcaattctcctccctcagcctcccaagtagctgggattacgggcgcctgccaccatgcctggctaattatttgtatttttagtagagacgggattctccatgttggtcaggctggtcacgaactcctgacctcaggtgattcccccgcctcagcctcccaaagtgctgggattataggtgtaagcaactgtgccctgcctaacttttgtattttttgtagagatggggttccaccatgttggccacgctggtttcgcactgctgacctcaggtgatctgcctgcctcggcctcccaaagtgctgggattacaggcatgagccatcgttcccggctcacctccattttatagatgaggacagagaggggaagtaacctacttgagatcacacaaccagaaagggtggcacttgcctcaatcctggtagtcctttctgctttggaaggtgcaagatacctgagtgatggtggtggctaaatggagcatatttggtcaagtgggatatgcattgttggaggtgatgcttaactgctatatgcattacaagcttgggctgtgggtcctagtgacagcctaggttcaatgccaagcaaatgcccaacattggctgggagggctggttaacgtccagcatccaaatctcttggtctcactcgatgccacacctcttgcctgcccccatgaggcaaaaactggtgattcacaggtcacttgccgatgctctaaaaaagagcctttgtttttgtttttgagacggagtatcgctctgttgcccaggctggagtgcagtggtgtaatcttggctcactgcggtccccttctcccgggttcaagcgattctcctgcctcagacttctgagtagctgggattacaggcacctgccaacatgcccagctaattttgtatttttattagagatggggtttcaccatgttggtcaggctggtttggaactcctgacctcaggtgatccgcccaccttggcctcctgaagtgctaggattacaggcatgagccatcgcctgtatttttaatagactaatttttgtattttttttttttttgggacagagtcttctctgttgccaggctggatggagtgcagtggtacaatctcagctcactgcaacctccgcctcctaggttcaggcaattctcctgcctcagcctcctgagtagctgggactacaggtgcacgccgccatgcctgactaattttttttttttttgtattttagcagagacgggggttcaccatgttgcccaggctggtcttgaactcttgagctcaggcattctgcctgcctcggcctcccaaagtgctaggattacaggcatgagccaccgcgcccggctgtatttttactagagacagggtttcaccacattggccaggctgatctcaaactcctgacctcaagatccacccaccttgggctcccaaagtgctgggattacaggggtgagccaccatgcccggcccggaagggccttctgtgagtgtgaaggtgaagtagtattagtccttctagagactcatagaaccttagattcccagcctgatcccagacattacctgaaacgtgtgtatatgtttctaagtgtgcgcacgtgtagatgacatgtaaatgcaagtgcttgtatgtatatatgagagcatttgcatgtatgagtatagatttgtacatgtgtgtttgtttatatgttatttgtatgtgtatgcacatatgtgtgtgcatgtgtgttttaacatgtacatgcctgagtacctacataggtaacctcaatataactggggttccatatggcccactgtcagtgcagtatcccagtcatagggatacagcctggcaaccaaaatataatgaaaactgcttcaaacttttactcagtgttaggattgcactgggctgcaagtacagaaactccaacaagcaatgacttaaataaaaggggttaattttcccacatgtttaaaaagaagtccaggggtcagctattcaggctgctgtagatgctcaaggatgccatcaaggaactaggcttctagcttcctgctctaccattttaattatgggcggttttcttcttcgtggaggcaggatggtggctgcatcccaagaattgtgttcatattccaggcagaaataagacaaaagccaaagagtcttttctgctagtattttggctatctgttgctgtatcacaaaccaaccctaaaatttagtggtttagaaaacaataatttattatttctttttgagatgggggatctcgctctgtcacccaggctggagtgcagtggtgtgatctcagctcactgcaacctctgcttcccaggttcaagtgattctggtgcctcagcctcccaagtagctgggaccacaggtgcccgccatgacgtctggctaattttttgtgtttttagaggagatggggttttgccctgttggctaggttggttttgaactcctggcctcaagtgatctgcccggctcagcttcccaaagtgctgggattacaggtgtgagccaccatgcctggcctcaagcctctttagttttgttgttgttttgtttttctgtttttttttttttttttttttttttttggtttttgagacggagtttcgcttttgttgcccaggctggagtgcaatggcacgatctcagctcactacaacctccactttctgggttcaagcgattctcctgcctcagcctccctagtagctgggattacaggcatgtgccaccacacccagctaattttgtatttttagtagagatggggtttctccatgttgatcaggctggtcttgaactccctacctcaggtgatccacccgctttggcttcccaaagtgctgggattacaggcgtgagccatcacaccctgtctgtttttctgtttttttaagatgaggtcttgtgctgtcatctaggctggagtgcactggcacccttatagcttactgcagcctcaaactcctgggctcaagtggttctcctgcctcagcctctaagtagctgggactataggcacgtgtcaccatgcctggctaattaaaaaaaaaatttttttttcttttttagagatgagtgtctcactttgttgtccaggctggtctcgaactcctgggctcaagccatcgtcctggctcagtctcccgaagttctgggattacaggcgtgagccaccatgtccagcttagttttttttttttttttcccctgctcttattagtgaattagtttggttctgtgcaacaaggagaacctgggagctggcccagaagaggatgttccttagaaaccaggagaaaggggcaagattaggaatagccacacagcaataatttaggccctattacaccatcatgcatgtttcagtgtgtgtgtatatttgtgtgtatctgcatacgtgtaggctgggcacggtggctcatgcctgtaatcccagcactttggagggcgaaggcggggtgatcatttgaggtcaggagttcgagaccagcctggccaacttggtgaaaccccatctctactaaaaataaaaaaataaggccaggcatggtggctcatgcctgtaatcccagcactttgggaggctgaggcaggcggatcacggggtcaggagatcgagaccatcctggccaacatggtgaaaccccatctctattaaaaatacaaaaattatatgggtgtggtggcgtgtgcctgtaatcccagctacttgggaggctgaggcaggagaatcacttgaacctgggaggcagaggttgggccattgcagtgcagcctgggtgacagagcgaggctctgtttcaaaaacaacaacaaaaaccccacaaaatatatgaacacgtgtgtatatgtcacactcgcttgttcctatgccccatgaagccccagcaactgtggctggagcccagcagtgagggttgctcctgattctctcacggacatccccctggtttctcctggtttggtggtgggtggggtttcttgggccagggttgggcagctgcagcctaatggtcaggtccttgtctccacccatttgtgcctgcaggtatctggagatctgctcggcagatggtcaagacaccctcttcctgagggccaaggatgaggctagtgcgaggtcgtgggcgactgccatccaagcccaggtcaatactctgacgccgcgggtcaaggatgagctgcaggcactgttggcagccaccagcacagctgggagccaggacatcaagcagattggctggctaactgagcaggtacctgctgggcctgggacctatccctctctctcttccgctcctttggagctggccctgttcccagtgcccctggccacctcaccctgccctggccctctgccctctcttcccccacccatcctcactgctgttttgttctctgcagctgcccagtgggggcacagcccccaccctggccctgctaactgaaaaggaactgctcctctacttgtctctccccgagacccgcgaggccctgagccggccagcccgtactgccccactcatcgccaccaggtacccacaggcaggggcagtatgtctcccccagaacttgccaggagatgctccagcagggccccagaagctgggaactccagccctgtccaccctcagctattccccaggtgacctgaagcaagtctctgccctgtctgggcctcagtttcctcatctgtaaaatgggtgcttggaacaaaaggatataaggtccccattagccactcattcgctgacacttatgccttgtgctgcatggttcagagggcacagagctgaccccaacagtttctgcctccagagagaaccttgtctggctggggagacagacccaggaacagccattacagtgcagggtttgtaggagccacttaactctgttggggtagtagaggaaggcttcagggaggaggtgacatttgagctggactttgatggatgagtagaagttttctgtttaagaaagggtgaaagagcatcccatgcagagagaacatcatggtcaaaagtacagaggcatgaagggctatagcatgttcatggagctatgagtttgtgataaccagaattcatgcaggaaatggagagaagggagttggcagggcctgatcttgaagagcttctattgcctgattaaggaatgttagctttagcttaagagtttggtagtgttgaagggtttaagctggggagcgaggtgctctggttgctttaagagaatccctgtggctgccacgtggagaatgcagcggagagtgcaggatggaagtggggaggtgctgcagtcatgcaggagagatgatggtggctgggggaggtggaggtgggtggcaggagcagatggggaagaaaggcagcattggcattggaaaccacatgggtgtaaaattaacagggctccgtgcttgccagatggggcgggtgaaggaggggtccggaatgaacaggaggtttggagcttgtgtctgggtgagcgtgggactgggggtgggggtggaaagggaggaggctggagcaagatgctgagttaagtccagagtgtgtgtgggatggagagggagcttggataggaagcctggggactcgagggtctgcagctcagggctggaaagtcgaaggcgggtgtcagcagcagtctgtggcggggggaactgagctataggagaaagagtgggtggagggaggaacaaagagggatatggggcagaactttctgccccagagaggggcagttggcttaccaaggccacacagcaagtgagagtcaagctgcaggggtctgaagtccttgtcccccatgtctccttacctcaggctggctctggcccgtgtgtcaggagcctgctggctactagggataactaggtcctggactgtctgcctaatcaagtgattcaagttaggcaacaaaagtttactgagcacctactgtgggcaggcatggttttagttactgggaatacagtggtgaacacaagatcaaaatttctaacctagttgacattctagtgaaaaagacagtcaaaaaccaacgaaaacaaataataaaaagtataatttctggtaccatgattaaaaagtaaggctagtgagtgacaagggtgctattttggactgggaggtcagggaaggcttctcagaggaggtgacatttaaactaacatctgaaggaagtgagggagtgagccgtgcagataatcagggaagcatgtataggcagagggaagagcatatgcaaaggtgctgaggcaggcatgtgctaggtgtgtgtgatgacaccagtatagccagagccaagggagtgacggggagggtggcaggagatgtctcctgctgagtcaatcagtgccccctggcaagtcctgtcctgttaggtggtaaaggatttacagggtttcttcccaggtcactggcccctttgcccagaactatttgcctccggcctgaggcctcatgctcagccctctgcccccaacccccagactggtgcactcaggcccctccaagggctcagtgccctacgatgcagagctctcttttgccctgcgcacgggcacgcgtcacggtgtggacactcacctgttcagcgtggagtcaccgcaggagctggctgcctggacccgccagcttgtggatggctgtcaccgggccgccgagggtgtgcaggaggtgtctacaggtgtgctgggaggatctgggagtgtccctctggtaataagcctcttatccccaggggcattcaagcttccttctttagggcacttcaggaggggatagaaaatggggtttggaggtcaaggtgggtggatcacctgaggtcagaagtttgagaccagtctggcaaacatggcaaaaccctgtctctactaataatacaaaaattggccaggtgcggtggctcacgcctgtaatcgcagcactttgggaggctgaggcgggtggatcacttgaggtcagcagtttgagaccagcctggccaaaatggtgaaaccctgtctctactaaaaatacaaaaattagccgggcatggtggtgggcgcctgtagtcctagctactcgggaggctgaggcagaattgtttgaatctgggaggtggaggttgtagtgggcccagattgtgccactgcactccagcctgggcgacagagcaagactgtctcaaaaaaaaaaaataataatacaaaaattagccgggcatggtactaggtgcctgtagtcccagctacgcaggaagctgaggcacgagaatcacttgaacccgggagatggaggttgtggtgagccgagattgcgcccactgcactccagcctgggtaacagagtgagactgtttctccaaaaaaaaaaggaagttgggtttgggccctctgttttggatgtgcaggtgccctagcaggcagagactcttctccctggggttttcttgccccagttttgtcaatctgctggtgaggatgtgagagatggcacttggggtagggttgccagaggaaataaatacaggacacccagcctcatttgaatttcaggttaacaatgaatacttttttcacagaagtatgcccaaattagtcattgtttatctgaaatttaaatttagccgggtaactctgcaggtctccaagggcggtgcttggtagatctgatgatgcctttatcagcagtgagcctcctgtccatggcacattttaagctccccctttctacttgtgctgctggaagtgggactggaagtgggtgtaggtcctctgagggtgggggtgatgactctctgcagggtgggtgtactggtgccacgacaaacagtgagcctcccatccctggaggcattcaggccccactttgtaagctgcggtgggggttggaggttggggtgtagtctctgaggtgccagctgtgcctgtacctatgtgccctccctgcagcctgcacgtggaatgggcgtccctgcagcctgtctgtgcacatcgacaagggcttcacactgtgggcggctgagccaggtgcagcccgagctgtgctcctgcgacagcccttcgagaagctgcagatgtcttcagatgacggtgccagtctccttttcctggattttggaggtgctgaaggcgagatcgtgagtgaggggctgcctctgcaccctggggaggagggggtgtgcactctcggaggccaggctggccagggccctgactcttctctccatccaccctccagcagctggacctgcactcgtgtcccaaaaccatagtcttcatcatccactccttcctgtcggccaaagtcacccgcctcgggctgttggcctagaagtcgccggatgcactagccctgaagaggggtgtccatgacatggcctgagctgggcctccaccgactgcctgctcacccctgggctgagggaagggagaggagaggaacaagggcctccgaaaccccaaccctgagggagactggattggtcttggggcccaggacccagacgcaggacagagtggactctgcctgtgatggggtggccttcctgctgcccccctccaccagtgccttttgcagagagatattttgtgtacacagaagccattccgagtctgggacctgcccctgtgcggatcctgaccccagccaacagctgagctgccgggcctcctcgaggcccctaagccacccccagaggtcccatctgaagctggagtaccctggggtcagcagcaagagaaagaagaggagattttctgtttgtttttcccctcagccctgccaccgtggggagtctggtttttctcttcatcctgtctctctcctccttactcttggataaataaacagcctgtgagcacacaggcagcccggcccagtg

SEQ ID NO: 383 - DNA, 117321 bp, Homo sapiens
  source 1..117321: mol_type = genomic DNA; note = NC_000006.12:157981856-158099176 SYNJ2 [organism=Homo sapiens] [GeneID=8871] [chromosome=6]
gcaaagtgaaactctggcaagttgcgggcgcgcggggagctgtcgcgggcagcgcgccctcgggaggacgtggccccggcccccgcccgcagtgggcccgaccctcatggccctgagcaaagggctgcggctgctggggcgcctgggggccgagggggactgtagcgtgctgctggaggcgcgcggccgcgacgactgcctgctgttcgaggccggcacggtggccacgctgggtgagtccgggccgggggcagcgacgcccggaggagagggcgcccgcattcgcccagcctcgggaagacgggtacccccccttcccgaggggatcgggcggcgctgggactgccggggcgtaggggtcgcgcgcagaggggtggctgtttgaatgaagtggggctggggactcgagagagcactctggctgggccggtggcgcacggaggccggccgcccctccacggggatctccggcccgcgccgccagaggatatggttgctggatagccggctggggcgctttgcgtattcatgaggatcccggggtgttgacttagccggcctgaccctgtgcctggcgccttttcttttgcacctgttgatgaaaccagtgattgccctttggtttgtgttggcggctccactcctggaggggatggggacaaaagccccaaaacataggctctggagaaaccgctgatggcagctttgtcccacgtaaatacttggtcgagaagcatcggtgctgcaatttatagaacttgtaaacaaatataccatgacctttatgctgtcttagatcctgccaagccagcgaatttcacctatggacttcagaagccttgaaactggcattgtgctatgggctttagtacgtgatctcacttaattctcacaattctactaaaaagctattattatccccattttgcagatgagcaaactgaggcctaaagaggctaagttgcttgccaaggtgacaccatccacctgacttttatgtggctgtttctgtaatgtcattcaatgcgtggcttcctggtatcgctaacctgggtcccttgttttgtgctaaccattataaggaaaacctgggtagcaccaaagcacgtgaaaccaggtctgattgttagacttctaaatgtggacacccgagagtaagctcccaccactaggcgtccagctgtaacagcttgccggtattcctagctaaacaaggtgcagcccggggtcactcgtacttgaggtggtcggcaaatgcagcaggctgctttgtagatgcctctagccttcttttcacatttgtatgcatcgactcccgttcggatgtatgtcttggaaggactatctctcctatttctgattccctaatcatttcattaacatgcatttatccagcttgttctcagtcacttgattactgaaacaatgtctccagtagtctcagcatcaaaagtaggcagtgaattgtagattaagttattttcagattattctaatttgtgctgtcctgaagagtctaagtttggttatttggtgtggccttgaaagaaaaccacagaaatttccattccattttagatgtctacttcataccacatttatcggaagcgaaagagtaatttcatggtacaaaactactgtttcatcaaatagattaagatgtccttcagttggattacggcaacattaagccaagttcatacacattcaagaattctttgaagcagcttagaaaaaagagattttattttttcaaaagtgaagatttaaaaatgattaatgacagtaatgtagtgcatattttccattaggagctgaagtttgggctgagatttacatcacggtggtgattacagtataccagattttagaacagagaatgtaagaaaggaattggctcgtcttcaactcatgtgcagtccacatttgtcatttaacctagcattcatttttcagtagaaaactttaaaaaaaaattttttttttttttgaaacagaggcttcttctgttgcctaggctggcatgcagtggcacagtcacagcccactgcagcctcaacttcccaggctcaagcgatcctcctgcctcagcctcctgagtagctgggactataggcacatgccaccatgcctggctaattttttctctttcttttcttttctttaaatggggtcttactatgttgcccatgctgttctcgaactcctgggctcaggtgatctttccgccttggtctcccaaagcgttgggattacaggcatgaactacttactgcgtctggcctgaaaacttaattttttaaagtctgttttgtttaagtaaaatgaaactatttttaaaaagcagctgtagcatttggtggctttgctggtccagagaatgtttgtaggagagagccttatgttactagaaagttgtttaaaactttcaacatatcctaaatgcatcactattggataaaatggctctgaacttgaaattcccatctgtgttccaaagggctagctagctgttttactttcctttcttggagaaagtgattattttttttcttttttttgagatggagcttcactcttgttgcctgggctgagtgaagtggtgcgatctcggctgactgcaacaccgccacccccacctgggttcaagtgattctcctgcctcagcctccccagtagctaggattacaggcacacgccaccatgcctggctaatttttgtatttttagtagagacggggttgtgccattttggccaggctggtttctaactcctgaccttaggtgatccacctgctttggcctcccaaagtgctaggattacaggcgtgagccaccatgcctgacccgagaaggtgaatttttacaagaaggctgcaatctctacttttgtatgggacaggacacttgtggcagctggcgtagctggtggtctaatcttgacctttcaccctttccttgaagttccgagtcgggggtagcttccttttctcttcagctgtggttttcctgtgatgggtccctcccagttagtaatgagaggctgagagacaagttgtggtaactgcttcgtgggtagtggtctttcccggcccctgagtcattctaacttccatcctgctccgctgcggatgcacatagctgctttcctaggggcgagaggagatgaggggactgggcctgatgaccacaggcgctgccccttcatagcacattttattcctgaaggatcctaactggaaaagtacctctcgccgaaggggctgggtggttccttatcattttcaggcaaggcctggagacaggggcttgaactgggctgtgatttttaggaaaaacggatggtccatgattcgttgattgctggactccttccatctgaacctgtcttcacctgtcttcacctgtcctgctctaaagtgaactcttcacactagggccgtctggcctgctagcaggattgttgaaggaattattccaaattcctgcttctaaaagaattaggttgtgaatctgaatctgtcttttatgtagatcagtgggagcaaaaattccagaggcagaaaagccaaatgtattggcactgatttaaaaggcttttatgaagtctcgggaacctgactggagggtagttggccttctcagcacaggtgggaagccccgtagccggtaccagcatccctggccaacaatccacaattagcaaacagatgttcccttatttgcacatgggacaaaaacctactcctgtctctgtctcttgtaaacttagggaaaagtgcttattgttaatggattttgtgtattttcagagtaagcgacagtgttccaaagttcaaggttctccaacagcccccaggaacggtggcctgagggtgtccctgtgtttacagtgcgggctgtgtgtgagtgaagtcgtgcctcctgccgcccagccgggctttgctgtgaacaggcagcagggagggagggatggggcaggagacttgagagaattaattaagttaattaatgggtgtccctaaattactttgagcttctggggggaaaggttctgtgtaaacaccaggcccccaggttctcccagctgctgttgtgcgaggccacgtctcgagtttagctttgtttgaattggtgagatggccccagggcagagcaggactcagtctgaactgttgcctagatcactttctcaggcattatggccagatttatttggtcacggactggaattttgatctgctagagaggaccacagagaatcaaataagtcaccattttataaatgctcctggacaaagttgaaaccacaggtaggaccaggcaagggttccggggcccctgacgtgggaaactagagcagcgacccgggaccacagtggtctgtctgcctccaggactggtttgcctcctctcctagccggaggctgtctcagcgtagtgtttacaaaatgcaaactgggatggtgtgtgcttctcccgcgggttttgtttgtttgtttgagacggagtctctttgcccagctggagtacaatggcgcaatcttggctcactgcaacccccacctcccaggttcaagggattctcctgcctcagcctcctgagtagctgggactacaggcatgcaccaccacgcccggctaatatttgtatttttagtagagaaagggtttcaccatgttggtcaggctggtctcaaactcctggccccaaatgatccgcccacctcagcctctcaaagtgctggggttacaggcaatgagccaccacgcccggccttccccgtgatttttgtagctcacctgtaagatcgtgatttcaaatcttaccaggctcttgttttggctgtgtggctcaaaaacttggcttttagcctttaattgtgaaaacgttcaaacacaaaagtagagggaaaaatgaatcccctgtctacctgccattcggcattgatagttatcaatatattgccatttttatttcacttgtccctgtattttttatgaaaacgtgaatctcctaaaatttagtttgtttaaagccaggcaagattctaatttgttgggttggcttttttttttttcttgcatttagatatagaagttcaatttttttattttattgtaaattgacaaattattatcgttttttgagatggagtcttgctctgtcgcccagctgggagtgctgtggcacaatcttggctcactgcaacctcttcctcccaggttcaagtgattctctggccttagccttccgagtagctgggactataggcgtgtgctaccatgcccggctaatttttgtatttttagtagagatggcatttcaccatgttggccaggctggtatcgaactcctgacctcaggtgatccacccgcttcggcctcccaaagtgctgggattataggcgtgagccactgtgctaggccaacagattaggatgattatatattatggggtacaaagtgatcatatatgtgtacaatgtggaatgattaaatcaagatgattaacgtagtcatcacctcaaatacttctttgtttatttatttatcttttttgaggtggagtcttgctctctcacccaggctggagtgcagtggcaccgatctcggctcactgtaacctccgcctcccaggttcaagcgattctcctgcctcagcctcctgagtagctgggactacaggcgcgtgccatcacgtccggctaatttttgtatttttagtagagatggggtttcgccgtgttggccaagctggtctcgaactcccgacttcaagtgatccgcccgcctcggcctcccaaagttctgggattacagacatgagccactgcacctgaccacttattgtttgtagggagaacatttgaaatttactctcctagtgatttcaaaatatacattattattaactatagttaccatgctatgcaagttcgaaatttacttggcagatttcgtgtggccagcagcagaaatggtggcatgaactgattctgagacattggccaagacacatttttaaaagcaaagtgaccacttgggaagggtcgaccacagcctggaagaacagggagcgctctgctggtgagctcgggaggacaaggtctgggccctttgacggcactgcctctagccccgggcaagagagggccgagggccatgtccagtggcctctatgctcccctttctggatgacattcctgctgctcaagaccctggagtgtgctaagcacatagtgcagcctgctcagccccctcccagggcctcaggcagactgtgcagccgtatgtccaccccaggcccgggcgttggggtggcaagggcatgttacaggtggaacgggacacacactagctgggactctgtgtgtgtatgcacgaggctccctgcaggggggcatgaagcccaggttgggggaagtcggggaagagaaggtggccaggctggggccgccctccccactggctacataatgaacctggccttccaggtagtcacggtggcatacttttcgaggtaggaggatagaacctattttatttaactgttttactttgttagcttgatttaaaactgaacagctgggcatacaggatgcagcactcatgagtactctggccccagaccctacagatattcaggcagacctgtcctgggcacctgtcccagcccgtgtctctctgctgtgtctctcttctggagcgttcctggggtgctcagggtcccctttgtgctttttggctgctcagtttctgttgctgggctccttcggccttcccactgaggatggggaatatattctgttttctttccacttgaattgtccttaaagccatgggtaaactggttcaggctcagacttgggaatttgatcggagtccctttagcatttctgggcagggcttgttggtgtcgtggccagctgtcctcgaggtgaaaaccaaattgggttgggagggtgcacatgacacttaaagcccccagagctgcggtgccatcaaccacacactgtggacaggaggctgtcagtgggcaggctgggtccaccttcaaagtccatacgaaacagcccagttcagggtactgcttcttttcgagatctcacgggcaggagccttctggcactgttcatgtaaatgtaagtcattctttctttctggaggaaaatttagacaggtgaatgaaaaccggagtgcttaatccgctattctacatgcagaagtttatctcaggaaacagtcccagatcactagcccattttgcttcaaggatgtttattgcaagctgttttgagtttttcactggttaaataaactttggttcaacttgatcataatagctgacatttgtggagtgtttaccacctaccaggtgctgatccaagtggcttacatttattaacttacttcatccttatgtcaaggcaagtactagtaatctccattttacacttggggaaactgaggcacaagaggcctaagaacttgcctgaggctccacctccagtggaaggctccagagaacaatatgttcagtaaaatctcattcttatgtaaaaaaatgaatatatatatatatatatatatatatatatatatatatatggaaaaagactccctttgtcctgttgtctctggcttatcttggttttcatctgacatacacttttgatcgaggaggttcccacttggggaaacagccagcccctttctgagcagagggtgtggcactacaaaggcgaaacatgatctctgggagaaacatgcttgaagcccacgctcctgggggcagagctgagcctccacacggatgtccccagcactgggagcagaggctgatgcggccccaaggtgctgaggaaagcgccccccagtgcaaaggatgctacaaggccccaggcttctcaaggaacatgaggcctggcaaacccagaacgttagactgggtcggctccaagatgcccctgggtttgagctggagaagtgtctgcgggagggtgctggggctcctgcagagcgtgtcttcctgaccctgtgggcttttctggggggggctaggaggctctgccaagttggtggatggaactgtgccttgccctggggggcactgggcaggagccagcctcggagcgtgagtctggtgctgcgccaggaggctagatgccccggccaggtcctgtgggctgcgccgtctgtgcccttggcccgcgaggctggcaggctgccactgcttgtaaagcctcctggttgaaaaggtgactcggagcagcggattcactgggagcctgtcagccacagaggcagcttgtgcttgtgccccaggcccaggccgcaggaggtgggatcaagttccacggctccagtgtgaaggtctgagcttcattctaaggcaggtttttgaggacatggggctctcgggcacctggttgtattcctgcatcctgcattcctgcccactctctcatgccttcttctccttctccttggcgtgccccaagccagccttccatctcagatggagttgtatgtttctagtgagcccacacaccccctgaggacagggcctcacccccgcacgcctgcttcttcatcacagctgctaggaaatgaagatgcatgtccccaggggcctttgaagtaggatgtggtctccctgagcagaactctgactctaaattctctcctggctctggcgttggtgtgggacttgggttgcgggagggggcaggttgttagcggctgctgctcagacccagcggaggaccgggctgctccaggctcccggcaagatgtagcaaaatggccaaatttaaggtgagcacgggctcccgtgcagtttctcacccctgctgctggctgcctgtctgtgaatgctaaggcgaggggtggttctacattgacttcttactgactggtgggagtaacccggaagaggcaaatgacttccttccctttcctcggctctgaacctagaatgttccagtgataccacctccaaactcttcacctgtgtcctttcccacctctctgccctgaggacagggaactaagtggctgctcacggtgggtaaaactgaggcttacaagacaccttgggcaatgggacagccagaccccagccctcagcacctgcctctcccatcccaagccccagtctctttttcagctgcaaagtcaatacctttgctttcagagagggagcatgtgccacgccaggagaggctttgggtgtatcacagatggagactgcctagcttaactgcgcagtctgaatgattctaaggaggggaagagagaacgcctctggagcctggcacacacatttgccggagaaagtggtgagtgcgttgtgaccaggtgagggacgaaccttaaggagattggctgagaacacctcccctcctcaccctaagtcaacaaacccgggacagcagtgcttccaaaaccttacttgttcacctcacctggagattcttgtggcaaatcgggttctgcctcgttggctctggggtgggccttgagagcctgccgttctaacaagctcccaggtgatgctgatccacgaccagctttgagtaccaggatctcgcatcagcttgggagggaggagacctgaatcctagccctggctccttaggctcttctttccagtgggggaatttagttaattgctccgggccccaatatcttaatctgaaaacaaatgaatgacaacctagttgcctttcctactctgagattccatgcgtcttaaaagaaaaaagttttaaaactaaacatgtcactgtcaccatcgctacttcacacacctaaagttataaaccactcagaaatgcaaatcttaggagatgtgatctggcaaggcaaaatcgaagatggctttgaggtctcagctaaacctagaaatctgatgctctgcattttttatgggatgcttatgaattaatgaaaatacatgagattatctctccttgagtctaccctttcctacaaccagcaaaaacttataaaaagcaattgaagcttactttgggaatgccaagggattgattaaaatatggactgtgctgattccatggctggtttagcagattcttgttaaaagccatgactttttaaaatttttatttttttgtgggtacatagtaggtatatatatttatgggatacatgagatattttgatacaggcatgtaatatgtaataaccacatcatggaaaatggggcatccatcccctcacacatttatcttttgtgttacaaaccaattatactcttttagttattttaaaatgtacagttaaattatatagtcaccatgttgtgctatcaagtaccagttcttattcattccttttatttttatttgttttactcattaaccatccccacctcctccctagacccccgccgctacccttcctagcctctggtaaccatccttctattctctatgtccatgaattcaattttgatttttagatcccacaaataagtgagaatatgcaatgtttgtctttctgtgcctggcttgtttcttttttttttttttttttttttccttttttttgagacagagtcttgctctgtcacacaggctatagtgcagtggtgcgatctcggctcactgcaacctccgccttctgggttcaacctcccaagtagctgggattacaggcacccaccaccacacccagctaatttttgtatttttagtagagacagggtttcaccatgttgtccaggctggtctcgaactcctgacctctggtgatccacccgcctcggcctcccaaagtgctgggattacaggtgtgagcaggtgtgagcaactgcactcggctggctggcttgtttcacttaacataatgacctccagttccatccatgttgttgcagataacaggatctcattcttttttatggataaatagtactccactgtgtatatgtaccacattttctttatccattcatctgttggtggacactgaagttgcttccaaatcttggctattgtgaacagtgctgcaactaacatgggagtgcagacatctgtttgatatactgatttcctttcttttgggtagatacccagcagtgggattgctggatcatatgatagctctacttttagttttttgaggaacctccaaactgttctccatagtggttgtacgcatatagtacatatagtacataacatatataacatatgtatactacataacgtatatatagtatataacatatatagtggttgtactaatttacattcccaccaactgtgtacaagggtttccttttctccacatccttgccagcatttgttattgcctgacttttggatgtaagccattgtaattggggtaagatgatctctcagtgtagttttgatttgcctttttctgacgatcagtgatgttgggcaccttttcatatgcctgtttaccatttgtatttcttcttttgagaaatgtacattcaaatcttttgctcattttttggatcggattattagatttttttcctgtagaattgtttgagctccttatatattctggttattagtcccttgtcagatgagtagtttgcaaatatttcctcccattctgtgggctgtctcttcactttgttgattgtttcctttgctgtgcaaaagctttttaacttaatatgatctcttttgttcatttttgctttggttgcctgtgcttgtggggtattgctcaatacatttttgcccaggtcaatgtcctggaggtctttcccaatgttttactgtagtagcttcatagtttgagggccatggcattcttaaaaacataactttcattcttgcatagctttttttttttttttttttttttttaagtaacctggactgtcatttggctagggaggcgggagtttgtgtgtctggaaatgtgtgggtttttttttttttttttttttttttttttttttttgggacggagtctcgctctgtctcccaggctagagggcagtgcagctacctcggctcactgcaagctccgcctccctggttcacaccattctcctgcctcagcctcccgagtagctgggactacaggcgcccgccaccacccctggctaattttttgtattttttagtagagacggggtttcaccatgttagtcaggatggtctcgatctcctgacctcttgatccacctgcctcggacttcaaaagtgctgggattacattacaggtgtgagccaccacacccagccagtgtgtggtcttttttatctgtctgtttaaactgtctgttttatatgttgcatgaaccccgctttaccatgaatcttatcaatgactgataaatattgtctattggaaacattctctttaagaggaggtgaccgttctctgcagctcctgctgattcagcaaagctgaggtcaggtggagccagctgggcagagatgagtgattagaaggctgtcattggcagtgacagtccacgtgctccagggcagaacagtgacactggctgtcacagtctgtttcaacaatggaggttgtttgtttttatttaaatgatgtgaataaagaaaggaatctttgaaaactaaggctggagctgcccaggcctgagccaggcccttgtaacaaggcccttctgggtgggggatctacctctcttttcacctggaccacctggcggtgggtggcgagctcagaaccacagctgggtggaaaatgggagggccagcagcgagctgcaggaatggaattccatgatggcatctcatgtctccagagtggacagacagaagcttgtgttttcatttcaaagggcatctgccacgccctccaggcagaccacataaatggcatttttgggtgaggcctgagggattctgtctggtggtatacactgattttaaccagaagcaatagatttgggctctttttgacaggggaagatagatgagagatgatttccatgaggatgttgaaaatattggcaattctgaagaccccagggagtcccagggggttcctggccaggagcgcccctccattgccctgcaccaccttgctttccaggctgtggctctgtgtgtctgaatctacggcatgggggcacttccttctaattcacagaagaagctatatgggccccagactgcccatcctgctaaaactggcaaaggccttttcccagcctgagcagtagtgattcagccaactgcagaagtggtatttggagctcacccttaaaacataaagcaagttatgttcagactatatacaggcaatgagaaaatatgatgaaatatgactgcgtatgaatagccccagacttctagggcctttgagtgtgtctgtcttgggcaacatcttctccttttagatttcaggctcagtttactgtcaggaaaattaagttgctgagagcgtctcagaattttggcttaaaagagaatatacacctggaacaaagacttgaggggtgctcctattaaaaaaaacaaacagtgtgtgagcttcaaaggagcaccttgaaactccagttccatcacatccactctgctgggccctcctagggcagctctctgtcttgtgcctgccttctcttctgaacactcctaaggtattttgagtgcggaggataggatcatacactcaggaaagccgagagctagatcctgaagcatctgtgcgggaaatgcccatctgtgcctgaaatgagcatctgcgagtgaagtgatcccatgtctgggatctgtttggcatgcgccaggagacagacggacacatgcatgcacacacacacacagcggggacggggagttggtgaaataagagtgggaaaatgttgacacctccgtgagccgggtgacaagctgcttggtggttcactagacagggagttataaattggccgcttttcaacatcgacagataaaaatcaatagccttcccataatgccatcattaatcaattagagtctgtaatgggaaaagcagatgccactcccccacagtttctgggaataaacaaagtgtataaggcctaaaagaagaaagctatagaacttgactgaagcccacatctgtggaaaggcatactatgttcttggagtgggaacatcaacactatagagatggcagttcctctccagttaatctggaagtgcaagtatcgatgagtaaatccaattaaattccaacaagagcctggtctaaaatgtaacaggctgattttacagtatcgctggactccccctacatccaaacttattcttaccttcattctcccattttggttaatggcagcaccatccaggcaactgctggtaataaaagcctgtgagtcattctgacgccccttccttcctcagcctcatccaacctaccagccagtagtgaatcccaccccaaaacagatggtgaatcccaccgagtcccccggtcatcgctgctacatcgagagtgcagccactgccccatgtgctttcctggtctgcttggcagcctttgaactagtctcctggctcttcccctgctccccgtatagggatctgcttgaagctcacacagccctgatcctctgcccctgcctctttctccaccctcatctcccaccatttcctgggctcactgcattcagcagcctgacttgttcctgctcagaatcttcacacccacctgcatgcactccctcccccaggtgatatggtttggatctatgtccccacccgaagtcatgttgaaatgtgatccccagtgctggagatggggcccagtgggaggtgattgggccatggtggtggtttctcatgaatggtcagcaccatcccccctggggttatcattgaaacagtgagttgccacaagatctgattgtttaaaagtgtgtggcacccaccccaccctcttggtcctgctcctgccatgtaagttgcctattcccactttgccttccaccatgagtaaaagctccccgaggcctcccaagaagcagatgctgccatgcttcccgtatagcctacagatccatgagccaattaaatctcttttctttataaattacccagtctcaggcatttctttatagcagtgcgagaacagactagtacaccaagggttggcctggctgctgctgcctccgtctccccacctaccccacccccccccacccagcttcgtgactgcagtaagaccttcctgacctctgtggctggaataccctgcagcccccacacaccaactgtctctgccccatgcctggtttcctttcttcttggcgcttatcactgaaattaccttatgtgtgtgcttacgtgggtgtcttctgttgtccactgcaaaaatgcattgtgggttgaattgtgtgccccagaaaaatacattgctgtcctaacccgggataccttgcaatcttatttggaaatagggtctttgcagatgcaatgaagatgtaagttaagatgggatcgtactggtatagggtgggcctttaatccaatgtgactggcgtgcttataagaagaaaagggacacaggcagacgcacgcagaggggagaatgtcatgtgaaggcatacagggaagacagccatatgacaatggaggcagagatgggagtgacactgccgcaagacaaggaatgcctgggctaccggaagctgggaaaagcaagggaagatgctcctacccacgccttgatcttggatttctggcctccagaactgtgagacaataaatttgctgttgtttcaagccccccgttctgtggttctttgttacagcaacccaggcaactaatacaggggcattgtgtatctcgttcagtaccttaccttaacactgcctcgtgtggaaatgaggcttggcaaacactgttgaatgacgaagcattggcaaaaaaaatagccaagattttgaaaaggatccacaaaggcagactgatttaccaggtagcacaacatattataaagccctaaccatcgtggaggctgtcagcacaaatcaacacagtagagtggaaggctcagaacagacttgtgtgagcagtgttactttgtttcttataaaggtgatgacttcagtcggtcagagaaaggtaagggtggatactcagcacctgctgttggtgtggttgatcagtgcagtgcctaagaggcccctgctctattcaactggatattcacgcaggcattcttggccggtctgctcagagaggaataggctggaaaccttggctggccagcaggatgctgcctgctgctctgcttccaggggagcgaggggtcttcctggcagtttttgcaggtggctgcacacacaggtgtccttctggtcactagctcctcccccagctgaaagccctgggtccccaaggagccagaatcccttataaaattaccagccttacagagccctgggttcacacaggggacattccatgttacaagagttaccacacctaaggaagccccatgcctggcttcttcaccgagtggttataattcacttatgggtcttccctgtccagaggcaatttgccaatcaaggtcatttttaccatgagcaatgttgtctagtaacagagttgacgttccatcttgattggggttcccagggaaccagagctagataattaaacattaaattctcatacagaagggaagaaagattttgctaagcctgtgaccaaaactatccatatggacactaagtgagagtcctatgttttatcatacattaaaataaatgcagaggtatttaagtgtaaaaaaacaactttcaaagtattagaaaatataggctatgctttcacagtgttacggcatggaaagatgttctaaggaaagcatcaaactcagaagtcataaaggaaataaacctgacagatatgggaaatatttttattgaagtgtaacatacatagagaaaaatgaacactcgaagcgttgagctccatgaatcttcacccggtgaacacacccacatagccagcacgcagatctggagagagaacgtttgcatcccaggcccctgcctcccattccccctgtgtccgaatgatagatttgactacataaaaatggaaaactccaatatatcaaaagacaccataaacgtagtgaaaagacaagcaacagcccagaaggaaagtttgtgcagccttttgtaacatagaaaaaggccaaagatggatgatcatagcatataaaagaactcctatagatcatgaagaaggaaggacaaatagttcaacagagaaattggcaaaggatataatgagcaattctccaaaggaaaaatacaaatggccaaaacaatggagccagtgtggccggctctgcccagcacggccatttgcacatggtcactgttgggtgggtgagggctgcttgccccgtctccagccccactctcttgccatctccccctgtgattcaggcatggagctcaggccccaggtggcaggcagcgcactctgctcagttaccccagctcctggcttcatggccatgccctggcacctgtctccctccccttagcctgctgacctttttcccatgggatgtttggttgtctctgtacaggctctgagccagccctatgggcttccagacaagcccagattgagcctgccctctagggagcacccctgtgtagcttccagctgagaccttgagacacaggcccagggagccaagctcagggctgcgaacatccaggtggggctcaggtgctagaggcggacaacagcctggtgcaggacccagagtggcaagaggtagtaagggggccatggtgttcagaaattggggcaggtggtgggtaaggcatcctgcttctaaaggccagggtttgggagggcaaggaagcccctggcaggagtcagggcaggcatcccgggcaggtagtgtttgttctgtgaagcaggcttccccaaggaggggccctagagcagaaagctgtgatgtgcaggtgactgggagacctgttctctttcgagccgtgcagctccggttagtggatgacagatttcaagccctgctcaggccagtgtttttcacacatgtttgacctttggttgacagcacacagcacaacagcttatggtccaggagtgcacctcggcatgcagtttgggaatcctggcgatgatgtgattaagattctggggccaggttctcaccaagccaaaaggctttttttttttttttttttttttttttttttttttttttgaggcaggagctaattctaggtacagaaaaccattggtaaagtggaggaagctgtttccagatccacggaatgacggtaactagcgtcacttgagaaggtttcttctgcccttttgtaaaaaatagcatgatgttttctcctagagacagacagggcctctgtacgtaagagcagacatgtatggagaaggccggagagtcacaaaccatatgtgcctgagatgtgccacctgtggggctgtgaataaggaagcagaatcagtgtgtttactcagagctggatttggctgtttgttccttcatctttcttggaccacatgtcctggtgttcagaggctcctgagagcctggggctcagtaggccgtctcatagcccctctaacccaggtgagaaaacaggtcccagtgggtccctaacccatgctcattttctcaccaaacaacaacaaataaatcagaaagtcctgaaaaatgaattctggcctgttttctggattctggattgaaatatggagtaggagctgacttttagtaagttgatcaactctccccgccgaccccctagccttctggaactgtcttcagtaaacacaacccccgccacccctgacctacccgcaccgcactgtggtcggcctcttctttgaacacttcccttacagcacgcactccccccaagctgggccttctcttgagaccactctgctgtccttgggagtgatggtggaggcggggtagacaccctgtccctgtctcgtggtgctcctttgggccacagctcctcttccctccgtaggaggaaccatctggaatccatcttcctccttgaccacacctctccattcattaaggagcagagttccctgctcactgggtctctctacccctcctctgtccctgtctgggtgaggtcacagagagcctcacccgcctgctctgttggcctctcacttgccgtcctctctgccccgttccctctcctgcacacctgtccgcggtatccccagctcttagtgactctagccctctcccgccctcctctgcaccctgcatgcacttgtgttgctgaatgtggccggagaaaaacacagccatcttgactgttctgtgagacttcatagatttccagggctgtgtggaatcaaaaaatcttcctgcatttccccagccatctggcctccaggatgactatttcacatctcctcaagcctttcacatctcatccccctcacacctgatgattttgcttcctatttcactgggaaaatgaaggtaactgagaactttcttttttttttttttttttttttgagatggagcctggctcttgttccccaggctggagtgcaatggcacgatctcggctcactgcaacctccacctcccgggttcaagcgatttctcctgcctcagcctcccaagtagctgggactacaggcgcccgccaccacgcccggctaattgtcttgtatttttagtagggacggggtttcatcatgttggccaggctggtctcgatcttctgacctcgtgagccgcccacctcggcctcccaaagtgctgggattacaggcatgagccaccgcgcccagccaaaggtagctaagaactttcaacagcccccacacctactccctggctctggtacagtggacagcctcccaggcttgtcccccctcccagtgaccttgacccctctcatcttttaagacctcgctcccgcagtttccccctttccttcctaactcggtcatttgcaccattataccaacaggctgtcttagctcacattaagaaaccctctcttgaccctggcctccacctcatctcttggttttcccatgtgacgaggttgtctacacaccttccctcttcccagtctcccttgaagtgactccagccaggctgtgtcctcccactcttctgaaacctttcctcaaggcctccaggaccttctggctgctcagtcttccatccaacagcatcccacagatgaagcattttcttcgcttggcttgtcttacgctctgttctcatcatattgcttcctcactgcctgtttttctccagagcctagaaccatgcctggcacacagtgggcatctagaccctttgctgagtggtgaaattgaagtgtgacagggtgcgtggcttccctgctcaggctccctcagttcccaaagctgtgctccttcctggatctcatgtagcacaaggaggcatacgtgggtcgcaccacatggcttctagaggagtatgtgtgaatgtgttcatgttcatgtggaaatagggaggcggccctgaggtgggaggagccttcccaagaggaatcacctgagagaggaagaagagctggggaggaactgaggaactggtttggcaggttcaggaagaagtgagtgaagaaactggaaaagtagccaggatcagaacctgcagccgcaggacctaatttgttaggacctaaattaggggtgattgtgcaaggcagtgcagcatggaagccccactccaggacttccctggtggctaggaaacattgctccacccctccctcttgtcaaaagagaaggtgcacacacttggagagaaatgggtatttttgtgcttctttcttgttccctgttgggtaggagggttggggctaccaggcccagtgaaaacacagcccagccctgcctgttctgcctcatcctgaagtgtaaggaactgcccattgtgctgggccctgtcactggctctgcccgaggcatatgtggcactgggcctggctttttaaggtgcaaactgttttcctggatttcttatttttaagggaaaaaactcaactacaaagactcagtggccagtcctgtgctcaagccctcttgttaggggagctggcctccctctttggccacagctcagtgcagggaggggtgtggaaagtgctgggaaagggggaggacccaccctccccacagatgggtttctggctctgactgcgggaaaccaaactttcttgtattttctctggctgggttgtgatgtgggcatggcgttggtgggaggtagtgcatttgctgagggtgatgtgttctgagtgtcccctcactccgtggctctttcatgtggcctggactttttggtgagggagcagcagtgggaggacaggagagtcctttagcgggctgatgtgtgtctgccagttggctttgtcttggctcgcagcttctgtttcagacagatgttttgatccccctttgcttagcaaccagctgcagccttgctctgtcttgggaaaaccactgtctttctgaagagctgcttcagctccaaaactgataactctggaaggagcagccaccagccagtcagaactgagctccgaattaacacatgaaggagactttggcctcttgagaccctgaaatacaagaagatggtttcatgtcatgtccaagaatgtggccacaaatgctacctcagtctcgggctgtctgcattgttaaatgacctcattatttttctgacctgtgggccgggcttcgttggcatttccttaaggcgtgttattgtggaaaatattattcaagaaagaagagcatgtggtttgcttggttactgagctggactggctctgggtgaccagagctctcacgcagagccgtgcacggctgctcccactgagaccagcctctgcctcgggatggtctgacccacggagctctgttttgggacccagaatccatgagccacatttgctgtgctgtgggacaaaccacagtttccttgggagcctctcaagtggtggctgtttctcttccacacccttggaccactggagctggagacggggagttccccagcctcctccaaggataagcctattccttaagcctccacaagccccatcattatttatttttatcataagccatgttgttcgagtagcatagacaactttctcaggttaccagggaaacaggactagaaagtcaacccacgatcaaattaccttgccgaaagggaaccagctcagttaacccttgaccccacacgccattgtcagaggcgtatgaaccagagcgactccatcttgaataggggctgggtcaaatggatctgagacctgctgggctgcattcccaggaggttaggcattcttagccacaggatgagataagaggtcagcacaagatacaggtcataaaggccttactgctaaaacaggttgtggtacagaagccggccaaaacccaccaaaaccaagatggcaatgaaagtgacgtctggccatactcactgctcattatatgctaattataatgtattagcatgctaagagacactcgcaccagcaccatgacagtttacaaatgccatggcaaaatcaggaagttaccctatatcctctaaaaaggggaagaaccctcagttcctgggaattgcctacccctttcccagaaatgaataatccaccccttatttagcatataatccagaaataatcataaaaatgggcaaccagcagctcatactgctgccctgcctatagagtagccattcttttattcctttactttcctaataaacttgctttcacttcatggacttgctctgaattctctcttgcatgagatctaagaactctctctcggggtctggatcgggacccctttccagtaacaccacgagactgcgtccctcactgcccctcgtttcggcagttgcatggttccttggtgagttttccctctttctcgctgtcatttctcactatgagtctggcgcttgttcttggtgtcttcagtggccacgtcgttgatccttcggaggaccttcgccccctctcctccagtgagtgaccccacccctgcagccactcgctcccatgccacgcccctgacccctccagcatctgtctcaaacatcccactcttctttctccactttcaccttgtcactcatcctgcaattcccagtcccagtgactattttttttttttttttttgagacagtcttgctctgtcgcccaggctggagtgcagtggcgcgatctcggctcactgcaagctccgcctcccaggttcacgccattctcctgcctcagcctccctagtagctgggactacaggtgcccgcaacgacgcccggctaattttttgtatttttaatagagatggggtttcaccatgttagccaggatggtctcaatctcctgacctcgtgatccacccaccttggccttccaaagtgctgggattagaggcgtgagccaccacgcccggcccccagtgatctttgaccccactgggatggcgacccttagaacccatggccttctcatagcccctcgtctgtctcacaccttccctctttgccatgtcagtgaccagccctgccttgcactcaccctccccacccgcccttctcttgctgggtcctccccacctggtgaaacctcagccctggttacatcctgcactccacgcctgcaccagccgctgtgcagtagaagtttctggagatgccccactaccacacgggcagagcgtaccatcaggtcacaacccctgagccaaggtgggcctttcacttgcgtttctgtgctctgtccactcccccaccctcccagatggcaactccaccctcccctttcctcagctctgctgtgcctcctccccatcctcactttcagctgatggcctcgtcctctcattccaccccaaaatttgaagccactggaagagaattcccgctggctccctgcaccaccactacccgcccaccatgtctgtcccccttcccacctgctccccgcagtgcactgtctacgtttcaggccagtgctacctgtgtgcagatgcccatggcctgctccagggcatggctttcggagctccctgctcctgccacatccgtcctgacctctctcttggctgcattggtcctgacctctctctcagctgcatcaatcctcgcctctctcctggctcatttctgccagcacaaaacttggtataaatgcccctggcctaaggaaatcttttgacccactttcctctccagcagcctctccatttctctgcttgccacacgcacacatgcacatatgcacacgcacacacatgcgcacacacgtatgcacacacgcacgatccatgcacacaatgcatgcacacacaggaaattcctcagagaatcatctgttgccactgtgtccattttctctctccctccccattcaggtttttgcccctcaactttactgaaactgttcctctctgagctgccaaagtctgactaaagtgacaaattctcagtcctcaaattatagatgcagaagcagcctctgacctgctgactgctcttgcttccttgaaacgctttcttctcctggccgccaggatgccacgcactgctgggttttcttgtatcttcttggtcacttctcagtccaccctgaccttcaaacatgctgcacccagaagtcggtgccctccactcactccctaggggatcccctccaacctcatgattattttattttattgctgggattacaggtgcacgccacactcccagctaatttttgttgttgtttgagacggagtctcactctgtcgccctggctggagtgcagtggtgcgatctcggctcactgcaaccttcgcctcctgggttcaagtgattctcctgcctcagcctcccaagtagctgtgattacaggcgcatgccaccacacccagctaaattttgtatttttagtggaggtggggtttcaccatgctggccaggctggtctcgaactcctaaacctcaggtgatgcactcacctcagcctcccaaagtgctgggattacaggcatgagccatggcaccgatctgtttatttttgagacagtgtctcactctgtcaaccaggctggattgcagtggcgcaatcatggctaactgcagcctccacctcccaggttcagatgatcctctcacctcagcctcccaagaagctgagaccacaagtgtgcacaccttgcccgactaatattttttattatatttttagagatggagtctccctatgttgtccaggttgttctcgaactcctgagctcaagtgatcctcccatctcagcctcccaaagtgctgggattagaggcaggagcccccacacccggccccatgattgtaaataactctgtctgctgggacgcctgggggatctttccaaccagatttctctgctggactccagacttgcagagctctgtcgtcagcctccacgcagggctgcaacagagccacggcatgtctggtcccagcagatgctctgcccagacctgtcctctcactctttgctgtcacgccagggccactccatcccttccattgttcaggcaatgaacatggcatcatccttgaaccctgtctttctctcatatcccataaccaatctgtccatggttccaccttcaaaatatacccagatatgtgatgatgttgaggaattgctggtaacttttttagatgtgataatggtattgtggttgtgttttgtttttgtttttgttttagacggagtttcgctcttgtcacgcaggctggagtgcagtggcgtgaccatggctccctgcaacctccgcctcccaggtttaagcaattttcctgcctcagcctcctgagtagctggagttacaggcatgcaccacctcacctggctaatttttatatttttagtagagactaaaaacagggtagtggtgtgatcacagctcactgtagtcttgacctcttgggctcaagcaatcctcctgtctcagcctcccaaatagctgggaccacaggctcccaccaccacgcctggctaatttctttaaaaatttttatagggatggagtctcactgtgttgcccagtcttgtcttgaactcctgggctcaaccagtcctcctgccctagcctcctaaagtgctgggattacagggagggagataccatgcctagctagtttcatttgttatctgcctggtgtgtgtagacatctgctttgtcacctccattgtggagagcaacatggggtttcaccatgttggccaggctggtcttgaactcctgacctcaggtgatccattccccttggcctcccaaagtgctgggattacaggcatgagccaccacgtctggccatggttgtgttttttaaaagagctcttatcttttccagagtcttactgaaatatttacagatgaaataatgtgatgcctggaatttactcacaataacctagggcagtgcttctcaagctttggcatgcattcaagtcccctggagggctcattaaaacagctttctaggtcttgagcccagagcttctgattcacaaggcctggggtgggccccgtaacttgtatttctaatgcttggtgctgctggtgtgaggagcccattttgagttgagctgatctaaggtataggagagtgagtagcctgggcgtgggctgggagaaggtggagttggtgggtacgtggtaatgaaggtacaagggtttattatgtcaccctacttttctttggaaagttccgcaactaaaaagcacgtgtgtatgtgtgtctgtctgtctgtctgtctccagaactcttcagctcttccattgctgcgccctggctcaggctagagtcctctcttgcccaggtggcgctagcacctcctaactggtctccttccttctctccttgttcctctagagtcagttctcaacagagcagccaggatgatccccagacccctgcagtggcattcagagtgacacccaaaacctttctgtgacctcaaacttctgtgcagtgtgttccccacgccacttcctccatgaaccttcagtcacactgcccgcctcgctggggcttgcactggtcaggagtgcttctgccgcaggacctttgcacgtgcccttctgggcctacagtgctcctccactctccatgcagccatctccctggcttccttcaggtccgcattcagatgtcacccttgcaatgaggccttctcagacaacaccatctaaaatgtcacttccccttccccactattcataccctactccctgctcactttttctgctccgcgcctgtcactgtctatattgcactgattgatcttatctatcctggcaggaagcttgagcagcgcccgcctcttcctggctgtgcctcggcagtgcccccaccccagcctcccaccccatcttggtctgcaccccctgccatcactcatccattcattcctcctgttcctcttggccactgccaaatgctggatggtttccatctgtttggttcactgcagtgtctctgtccctggaagggtgccagccacagaaggcacgaagatgtgtccacagagccggcggctaaaaatctggcaagaggagtcgaggaagggggctgaggaggtagaagggagggctttcctcaaaaggccagaaattcgtggccagccaaaggggaagcaaagacattctcgtgtaggaaaacttacaggaaatgcaactaaaagcgtgggagacaggaagtctgtgtatttctgagattatcaagaaaggggggatggaagttgcaaatgggcaggccaaattcagtctgcagaggtgtgcttccagcccacgcagtgcttaaaataaatggagatggttgccagcactggaaggtctggagtgccctgtctcctggaaacactgcagcctggcaccactgggctggtgagcatgactggcacctgcagcagctgcccaccagctaatggcaggtgtgtgttctctgctcacccaaagcccttccagcagcttcattttgttgttgttgtttatttgtttttgagacagggtagtggtacaatcacagctcactgcagtcttgacctcctgggctcaagcaatcctgctatctcagcctcccaagtagctgggaccacaggttcccaccaccatgcctggttactttttaaaagaatttttgtagggatggagtctccctgtgttgcccaggctggtcttgaactcctgggctgaagcaatcctcctgccttggcctcccaaagtgctaggattacaggtgcgagccaccatgcctggctagcttcatttgctaccttcctggtgtgtgtagacatctgtgttgtcacccccattttggaaagcaaaaaggatttcttcttccttcaaacataattgagaaaatacagttgtttgggggcaagtagggtgcggggtgactctggaaccggcctcctgggaagccaggcctctgggagtgctggaggtgggcagtgaggctgccaggcccctgccttctggggtggggtgcatgctcctgatacatcagaagggtcgggggaggacttggaggtgaaggcactgcaggaagagaggaagcttactggagagacggtcaatggggcagtcaggctttaaaaggacgggcccaccaagtgaaaagatgaccaagtgtttgggctgaattgtgtcctccaaaaggatatgttgaagcctaacccccgggacctcagaaggggatcttatttggagatagggttgttgcagttgtaacgctgagatgagattatactggagtagggtgggcccttaatccagtgtgactgctgttctaagaagatgtacatgtgacaatggagggacatgtggggagaggatggccacgtgatgatgggggggacatgttgggagaggatggccacgtgacaacagggggatgtcaggagaggatggcctcgtgacaacgggggaatgccaaaagaggatggcctcgtgatgacaggggacacatggggagaggatggccttgggacgacaggacatgtggggaggggatggccacgtgatgatgggaggacatgtggggagagaatggccacataatggtggggggacacatggagagagaatggccacataatggtggggggacacgtgaggagaggatggccacatgacaattgggggacaccacgcggggagaggatgaccacataacaacgaggggacatattgggagagaattgccacgcgacgacggaggaagggactggagtgaggaagtcataagccaaggaacgccaaggacagaacaagcagcaaacacaagacacagggccaggtaaggaggtccccggctccaggtatcagaggagccctgctgatgcctggatttcagctctctggcctctggacccagaagagaatgaagttctgctgcctggggcctcccagtttgtttacagtgagtctgttcatggtggagaaacatcttctcatgatgttcctgtccaccatggtcaaggcctgttttgagctcctgcattgtataagtcagaggtaaagctgtttttctcaaggggtcaataattgacagtattggaatgggacaaggtggtcctgttgggttttgtttgtttgtttttaaaatatgaggatagaaagtcgtgtttttacttgtgcttaattttcccagtggccgggatgtgaagtccacgcctgtcatctgtaatgcaccagggcaaggggtcggttttgtttgcatagcttctcccagggtcatcttcccacccctcaagtgtggatttggccacaacactttgtttagcaatttcctgtcattttgttttatttggtcaggcttatttgcatagttgaatgaatgcacaaaggcctccttgtttcgtggttcacaaagtcagaactggatcataccagggcatacgggttctgtttcaaggctttgtaaagctgctagggttgaaataggtatttttggtgtcggaattattttattgcatttatcagtttatctactgagatggggcactgagaactgctgatttacctctctgcagccctgtctgcagtacctgaaggctgggggaagacatttggcaatgcacacagcctttgtttctgcctgtgaagttggggtttcataggccacctcccaggagggccctgtaggtgcatgacagagtccgagtgtctcaccagtgggtttgtcattgcacccaagcagatgctgggggagaggatgcctcttccttctcctcacccttcatcagtgtgtgagcagaggcaggagacctgtgggctggaaggcccacatcctccttcccaggctgtgaatgtggcacttacatggcaggaggactttgcagatgtgatcaggaccttgagaggagacattatcctggatgatctggatgagtccatcgcactcacagggtccttaaaagctggaagagggaggccaggcagggagagggaaggaaatgtgaggatggaagagggatccgattgccgcgattgctgaatttgaagaggaaggaaggagccgagagccaaggaatccaggcagcctctgggagctgcaagagacaaggaaatggattctgtcctgcagccttcggagcagatgcagacctgccgacaccttcctttcagctcagcgaaatccatttcagaattttgagtgcagagctgtaaggtcatgagtctgtgctgcttaagccactgtgtttgtagtcatttgttgcggtagtaaaggagactaatatgctattttgccaccattctgagcttttgaggcaggctgatggaaaaggtgggacagtggcttcccagtacttttctaagtgatcctgagaacctaatatcccaggcacttcatattctgtaactctccaccctgctgccagcagagtctgcttagtcctcaagacgaggggcttctgctgctctcagaggttgatgatttcattgattatctttaagttactctgcactctcccttccccagagaaaacccagtcaaattcaagtgagcattggggaaaatattcattcattaaactggttcttaacctttttgggggcaccgacctcttgagattctgttgaaaatgggattttagcccccataaaaatacatatcaaaaatttgcataaattttggccaggcacagtggctcatgcctgtaatctcagcactttggaaggccgagacgggcagatcacttgaggtcgggagttcaagaccagcctggcaacatggcgaaatgccgtccctactaaaactacaaaaaatagctgggtatggtggcgcatgcctgtaatcccagctgcttgagtggctgaggtggaagaatagcttgaacccaggaggtggaggttacagtgagctgagattgcaccattgtactccagcctgggcaacacagcgagactgtcaaaaaaaaaattgcatacaattttgagaacaattttgtatacagattcccccaggagctaccccttgaagctccaatggctgccaggggcttcctctgtcaccccaggtgaagagcccttgtacagattaattcacattaaggctgatgaatggctgttttcctagtaagtctcctcgctgtttgccaggtccttaaaccatgttcagtggatcctcattatttgtggattccatatttgtaaattcatctgctctctaaaatttgtttgtcaccccaagatcagaactcatagacaccagcagagtggcaaaaatgtgttacccgatgagccttttcccagctgaaaaggatgctctgccatcttgtttcagcctcttggtgtaaacgagtgtggttttcatgatttgtttagtgccatgttttccatgttttgtgctttttcttcgtggtttcactgtttgaaagtgctgtctagtgtttccaagtgcaagaaggcagtgatgtgccttatggggaaaatatgtgtgtttgataaactgtattcaggtttgtgttctagtgccactggttgagtgttaacgaatcaacactgtacagatgattcctgacttacgatggttccttccagtatgatttttcaacttaacaacggtgtgaaagtgatatgcattcagtagaaaccatctttcaaatacccatgggaccattctgtttttcactttctgttcaatagtctatacatttcataagatattcaacactctttcagaaagtaggctttgtatttcatgatttcgcccagctgtaggctaacatgtgttctggataggtggaaggcaagctgagacatacctctatggtgtttggtaggttaggtgtattgaatgcattgtcaacttaggatattttcaacctatcctgggtttatcaggacatgaccccattgtaagttgaggaccatctgtttattcagtaaggtgtcttttaaatagaaaaacacataaaacaaggttagtattgattgattgacaaaaatgttgcaacctgaggctttcaggaacctaactctgcatttcctttaggagtgctgcttgcttcagtatctgctggtaactctatggaacatagctactgtgaataatgggaattgggtgtattttcaagttgttggcctctccagctacgctggtaatcagtcctgctctttaaatcacatcttaccatcagtcctgcctagagaaatggaggaagggaggtctctggtcttacggtctgtcccgactctctgccccaccagctatgtcccgagaaccagcctggacagagccatctgattggtgggtggtagcaggtcatgttgtgaggccctggtgcctgccttctgtcctcctgtgctcgctagaggagcatgaggcaggagcagccagtccatgctggttcctgagcgaggcagctctagggctgccagcacccactcctggggggctgagggtaggaagagcttcagaggggaggatgggactgtctgactatatttccaatcccagttgggacttgtggtctgatgaggacaagtgcctttgagggggatggggatggttgagaggaaccaggaaatcaaatgtgtcctggaaaacatggcatggtggatcttttgagttggggtgttgggatgtgtgtcagctaaaacaaggttcacctgcttcaaatgttcatccaagctttctacacttgcctctctgagtcaacatctttagagacagcaggaagtgatgaaagtcagttcacagtccatctgctctgagggcttggtatgaggggctgatgttttctgtcattttctcctttctaacatttcactttgggatcttagttcctggttgaaattccttaactgtgggagtcgaggcagcctaagaatccttttcggctgcttaagacaatgaggtagagagggaaccagctgccccttttcttacctccatgatgatgtagaaatggttccatccagcccaagggttcttctggggcccaaagctccttaagggctctgtgcataggatttgaggattagttttcttgggtggggagaaaagtccatctttatttgtataaatcctacctgaaatgcagcatttcctctaattaggaaggcaggcaacaaaaccagtatgttagctatgtctgtgactctgtcaccaatgtgggttagccgtatctctgaccctgtcaccaattgcaattacagatgtctccacatcacattagtgttgtttcagatatcttgaagtagcatttgttcccattactagttttaaattaaggtggttaatagaccccactggattttgcgatttaatatgctgataaggcacatatattgctatactataacattttttaaaaattttgataactagatttcaataagattggtatttgtgatcatatttattttcttgatttttataacagctttattgagatataatttctgtaccatacaactcattaaagtgtacaactccatgtttctaaaatatattttcaggattgtacaaccatcaccaccaccatcaccataatctaattttagaatatttttgtcccccttaaaagaagcttcgtactcattagcaattatctacattccccctttccccactctcagcccctggcaaccacaacatctactttctgtctctagaaatgtgcctgttctggacgtttcatagaaatggaatcttgtttttgagacagagtctcactctgtcacccaggctggagtgcagtggcgtaatttcggctcactgcaacctccacctcctgggttcaagccatccccctgcctcagcctcccgagtagctgggattacaggcgtgtgccaccacgcccagctaatttttgtatttttagtagagatagggttccgccacgttgcccaggctggtctcgaacttctgacctcaggtgatccgcctgccttcgcctcccaaagtgctggggttacaggttacaaagtaagccactgtgcccggccaaaatggaatctttctgaggtcttttgtgactggcttttttcatgtagcataatgttttcaaggttcatctatctttgtattttgttctgtgcacttaaaacattattctgagaaggggtctaaaggcctgccccgtcgtcaccagaagggcctgtggcatcattggagaggttagggctctccctaaccattagggctccctgcgcctaatggttcttccctctgtcagttttgcattaaaactagtacatgccttggcttgagcatggacaatcactgccaaagacccggcaggcaaggcacgcagctttccttgggatgggttggacccaggccctgggcactcagaggtactcaggcacctctgcccagtctccccaagttaccacctccacaggtgccttggagtgagtgggcatctccaggatgtagcctctagtggatgatacccgtggacagggacagcaaggtagagtaatagggccaggccccaggtgcctgcccccagctggacgccagaaccccaggaccccagctcctccagcccccaggaagctgtcagcacttccagagagcaagctgttggtgggaaggtctgaatccttgcagctctgtgattcgcgaatcataaaacctccacacttggtgtttgtgggccgagctattgtctttgtgttttctttttggagtgggtgggaagccagcttggcaagccgggtgtgaatgaacaggaatgagcaggagacgctcgctgatgccttctgtgatgtgtttcttccccagctccagaagaaaaggaagtcattaaaggacagtatggcaagctcacggacgcgtacggctgcctgggggagctgaggctgaaatctggtgagtagccgctcgctggaggagcaggcgccaggctccccggtgggcaggagcctctgtgtcggaaggggcctcagtgcaggcattctgtttgaccgctcttctctctctcttcttttttttttttttttttttttctccgagatagagttttgctcttgttgcccaggctgcagtgcaatggcgcgatctcggctcaccacaacctctgcctcctgggttcaagcaattctcctgcctcagcctcctgaatagctgggactacaggcatgcgccaccatgcccaactaattttttgtatttttagtagagacggggtttttccatgttggtcaggctggtctgaaactccgacctcaggtggtccacctgcctcagcctcccaaagtgctgggattacagccatgagccgccgtgcctggccgacctctcttctcttttaagatgtttctttatgcctcgggacctgctcctcctgcaggaacctgcaggtggggaggtcaaggtgagtgttgcctggttgtcacctgcctgtgctggggagcagggtggggttcccggcacccccaccctgtgccagagaagctcgtcttcattgcttgccggcgagggcctaagtgtttcgaaagtctggtctggggcttctgcccagggcattgtccgcagtactctagaagatgtgccaaggcgggtgggtgaagacagggaccagggcagatgcccgggggcacaggggtgggctgggagttgtcagcaggagaaaaaagccaccgatgtgtgactgtcagtcagtgtggggtgggagggagaggaagggacagtgtgatctgacttgcgaagggagagaacttccaggaagacgtgggcatctctgctcactctgagagactcgggggtgagccggtggtggccggctgtcgtgggtggtcacagccaaactcagctgttcctggagctcaggagccctggggctttaggttctaccacctgtttccttccttctctctcaggggcccccttgccatctgtgacctggctgtggacatctcttgtgacttctggggccgagacaagagcccagtcgcattcctgattctcagtcccacctggctgagatgggaatggctgtatgggttgtctgaattcgggctttccctgagccaagcgcacacctcccttccctgctcacagcagctgttttcagagactgaggatgtttaaagctgccagaaaagcacggttacgttggccattccttttctgggtgttttctgtcatggaatgtttttccctgaactgtgacgattacagtgatcatttccaaatagcatttaggaaaaatacacagtacccacatgacaaagtgcatttatgaaatgtctgtttcgtgccaagagctagccgtacattcacttatttaatcctaaaaataggctaccgtgataatgcatctttgtccccgtttacagtaacgggaacaggctcagaagcttcaagtaacttgccttaggtcagaaacttagttggggtttgaagcgcctccaaacgcttgctttttctgtggaaatgtgcgggctgccgagggttttctgcaggactttccgctctgcagcgatcttcctgaagttgcaggaaatccctgtggcccttgccttccatggtgatgaccgtgaggatggtggcctgcacctgcatgggactcacttaggaacttgttaacacggctcccgaggccacctgtgctgttgtcaccctgccttgcaggtgtggcagggatgccgcgttccatccatgctgatgcccttttttccacatggtagtatctgggcccccaggatgcctcacagtcttggcttccttcagttatagttggcagctgcttttggtccttacatgaatgactcattttgcatccgacagggactgggattcgacgaattacagtaaccggctcaaggtcacgccattctcaagtggtgccctgggttttaaactcatgccttgcggcaccagggactgccttcaaccaccaggctgttctcctttctgaaagggacaggtggctgggctcacaagggggacaggaagtgcagtaccttcccccatcccaggggaaaagtgttttttcccagggctgtgatctaagatcagctgtgggaaattggtcctaaccaggaagggtggcagccccaaagatgtcttattagagcgagccagggtgtctgcgggggtcagcagggtctaatggggcagggagtgctcagagaggagaccacctcccagggctgccctaggcgaggcctcctccctgccttcagccagtccccgccaccccacaccccacagaagggaatgaggcttcttgtggaccatgcgagaccagccctgctccgaggctttgggtgcccccaacccctgcccacctgtgagagtcaccccccggagtgggttggagtttctctgagtgtggtgtgtatgagtttgactttggcgatgtcaggataatttggtctgttttcaacacattctggaaagcaccctgagcatctgaaggatggaaggattgggctttaaatcaagttttttcagtccccattggttatcttaaggggcgtttgactttaacttgattttctttttcccctgtaagtccctgacccagaactgtgatctattttcttttgtgttttcagctgttgagcatgttgggcagcacggagtgtagctacaactgtgtgaccccacctgtgtgactgactccacctgtgtgactccagtcgtgtgaccaactacaactgtgtaactgactccaattgtgtgactaactccacctgtgtgactctgcgtgactccaactgtgactccatctgtatgactccaattgtgtgacccccacctgtgtgactctgactgtgtgacccccacctgcgtgactctgactgtgtgacccccacctgcgtgactctgactgtgtgacccccacctgcgtgactccgactgtgtgacccccacctgtgtgactccaactgtggactgactctaactatgtgactgactccaactgtgtgactaactccacctgtatgactccaactatatgattgacttcaaccgtgtgaccccacctgtgtgactccaattgtatgactgactctaactgtgtgactccaactgtgactccatctgtatgactgacctcaactgtgtgaccccacctgtgtgactccaactgtgtactgactctgtgtgactgactccacctgtatgactccaactatatgactgacttcaaccgtgtgaccccacctgtgtgactccagttgtgtgactgatttcactgcgtggctaactccactgttgcctgactccagctgcgtgacttcagctgtgtgactccatgtatgtgaccctagctgtgtgactccaactttcagttgccacgaagacaaccagctgagtcaggagtgggcctccctttcaatgtttttagctaagcatctctgcgcaaagaaagaggcttccccacaggctcttaatttgggacaagttttcccttagtttgggaaaaatttcaatctacctaaattagccttttacattagaaatcgagaaatatgcacaaaaattcataaaagcctttttccaggttccaaggtttttgtagaaagcccaaagttcccctttccttcctgaaatgccagcaggaaggggttggagctcccgtgattagccagggagtcaggcttcctgaagtttacacaatacaaagcatattaagtgagaatgtagcagaaaaaagaacttatcccaatgattatagcaatttaaattctcttgaacccaagctctcaaggcctacctgttttatagcctcaagggactctactcctatcccagactataatgaattgtgtctcctggagttgtgcagtacgcaacctgtgaagctgtacacgacagccctataaattctctagcagacagccctcctagattctagttcccacttcacagctgaactgcatttaatctctgtaggactgttttcctgtctgtaaacctgggaaaactgcctcatctctatgttgcctagttctcaggaggtccacatgggccatgcacatggtagccatgaagagtgtggagtgctcctccaacaccaggcgggctggccacaggcagtttcttagagtgtggcctggggacgctgccaccactgagaagctctgctgtctctcctctgtccctgggagggctggagggaggagggtgctgagtgagagggacctggcctgcagagggctgaggacgaggtgtgagctggaaggccaggctgtgtggcctcggggtgtggactcctggtggggggctcctctgcacaggctagcagagggctggtttcatgggcagtcacttcagaaggaggattccctggaggggagtttgaacccttagtcttttgggatgcagtgttctctagcaagtcttgaagcgaactggcctttgtcggtcttagattaatttaattcctgtgcccagtggtgggatattaccaagagagttgacacccagctccctgagggggaagctctgagatgatgcagcatttgccagtttccaaggtgtaaattcacgggccagggctgatttcaggttcccagcgtggagctgaggaaggatctgcaccaggggtgctcactgcgggtgttcactgctgtggccgccgctgcctacacctccctcatgttctgcagaagggaggcgggagaaggccctgagaccatgccgcatgggcacacagtgcttagggttctgaacctgcgggtggcgggggaggctcaagggtcatctggccgaagcttcccccttcacaggtgggaaagcctagacatctttagtcctttgtttggagctttaagtctgagggtgtctgtgtgagcagagggacagataggatggctggagggaccccagggttgggattggcacagaccaggctgggaaggtgaactcagagctgagacaacacaaggaaatgccagcccagagccttgtgggaggcctggggtggtcccggtaaacggggccttgggtctgcaagccacgtatcatgactccaacagccagctttcctggcctgataacaaattgcctaggacctgccactggctcttgcctccctccacctcactctggcagctccctctgacccatgcatggctttgctttggccagagccctggaaccaaagccctttacctggaggggacattgagactattggcgcatcctcctgggaggcccagagagggtaagagccttgcctgaggccacacaggccactggaggtgtgcagagcctggagccccactcttctgagttttgtttttccacttgctatgagatccttgatggtttcagggccctggtctctccctcagctgaggactgccaagaaccccgcaagcctagttagcttcttggctgtcagagaattgatcctgcctcacaaaagcaaatcctgtgctctaggtgagcatcgggaggggcctcacacacctggggcaggtggggaccagtggcttgtaccacactgacggtggcccgggagtcagcgaccccccacagcctggtgctaggctcaagccaggacactttccttaaaacccatagtacaggccaggcatggtggctcatacctgtaatcctagcacctcagggggccgaggcaggaggatcacttgagcctagaagttcaagaccagcctgggctatgtagcaagactatgtctctacatagtgatggtatctacagcaccatgccaggagcggtggtgcacgcctgtagtcccagctacttgggaggctgacatgggaggatcgctggaacccagaaaggggaagttgcagtgtactgagatcaagtcactgcactccagcctgggtgacagtgcaagaacctgtctctaaatttaaaaaaaaaaaaaaaagcaaacaaacaaaaaacccatggtatacagagaacacagtcaggcagtcaggctgtcaatgagattaggcaggacacagtgaggctgggattgaaggaggaggaagccatcagtgctgggtcaggtaggcagggcggggccttcccggagaggcagcgctccacacagcggtcctgaggtttgggtaaggctcttccacagaggcctctgtggttacacccgtcccaccaactgtctgggacacacaggcaggggcagttctaaggaaaagtgtccaggtccttggcttttttctatcatggagcacctgtgatggaggacagggttcttattcccctctgaggtctccctgcttccatgttagggtagagggtaggcccttctctcttctggaagctcaccgtgtgccgtgctccaggaagtaactccccctaggattccagacaaagggacagttcaaaagcttgtcaacagcattgcaataaggtcaggactaggtagcaatctgtttgcaagtcaggtgatgtccaattgtttgcttcccccataacggaaggagaatttaattggggtatcagctgacacattagtaaccattttatcagcaggttattgtcatttcttagcgctaactcagaaggactttgaagaatcgagtgacatttctacaatgaagccctttccattcccatctatttattaatgtgaacaggatcttttagtgtttgcgtctacaaaaatgaaaactagaattagaattggtgcagaacctactttcattccttcaataaatatttattcatctcattaagagatgcctttccaacacattatgactttttgtatcaaatgattatttgtcggccaggcacggtggctcatgcctgtaatcccagcactttgggaggccaaggtgggcggaccactagaggtcaggagttctagaccagcccagtcaacatggtgaaaccccatctctactaaaaatacaaaaattagctgggcatgggggctcatgcctgtaatcccggctactcaagaggctgaggcagtaaacctgaaaggcgaaagttgaacccgggagacagaggttgcagtgagcccagattgcgccactgcactctagcctgggcgacagagcaagactgtcacctcccagagaccccacctcctaaaaccatcgccttgggtgttcatacttcagcatattaatttgggggtgcacacattcagccaatagcaggtacactggttgaccacactcttaaagaggacagccaaaaaaaattatttggcagtgttttatttacattgtattgtttacattgtttgaccagttaggtatcactggaacgataaaccagaacgctctctttttaaacacttggagttgaggaacacacggctgcaggggctgatggggtgatcagaacaggacgtagaagcaccagatatgctacattaggatggaattctgaagaggggggactggaaatatgagtgaaagttccatgtggtaagaaagagcatgctcctgcaatcctgtaaataatagatggcaatgagtatcacgttactgtgtagattccatgggatactgacaagaggctcccagagttttagttttacgtgtcaatatttagaatacactgcacaatatattatttacaggcatttcaactaccgatgaaaaccttcaatggcagttttaaaatgggcagggaacgctgtctgagtccagtgtgttgctgtgacaaagttccgtagtagacggggtggcttatcagcaacagacatttatttcgcgcagttctggaggctggaagtccgagaccagcggcccgcagattggccggctgtgaggacctgcttcttgctccatagatgctgccttttctctgcatctgacatggtgggagaggtgcaggagatctctgggcacaaaccccattcatgagggctccactgccataacccagtcacctcccaaatacccccaccacctcaaaccatcaccttgggtgttcgtacttcagcatattaacttgggggtgcacacattcagtcaatagcaggtacactggttgaccacactcttttaaagggtacagcaggccaggtgcagtggttcacacctgtaatcccagcactttgggaggctgaggcaggtgaatcacctgaggtcaggagttcgagaccagcctggccaacatggtaacaccccatctctaccaaaaatacaaaaaattagccggtataatcccagcaactcgggaggctgaggcaagagaattacttgaacccaggaggcggaggtagcagtgagctgagattgcaccactccactccagcctgggcaacaagagtgaaactccatctcaaaaaaaaatagccgggcgtggtggctcacgcctgtaatcccagcactttgggaggccgaagcaggcagatcacctgaggtcgggagtttgagaccagcctgacctacatggagaaatcccatctctactaaaaatataaaattagctgggcgtggtgacgcatgcttgtaatctcagttactccagagggtgaggcaggagaatcactagaacctgggaggcagaggttgcggtgagccgagatcacaccattgcactccagcttgggcaacaagagtaaaactctgtctcaaaaaataaataaataaataatacatgcatacatacatacatacgtacatacatacatacatacagggtacagcaaactaatccgattggaaactgccggactttggggctagatggagcatgggcttaaagtgaaacctacattttggctccaacacagactagctgtgtgcttgggcgggtgattcagcttccctgggggacagtcatgcgtgtgtgaaatggcagtggtagccctgagacagcagcatgggtaagcaggctggcgacgtcatctgcaaggaggtgtaattaggagcaccagctctggggccagacttggcttgagaaacttgcccaggcactgtagctagaaagtggatttggatcccagctccccgctctgtcaccttgggcaggctgcttaacctctctgtgcgtctgtttccctccctgtgagatggggctggtaagggcgccccttgcggtgggcgggaggatggagtccgcgcctgtacagctcccctgcctccactgcgctcaccagataccggctctcctcactcccctgtaccactcccgaccccctcctccctggacccaggagccccagtgctctgtggcaatgttaagagcctctcctggctgctacagtgctcctctccccagcctcccccaggccgtggtcctgcccaggaaatgcacctgggactgttgccaggcactcaggccccccacacggaggctgttgaggaagtggtgctagaaatcagctcatgactctcacggagtgatgtcatgcaaaattttccatagctctggcagccacaggggccatcctcctgcctctccgagggcacttctgctgaactgtgcttttccctgcactgtgtcagaagaggcaggtgggtgccgggagcgctctgtggccaaggctctgatcacaagctgccaaccccggaaccccacctatcctacttgagaagctgaactctgacccctgtccctgtccccagtgtgataacttcctttgttcttaggtggttttgaggtggtttcctgaggatgtgtctggggagatgtgatgggatcaaccccctgccctgctggcagccccaccccatggcatagcagcaggcccctgggagccctgagcgctcattaaaggaacgcactttaatgacagccacacgccaccctgccacaagcagcgctcttctccctatgaagtgtggtgaggaaattggggtgagagggtggtggaactggttgttttgggggtctcttcctggagtgtggagagatcagaaccatctccagaccatggctgtagacagcggcccttgatcattcacagaagatctcgctgggcggatccttcagacctcagcggggtgggaagagtgtccttgggactagagccctgccagaccccaaaggccggtttctacccgatgatctcttgggccccgtcccgagagtgaggcacggcgccaccaggcacccccgatacgcagcgtgttgtgaagtgcccttgtgagcagcgggggatagggaacagaaaaccagctgtcagcgacagcgaggtggtgccccagagagggctgcctcattcgcctggctgcagggtccgaggtcgtcttggtagcatttggcaggaatttatttaggaagcattcagcaaaccgagtgtgtgtggtgctgggagatgacgacgaaatggccctgcccccaaggaagcccctcccctgggggcacaggtggggagggaggtcatgagctttgtgtgtgtgacaactgctgatgggaatgctattggcacgtacgaggggtgcctgtccgtgtcttgggagagcaaggaaggcttcccggaggagttgctgccaagttggcccagaaggatgaggaggagttcttctggtgaagtggggagggcagaggcaggatggtccctacggagcatgtggggacgctcgtgttcttccagaggatggaatgctgggcccgaagcctgaagtattgttagggtagagacaggcgggaggtgcgtggagaaggggtcatggaggtcttgttgggcagatggcggtgggacgtcccaggcagggggagcatcttgggcaagagcccagggtgcgaggtcatgcttatggcacattggaccagctggaggacagccagctcaggagagcagccggctggggtgtctgcccacgtgtggggcagggatgggctgcagcggggagggatttgggagcttctgtcgtagtcctgcagggagtgggagctgtgcaagaaggaagggcggagcggctgtgatccaatgactttgggaaggccactcctgtgatggagtgggggaagacagaccccaggccaggggtcctgagtcaaggcagtggctgaggaggcactggggaaggtgatttggagaggctttgggggtaggtcctgggggtctggaagggctctaggccaggaattttcagactcctgggggcatcagaatcacctggagggcttgttaaagcaaagcttgcccccagcctcaggcagctgggcggcaggaatctgcatgtctaacaggctcccaggggatgctgacttgctggccagggtcccacactttgagaagccccgcctgaagcttacaggacagggcaggttcttgagccattgagttgggcaatgccatgggaagttgcaggtgcacagacgttgccttcctggctgcggttgaacctgggctccatttgtccccttggagctccaggcggccgggccgacttcgaccctgagctctcctgtctgatttcctttccaggtggcacgtctctgagcttcctggtgttggtgacaggctgcacatctgtgggcagaattccagatgctgaaatctacaaaatcactgccactgacttttaccctcttcaggaagaggccaaggaggaggaacgcctcatagctttgaagaaaatcctcagctcgggggtgttctatttctcatggccaaacgatgggtctcgctttgacctgactgtccgcacgcagaagcagggggatgacagctctgaatgggggaactccttcttctggtgaggccctgggtcccctgcagagggtgggccctgggtctcctgcagagggtgggccctggttggcatctgaggccttgacctccacttgcaccacccccgggttatggggcacctctggagagttaggacccaggcctgctctcagcacaatgagaggaaaactaaccctgaactccctgccaccccccacccctggcccctggaatgtgttcagtgtagatttggaaaagaaacctgcgccaggcatggtgcctcatgcctgtaatcccagcactttgggaggctgaggcaggtggatcacttgagttaaggagtttgagacaagcctggccaacatggtgaaagcccatctctactaaaaatacaaaaaaaaaaaaaaaaaaaaattagctgggcgtggtggcaggtgcctgtaatcccagctactcgggaggctgaggcaggagaatcgcttaaacccaggaaacggaggttgctgtgagccaagatggtgctactacactccaccctgggtgacagagcaagactctgtctcaaagaaaaagaaagaaagaaaagaaaccctgttccataagtaaaaaacataagagccgacgtctgctgagtgcttcctcagtcccgggtgccgagctcagtgcttctgcctggattcactctttcagtcttctcaatcatggttacctccagtgtgcagccgtttaccgctgatgtttataaagcactgtgttcgggtcaccgtgctaagatctctctgctggtaataactcatcattattataaaaacctttataataattatgcggaggctctgttaccccattttacaggtagagagactgaggcacgaatagtcgagggaattttgccaaactccacacacttactaagtggcagagccaggatttgaacccaggctttctgggtccaggtcccaagctggtaatcacagtgctaaaccagtcccatcaatggggaagctgagtcaccctgcccaaagggacttgtagcaatgcactaagactagtcccggagcccaggcagaggcggctggatttctgtatgtttaagatctcctggtgctttttcactccacagcaggacagagacaagagtggacaaccctgtaaatacataaattatctattgccctttctggacataatgctgtttctgtcagattcgcactgatgcctagagatgccaggtagaagcaaaagtgaggaaagtcctgccatgggagtcgttccaatgaacctcatctaatgtaatgttttagaatccagtgtctgccttttgaagctatatcagttttcccagctctgagacgggactcgtgaggtttatttctgacctgtttgtgcctctctccctttgccagaggcagccacaggttttcatctggccttggtgctttggattccccagaagtgaattcctgatttctgccggaagaaggggaccctccccacatccctgtgtccatcccaacgctccccacccccacatcctctttggttctctggtattgtggatatttgggggcagtaatgtgcccagacttcaaaatgcacgtgaatcaaggctgggcatggtagctcacgcctgcaatcccagcactttgggaggccaaggcaggcggatcacctgaggtcagcagtttgagaccagcctggccaacatggtgaaaccctgtctctactaaagatacaaagaaaattagccaggtgtggtggcgcacacctgtaatcccagctacatgggaggctgaggcagaagaatcgtttgaacccaggaggctgagattgcagtgagccgagatcgcaccattgcactccagcctgggctacagggtgagactctgtctcaaaataaataaataaaataaaataaataaaatcgtgaatctcatgctgatctcattaaaaatgcagattctgggatggcaggtctgggctgggcccaggattctgcatttctaataagctgccagtgctgcttgtctgcagacggcaggttgagtagcagcctctggggatggcatttctgtgaatcgctggttacattttgcagggcccagcatgtgccccgcgagctgttacatgttcccctaaaggcagccaagcttaagcacagaggggctgtgtattatgaggtatctttgtgtggagtccgtgaaactattttaaaccagaactgtcaggggagcagaggtgagagctctcagcggcagtgagggtccttggaacccctaggggatccttggggtatctgaattgcaccagcacctttgcaagttctcttccctatgccagctctgtggctggaggtgtgaggggcactaacaaagcgaggcaaaggggattcacgaggtggaggctgagaggagctttggaaggaggagccccatggtgtccctttctgaagggagaggaggaagtaactctggaggtcgccaggctcctcagctgtaacacgccagggcgtggtgtttaggctcagggtggagcccccagaactgaccacaactgagtcaccacgggcagtgtggttctgggcttgatcgcctgaacccccactgttgtggcgcagcgtgaggtctggagacccacagcaggagtcagatggggtcaacgctcagcgtggctggcacataaggcagagtgagcagcagggtgaagtcatctttctgggctggtaattgatcacactgacaattgcctcccagtacaatcaggtcctgggaggaaactctttgggggtcctggatatgagtcatcctcctgccagagggccaggcagtgtcactagaaacagggctgatttaagggttgtccacttggcaaaaggtttcttctcctgagccctggtgatagtggccatagctgtgtagctggcagactctgaaatattctggaggctttgccttgatgccacatgcagatttcatatatgtgtttcggaagctggcttatcatctgaatttgagagagtgatttggaagagggacatgtgtttttgtacagcaatgcttcagcagcatttttcaagcagaggagcgctgtggctgtgcgacctcagatggggtcagacgcgggctgtgctccctgtgggggtgcatgtgactgtgcgacctcagacggggtcagacgcgggctgtgctccctgtgggggtgcatgtggctttggtcacagtcggggaggctggcctgagagcaggaagcttggagaagccccctgggacccatcagagctcacagcacagatttccagcaatgagaaaatgctgctgctgtctttgaggaaggctcaagggcaggaattgtgttgccttttttaaacaagtagggcactgtgatctagattcactcagtgccctgtaagagggcatctcctgatgatgggtcctcctccctgagagtgagtatgggccctcaggatggtaccactcaggtcccctgggtgctaaagcaagggggccaggccagctcagggatgagagaactacgtggtcgttcgcaggtgcacatggaaacgtagggcctcatgaagaaaggctcggcgtgaagagcgcgggctccaagctccatgacgccactggctggctctgtggcattagacaagcacttcacttctctgtgcctcagctgctttatctgtgaaagggggtcactgatgatacctttcacatagggtcacttcaagggtgaaatgagttaatccaccccaaagtacttagaatggggcttagtgcacaggataaatgttggctgtcaccctgtcgttatcatcatggactctagagcctacagcaatccactaggcatggagagggaatacttgaactttcattacattttattttcctcggatctttttaaaatttattttggattgctttgtagcgctctcgtcataatcatctcatggtgcatgtgtgtgtatatgtggataatttaaataactgttcccatatttaatatgatttttaatcacttattgatcatgattgtttaataataaaagatgattaattttttaccaatggggcctgcgatgaaaactgtggggcccacagggctaaccagaggcccctttgcgattccccgaaaagtgcacgctggctcactctccagctttgcttccatttagcgacagtgacgacctggtagtggctttgggaaaggactccctggccatcctcctctacgtgacacagtggtcctgctatttgggatctctttgaagcacatgaacttcccagatctgtacagcccaagtgcagagtccactggggagcagcatgcattcgctgacccgaaatgctgcaccgtgcgccccccagttcctcagccacactcgctgtccaggcagcatgtattggaggatgtcaagtgactggaattggtgtgggactgtgttttgcaggaaccagctgttgcacgtgcccttgaggcagcaccaggtgagctgctgtgactggctgctgaagatcatctgcggggtggtcaccatccgcaccgtgtatgcctcccacaagcaggccaaggcctgcctcgtctctcgcgttagctgtgagcgcacaggcactcgcttccacacccgtggcgtgaacgacgacggccatgtgtccaacttcgtggagacagagcaggtgagtgcccaggcccatctgtggcaccaaatggttccgagtggctgcagctcttgcacacgcgctttccacttggggcagaagaggccctggcatatttgtggtggtctctgatcaggcttcctcctataagtggagaacagcacgtgtaattgggctccacatgaaaatgtgacctctggtttgcatggtgtatcctttctgattcacatctcatgcagggaaaatgctgcttagccgaggtatttttaactaaacggaatcaggaatttttgccttggtcgtgaaaggtgggcagtattccaagggcagctgacagatgaacaaatagggtttgaaaatccttttaggacaaaaataagtagatcaatacaatggggggatgaaagaagaaaccattattttttattctaaatcaactgaagcttctcctggaagccagtattagcaccctagagttgtgaaatctgcgtgttaagcagccgctcccatccgttcccctagaatatagccatctgcttaatttctcctggagttttttctaaattctgttctcatttccagagatgctgtcttacaacttttaaatttttgctctaacttgcaatctgtaagataaggccaccatgtggaatacagtggtgtaagccataagaaaggaaaaccccggaaggcacatgtatggtactcctgccagggcaagctgggtgccctgtgtttactgagtgaaggcgtggctgtgcgtcccccctcgctgccgctgctgggagaggaatgccttatgcggactttggccactttaatccagcagaggtttgagcacctacctttactgtgtgggactttctgcctgctccagtgttcagagggtagatacagagatgaggaggctgctctcagagtccccactcagaggaacatcagagcagggggccctaagatgggcaacagctgcaattacttgcctgtaattctgctcagaatgtctgcactgtggatatcaacgaggctattatgtaaatatctggttaaaaatgagattgcttttggcatcttcgtcatgaagtctttgactgttcctatgtctagaatggtattgcctaggttgtcttccagggtttttatagttttgcgttttacattcaagtctttaacccatcttgagttgatttttgtatatggtgtaaggaaggggtccagtttcagtcttctgcatatggctagccagttatcccagcaccgtttattgaatagagaatccttttcccattgcttgtttttgtcaggttggtcaaagatcacatggttgtaggtgtacggccttatttctgggttgtctattctgtttcattggtctacgtatctgtttttgtaccagtgccatgctgctttggttactatagccctgtagtatagtttgaattcaggtagtgtgatgcctccagctttgttctttttgcttaggattgccttggctattcgggctcttttttggttccatatgaattttaaaatagttttttctagttctatgaagaatgtcaatggtagtttaataggaatagctttgaatccataaattgctttgggcattatgtccattttaatgatattgattcttcttatccatgaggatggaatgtttttccatttgtgtcatctccaatttctttgagcagtgttttgtaattctcattgtagagatctttcacctccctcataaactgtattgctaggtattttattcttctcacagcagttgtgaatgggattgtgttcctgatttggctctctgcttgactgttgttggtgtattgattttgtattctgagactttgccgaagctgtttatcaggttaaggagattttgggctgagactgtggtgttttctagatatagaatcatgttgattgcaaacagggatagtttgattcctctcttcctattgggatgccctttatttctttctcttgcctgattgccctggtcaaaacttctaatactattaatatgttaaataggagtgatgagagagggcatccttgtcctgtgctggttttcagcttttgcccattcagtatggtgttggctgtgggtttgtcataaatggctcttattagtttgaggattgtggatctaaccaaactaaagagcttctgcacagctgaagaaactatcaacagagtgaacagacaacctacagaatgggagaaaatttttgcaaactatgcatctgacaaaggtctaacacccagcatctataaggaacttaaacaaatttccaagaaaaaaaaaaaaaacattaaaaactgggcaaaggacataaacagacacttttcaaaagaaggcatacatgcggccagcaatcatggaaaaaagcttaacatcactgatcattagagaaatgagaatcaaagccacaatgagctaccccctcacacaagtcaaatggctattatttgacttgcgtgaatattatttgacttgtgtgaaatgagatacctcctcacacaataatggctattgttaaaaagtcgaaaaataacagatgctggcaagattgcagagaaaaaggaacgctcatacgctgttggtgggagtgtaaattagttccaccattgtggagaacaatgtggtgattcctcagagacctactcacaatagcaaagacatggaatcaacctgaatgtccatcagtggtagactggataaagaaaatgtggtttgtatacagcatggaatagtatgcagtcatgaaaaggaatgagatcgtgtcctttccagcaacacggatgcagctggaggccattaccctaagcagactaaggcaggagcagaaaaccaaacactgcatgttcttacttacaagtgggagctaaatgatgagaacacatggatacaaagaggggaacaacacacactggggcctatcagagggtggaggatggagggtaggaggagggagaggatcaggaaaaataactagtgggtgctgctaggcttaatactgggtgacaaaataacctgtacaacaaacccacataacatgcgtttacctatgtaacaaacctgcacaagtacccctgaacttaaaataaaagttaaattttgaaaaattttaaaaaggggacagagagagaagctgtggccccagctgggtggttttctcttttctggctgatgtctgcatggggagagtcccttccctgccccacttcattaccacttgccttttattttgaacttttatttaaaatactggttttggatttcaaccagaattttaagacttggggtctcatctattgcatctcatcgagtaagtccctgggaaccactgtcctttagcggcactgtccttcctaaaacaccggacattctaacacggaaaatgaaagcaaaccgcatgcatttcctaggactgcccataataaagtaccccaaactgggtggccgaaaacaacacacttattctctcccagttctggagactggaagtctgcaatccaggtgtcggcaggactgctgtctcttcgaagtccccctggggagaacccttctgagcccacctgaccgccccggctcttggtggcctctggcaagcatctctccatcatctctgcctccgttttcgtgtggccttctctgcctgtgtctctccaggactccagtcgtactggatcagggacccaccctactccagttgtcctcatctttttttttttttttttttttttggagacggagtctcgctctgtcacccaggctggagttcagtggcacaatctcggctcactgcaagctctgcctcccgggttcacaccattctcctgcctcagcctcctgagtagctgggactacaggcgcccgccaccacgcccggctaattttttgtatttttagtagagacagggtttcaccgtgttagccaggatggtctcgatctcctgacctcgtgatctgcccgcctcggcctcccaaagtgctgagattacaggtgtgagccactgagcccggcccagttgtcctcatcttaacccattacttctgcaaagaccctatttccaaacaagttctaaagtactgggagttggtacttcaccatatggtttttggaagggacacagctcaccctgggccgcggatgctggctcctgttagaggactgtgctttacaggcagcgcctgtggccctgtgagaactctcgctgcaatctttgctttctcacttttacagaccaacaagccctaccacagaccaggctgggccttggctctggccacttcgtgtcgcgtgcctgctgactggcgcttgtctcctgtgttgccagcctgcttgttagagctcagaggcagggaccttgcccccacatctcctgaatctcccacctcgggcagcctggcaaggccatagagatatgaacagcctgcccttccagctcctggggtacagcccgatgctgttgacattgcctccacctcccttccttgtctgggctggggagggatttcttggctcccataagcctttgtgggcttcctagtgtgtgtgttttgtcctttttcgtcctctgggctctgggctagacagggctgctctccatgaagtccccacccaaccttactcccaggagcagcagtgattgacagacagctgggcaccaccacctgccgctcacccacagatgcagccgctgcggatgctgcccccgccccacctagagagcataacttaacccatggtgacttcgttaacaagagatgcgtagcggggccccaggaaggtggccctacacccacggtagctcttggttgggtgcctatgtttcaggctgtgctgatgagcctggaggtgcctgggctggcccatccatcggagaccccggacagcctggctacccaggaaggggagctgtcacttcccagcgctgagtccagggctgtccacgtgggccttcagcaaagcctgactgagcctgccaggtcccaggctctgctcccaggtgggtgggcatggggggcagtggtggtgtgatgggggcgcagcaggagtggggcaggtgaagctggtcctgccaggtgctgccgcccttccaggtggtacttccgataggtggtgttcggctggtgacccctgcctggaggtcgaggggaagcacagcagagccagggcagggagaagcgtgtgctgcgcgcagcccaggaaggaggggcatggagcagaaagaaacacaggtgaactggaagagcagagagggttcatgcttcctgcacacatgggaccagggcatgggcctggtggggggtcagcattcctccaagccaaaaaacacaggtgtgacagccctttttctaaaacattacagaggcagcaggagcagagatggctgcagggaagtgactgttccccaaaagcaagaaactcctgttgcctcacttgtataagccaagggaacccctcgctttctgtctctggagtcactgaatatttttgtttatgtcactttatagcagtactgatgcttaggttgatctaagttcgtttttaaaacacaaaacacgtctttaagtggaatgcacagttagtatgctcctgcgaagcggcagccccgctgccctccctggctctgcggccacctgctgaggatggttcttctaggatgagtcaggagagtggagcaaggctcagcctgcaggtccttgctgagctcagggaagcagccccgtgaggatcgggctgcgtggtctgcaggggaacctgcctgggaccctgtgagatttacctgtttcaggtgccagtgatctgctgggattctggagaggtccctcaggggagcctggcacttcctacccccttgagtttgcaaagtcacaactgagggcctgggttgggacggtgtcatgagctctccataagctttgcttatggtacaggagcagactgtctggcgcttctggagacctttaacgtgctcctgtagacagtcgggtaaactcattctggtagcacagcgtggcctccccctccacctgacatctgaggaagtggcaggctctgcatctcggtggcctcgccccagggtgcagggagcaactttgaggaaattagtgctgagcctccagtaggaaggaggactgtgctggggaggcaggtgagccccttgtggtgccgcccgcaggtcacactggcctggggcccctgcagaggaaacaggatccaccagccaggcccgctgaccatttggaagtggagcgtgcacacaggcggctgtgcggtcatcgtctggcaaacaaatgatgggaccggaccaggagcagactggctccctgtggtggggactcttggcaggcggatcggcttcttaggaattaattctcaggaagccagaaaagggggaccctgtggcaccctctgcttttgctttggtttaacatgtttcctaggaggaataattaatcttctttctctgaggcaggctgtgtgtgtgtgtgcatgggttgtatgtgtacagtgtgtgcgtggtatgtgcatttatgtgttgtacatgtgtgtatgtgtcatgtgcattgtgcatttgtgtatacatgtgtgtggtgtgtgccttgtgtttgtttttcatgtgtatgtgtgcagtgtgtgcatttatgtgttgtatacacacatgtgtgggttgtgtatgtgttgtgtgtctgcacgcacagatgttgtgtacatgtgtagatagcatctcagcctccttgggaggaagccttgagtctttttggctctgctgagtcatagctggtgggcttgctctgcagtgctgactcaccacacagaaaaacaagaccaaaaagtcccctcagtctattaaaaaaaaaaaaggatgtaagataaatatttggctattcaagataaggccactgactcattcagggaggttaggatgactgcgtgtcctcccaggaatgcagacttggagataattggtttgcagacactgtatctggaagcagaaggtcagcagaaagcctttcagatagaaggtatatgtacccctgtgagttttcctgcctcgtcgctctctttttatggccattaggtttctgttcccactgctctggaagcgtcactcagggtcaccctctggctgctcagtctggggtctaggcactggcctggcctcatcacagcactggcacgggcctccgacttttcttcccgtggccccactgctcttcccggtctccctcccacctcttgtctgttccttcttgaatccctccttcttcccacgacccaagctctctccgacgccagcaggtgcccgcatgcatagtcatagcgtcagggcctctggggaagagaaaacagcttcgttttttgagtggctactctgtgctgggactatgcccccctcatttacccctcacagctcatcccttctccgtgcacaaggtgacatgaacttcatgtagagagagggaaactgaggctgaagatggctaagtaatgtgcccagggccaccctgctgggcaaatgggggtttgcaaagtggcagtcggacccagcttgtgctaataccagagcccactttctctcctgcttccactctctgtcctgcctccccaccccaagagccctctgtcaaaatgacatctgtgaggtgagacatcacttcttccactggtattaaaagttgttcgcccagaatggaaatgtatcacttgcatttgatggtcaagttatgcctactgccttgggaacaaagaagacagtcttgatgataggacggggtgcagatgtcacctacttcccctgtggaggacggggtggagaactttggagctcctttcttcttgctccagtgtgggcagggaggggcatacagagcactgacagccctcagtgttttcagaagctggttctgggcaagtctcagcttgggaggagcctgatgtgatgctggaagtggcattgttagcacttggggcagtcagagtgaagggagacattcctcagcctaaatagatcgtgggcattggtttttgttgttgtttggtgttttttggatttcactctgttgccccagctggagtgtcgtggtgcaatcatagctcactgcagcctcatcctcctgggctcaggtgatcttcttgcctcagcctcccgaatagctgggactacaggcatacgccaccatacccggctaactttttaaaaattgttttggtagagatgggggtctcactttattacccaggctggtctcgaacttttgggctcaagcccgcctcccaccttggcctcccaaagtggtgggaccgtaggcgtgagtcactgcgcccagcctggatattgttaaacattgtctttatatacaaatgttggtttcttttccaggaacctgggcctatgcagggcacacacgccggtcagttgtatgtacctaatttcacggtagccaactatgtctgtagccgttcaagcaacctgctattttattctgttttgtcagtagaagaatggagttcaacagctttgctggtactcaatacctggaaacagacagcatgttcttaacacatgcttttttcctttggagattaagggatagtattccagtttgacaatgtagataccaggctcctgtaattcctgtggcccagggaaacagtggctctaattttcaggtcctccactgcagaatgactcattcctgtgtgatctgagcgtgatctcgcctgcatgggaagctgccctgtaagggagcaggccggtgaggaacggaaaggaccacagcagcgcccaggccgccctgccaggccaggctagagttgcgcagataaaggccccgcatctgataagtgtcgccgcctgcccctgctggcgctcaggatcgtacttcttgtccttttaaaactcccttgcactccagcgtcattggaggcctgcaggcacactctgaaatagctgtacgtgtgggtggggaggagatagatgtcttaaagtgtacggatcatttgtttctctgcaggtgctgtcacactggaagcttgtggaaaccgtgttgtgtgtgttaactgagtggtgtgtttaagaacacagtggggcagggccaggaccaagtacaagatcaggttgagtcttgcattgtcaagtacgagactggctagcacagtcagtgaggtcttttggctatcactggtgcattttatttcattcagtccttttctcatagctctcttctgcttagctatttgccaaggcaaaaatagagggctctaaggaaggttacattccagagcacactgacttctattcatacagggggtggcggaaggctgttcctgggattttcagggtgacgataaggttgtgccctagaagtgtgaattcccggagaccctgggaggccccaacccccagcagaccccctcctcagaggctggtcgacagccagcatgcccgcccagtacctggcgagaggtcagggcgcattgccggatgggggagcagaggacgccggagtccaccgtccgcccttcattctggctggtgtcgggtcacaggtggccggatcccgttacccagcccaggacgttcggtttcattgaagaatacctttccctttctgtttccttgtgccgcagatgatttacatggacgatggagtgtcatcttttgtccagatcagaggctccgttccgctgttctgggaacagccagggcttcaggtaggtcatgaaaaaacttaaatgtccccttgtgatgttgtccgccctgcccttcccttcaatagctggggaagatttcttttaacacgttcgtttcatggcatagtttccagtctttttcctcagccctgttgtgttgagctgagctatcaaagtgtgcacacgtgtgtgcatatgcatgcgtgcgtgtgtgtagaaaacacagacaccactttgttgtttctggtcgtcaaggatgctgtgtgaaaccgctgactcgggaacggtgctgcggtgcctgctgagtgggtgccgcgaagtgagcttgggtagcactgcctgaggttagaccctgagttcggtgtactgaggacgtttctgagagccgtgactctcatggagggcttcaggaaggctctgtggctgcgtaggtctggcacccggtgctgcctgttgtggggccacgtgagacttccacagctttcccgtgatttctaaaaataccccttgccgtccaaagcagggctctggtcagtgccagagagatttggcattctttctcctgggaagagcacagggtggggacacattccaagaacacatttgtcatcaatggaatgacacgctgcctccttcaccagggtctctaacaaggtgggttatgggccgagtggactggaggggcctccccactaatccccagtcttcctccctgtcccgaggggacgtgggtgccttcagaaagcctctcggccagggcctttgtcgcctctcggctcttcttaccgacagctctcgtgtgactgcatttgggttgccagccagtggctactggggcccagagtgccatctgccaggttccagggggtgtttgacaacgctggactcagggtccccagtcctgggttcagcttcttagcctgctctttgacttgaccctgtgccaggagcaggtgagtcacttgtccccatggctgtcagcacgctgcagtgacagcattggtgaagtactgggtcagcctgggcagtgagatggatgaatggaggtctcgtttaggctccacgctctggtagggagaaaagtcttgattaacattcagtctttccactagaaagagcgcaccacactgcacgagataactgacggcctccggagaaacgctcctgaggacagctgtgacacagaaactcctccggagggctgcccaaaggaggtttttggaaaaatagctttattgcaatataacttacacacccatttaaagcctacaacttggtgcttttactgcatttatggtgttgtgtaaccaccactgtaatctaatcttagaacactttgatcaccactaacaaactttgtccccgttagtggtctctcccatcccctccaagtctccctcatgccaactcgactgttcatctactgtctttatctatagatttcccattccagacgttccaaaagagtttttgaaacctgattttctttaaatatggagttttcctttggaaacttctcgagctctgtattcaggagaatgaaagaattgatcgaatgagtgtggcacaaaaaggagacagggagaccatgttgtgtttcatgtaaagtttgtaagaaatccaaaaattaggggaatggtcatgatggattcttagaatttgggaaggaccctttggaattcatccattccaccctctgactctcagttcaggggtcctccttttttttttttttttttttttttttgagatggagtctcactctgttgcccaggctggagtgcagtggtgcaatctcggctcactgcaacatctgccccccgagttcaagccgttcccctgcctcagcctccagagtagctgggactacaggtgcccactaccacacccagctaattttgttgtatttttagtagagatggagtttcaccatgttagccaggctggtcttgaactcctgacttcaggtgatccacccgcctcagcctcccaaagtgctgggattacaggcgtgagccaccgcacctagccaggccagttcagggatcctcttccaggacctccaaagggctgtcctccaggccacaactggggatggttccgactcttggtgaattcctcctgtattgcactgctgcgtctgtctgactctagagtgttttggggtgcgcgggaatatgtctgattcttctccgtgtgactcaccctcagtccttggagggagtcttctggttccctcttcttcttcttgtcttctctaaggcctcccaactcctttggccaccttccctcctgtttctaagactctcaatgttctcatctccctcatctaaaaaatgacactcctttttgtcgttcccctcttggatttcattttggtcttaccttgaccttcgtgctgcctcagatgtagcctgacccgccatgggatgactgtgccttggtctgtcaggggccaggagcagtggaccacgaggtctcagctttttggcagctgtttcaccctcttaaattcctaacatttgtgctgcaccaaagcctccatggtttcttctttttgtttcttgttttgttttgtttttgagacgaagtcttgctctgtcacccaggctggagtgcaatggcacgacctcggctcactgcaacctccacttcctgggttcaagagattctcctgcctcagcctcacaagtagctggggttacaggcacccaccaccatgcctggctaattttttttgtatttttagtagagacagggtttcatcacgttgaccaggctggttttgaacttctgacctcaagtgatctgcccgcttcggcctcccaaagtgctaggattacaggcgtgagccatcgcgcccggcctccatggtttcttcaaaacaagcttcagaaggctttagtgttccttaatcttattaaggatttgctaacctttgggcctaatacctgtgtttagcctctaaacaccactcatcatcaaagagagatgaagtcatcttcacagggggccgggagggcagcgggaagtggtggtctaccgtcaccggcttcaactgtcactatcaagcctaaggctgcttctagttatttttctccactttgaactttttctcttccttcttcacttaggttagatgaaaagtgcaaagattttggggtgagtagcttgcgtattaagctgcaatgctgtccctccttgacagctgccgttggaaacccaggagcccagcaggatggggcagggttgagcagagggtggtggatgaggatttgtctgcatgttttcctgggtaatggtaccttcagtacttcctgactccatttctagcagccgtgtacctttaataaatttcatttttacgtgtaaatgggctgtgcagtttataaatagccacattgaaattttacccttaaagcaaattgctccctggtctagctagttcgagaatctatttatgatctgtgtctgtggttgacaacgttgctcccctggtcattgtagaagcttccccccaccatatgctgtatagacacgtgccttgccaaggtgagttcagtctgtcttttgaagtttcctgcaactgaaccaaacggaggaggatgccgagtagagcagacccctcttgccctgccttcacctctttcctgccagaaaccattcgccaagtttgtggagtcgtggcgctggatgggcttgtgtgtttgtaccttccttttttccaaaaaggacatgagatggcttgtagtataacagtttcaaaaataagtgaagaggtctggatgaagggcaagagtcgaattggtgcccacgatgcatgccgtgggtcttgtgtgcgtgggaaggaacctgacgcttgttccaagcttccccgcagccaccacagaaagaaccacagtcacagccagtttatgacagtgactcagagcacgagctttgaagcgacgcagacctgggctcaaattcaaactctggctcccctgctttgtaaccatgtgtgtttgagaggctcttatctgtgccaagccttagtttacttttctgtaaaatggggctaacaatatctaccttatagggttctagagaggattaaagagcgtaatataagaatttggctgggcatgggggctcatgcctgtaattccagcaatttgggaggccaaggtggacagatcacttgaggtcaggagtttaagacaagcctggccaacatggtgaaatcccatccccactaaaaatgcaaaaattagctaggcatggtgtcaggttcctgtaatcccagttattcaggaggctgaggcaggagaatcacttgaacctgggaggcggagtttgcagtgagccaagattgtgccaccacactctagcctggtcaacagagtgcgactctgtcaaaaaaaaaaaaaaaaaaaaaaaaaaaaaaacacacagtatctagaatctaaaaagtactcaaaatggcagctgctattgatactaatagaaacaaatgataacacccaggagataaaaccaatggtggcatccggagaagcatggctcttggtgccgtgagcactgaatgagagtttcctcctgtctttgtgggaacagggacaccgtgagatgtagtaacatgaagacagcttcctggtcagtcttatctctcatccctcatagactcatcgtaaatcagtaaccccagatgaagccatttattcatcccaaacattcactgagcgtctgccaggtgtagggggcaccagggatcagatacagtccctaccttcagggagcagggggcaggacagggcagtgttgtgtggacagagccgtgttggaggaagggagaggccccgggggcagctctcccaggctgagggtgtggggtgggctgcccaagggtccagactggggaggggtgaggaagaagcactcaggcaaggaaggcagcccttgcagagggaacaatgggtgcaggtgttgtaacccttgggttcacagtgatcagggagcatcactgggtagcttcttgaagtcctgggcatgaagggaatgggaggagagataggagaggtgagcagggctgggtcaagggcctgtggatgctacactgaggagtttgcatcccataccagcagctactcaagcagtactccccaaccttgctgcacagaagactctgctggggagcttgaaaaatcctgatacccaggttgataccatacacattaagtcacaatatctggggccgggagccaggcagctgtcctttttgaagacccatgggtgactccagcatgcagaaaagtatgggaaccactcggtgctgtgctggcaagccagttttattggggtcagactgggtgcagggagctttggtttgtagcatttgtccattgctgtggtgtaaattctcccatcgtggccactttcaacctacggctccacatcactgagctcagagttgggaccagctgggtgcaccgtcggcttgcaagcctgcaggagctggctccagcacacactggacactgctaaagggctgcaagaggtagagacacaattagacagaagtctaggcagtgttagtttggaggggaaagacaccagatgggaggccgttgagctgagatttttgggtaaccttaagtctggtaggagtggtggggtgcaggggagaggtgtggaggtgctgtctgcgatccttgggcctcttgagtgctgatcgagactctgctgtgacttccacagccaggagttctccagaccccgactatcctcatggctgtctacctaacctcagtctctggtctataggattgaactaatgactttaggggccagataagagtagctggccctttgcccagaggggaggaggacggggtggaggagaagggaagctacaaaatgcagtgacagtggtggaccctgccctcagctgcagctcgtgcctgtggcttctgacacccagtgacctcaggactaggtgacaccagagaaggtggatgctggtcagtgttggagcaggacagaggggaggaaggatatgaggcccaaggaacccagacaaaagggatgcacggggtgacggaggaagggtgagctccggagagaacatgaggcccagctcccctccacttttgcccaaggcctcactgtgttgcctttccacctgcctaaaagaagcagcttagggtcatgactcagggagaggcggttagacaagtccaataatacaacttgtttaggggatggagggacccagcctgaggccctgagcccagggaagcagctgtggcaagctgagcctggtcatggtgtccctgaggctctgcaggtatggacatgcctctgctggtatgcatgcagctctgcaggtggggacacggctctgcaggtggggacatggctctgcaggtatgcacgtggctctgcaggtggggacacggctctgcaggtgtcgacatgcctctgctggtatgcacgcagctctgcaggtggggacatggctctgcaggtatgcctgcggctctgcaggtatgcatgtggctctgcaggtatgcatgcagctctgcaggtggggacatgcctctaccagtatgcacgtggctctgcaggtgtgcacccggctctgcaggtatggacacagctctgcaggtgtggacagggctctgcaggtgtgcatgcagctctacaggtgtggatgcacctctgcaggtatgcacatggcccctggagctgtcttccctgctgtaccttctaccccttcatgggcatttgtaacctaagccaaaagggaacataacaagtccagaaataagtcaaaaccagaaccactcaaacttcagcgtgtgtgcataggaatctcctggagggcttgttaaaacacagattcctggccccacccctggagagtctggctcagcagatctggggtaggcccaggacttcgcatttctaacaagcacccagaggaggtccaacgaccacactttgagaatcactggtctagacttaacagatcccttctgcccattccctgctctggtcattcacccgggggtggtgctcccgactgacttcttagttctctgaggtagaaaggtttgttgtcagcagtgatactggactagccactgcaggggatattgaccatgcctgtgacagttgggcccagccctgtccacacggaatgcttgtctaagtccaggataaaagacaagcctgaggcctcagaaaagatgtgctgcagcccctgtccgggctgtgccttctgctgtgggcagctgattccagggcatgccgtctgcttgccacattccctgagtcctcactgatgtggttgaggggaccccatcaaaggcaggtgcctcatttcactctgctttgctgcctgttccctggactcaagggcatagtttctgtcaaattaatttgcgcttgtgcaggtttgttagaaactttgaagtgcttctgggtctttccatgggggttctggttaggtgtcatcacccaggccaggggattcagcgtctcccatccctttcccacctttccatgacacccaatggcatgttgactcggagggcgctcagtaactgaggaatggactgctgactgatagtgcagtttatatgttaacgggggagctatagagcctggggattggagcctgctaggtccagtcatctgtgcaacagtttctacctaattaaaagaagaggctttgggttatgactcagggagagacagttagacatgtccagtaatagaacttgtcacgacggagagccaggctcctcagccctggcctgccaagcttgtattctcttcttactgtgctcccatggggaatgatcctataaacagctgctgctcattgctgaagccaggggagacttcttgtgatgactgacagaccacacagagcaggtagcccctctcttgggttttagccctggtgacctctcatagggtggctgaggggtacacagacccgctgacttccctcagggtgcaggatggagcaggcctctcggtagtgcgaccatgaaagttttcaaattttctgagatttcctcagccaggtgttgatggccatggggataaaggacagaggtaacacaggcagcaaaaaaataaaaaaaaaccccacaggtttggggtgagcctttcttaggagctccattagccaacagccaagatacctcattttgcactcacttcacttgtgaccaaagtgtcttaggaccaaaagggatttgggactttgttgaactgtttatataaaaaaaacctggctgggcacaatggctcaagcctgtaatctcagtactttgagaggccgaggtgggtggatcacttgagcccgggagttcaagaccaacgtgggcagcatggcgaaaccccatctctacaaaaaatacaaaaaaaaaaaaaaatagccaggtgttgtagtgtacacttgtagtcccggcaacttgggaggctgaggtgggaggatcatttgaacctgggaggttgaggctgcagtgagccgtgattgcacctctgcactccagcctgggcaacagagtaagaccctgtctcaaagaaaaaaaaaagaagaagaagaataagaagaaaagaaaaggaaaccttctccaaggaatctctaaatctattgctgagaaaccagttctctagatgggtgcttttcttgagtctgagatggggcagttgtatcacctgcagtgttgagttatacaatgatacatgaagcatgataatagctgcatctcataacatagataaatctgctgacactacttttacaacactcaaacagaagcaaaactaaagagtgcatttttaactacttattcttgaaataatttcagacctacagaaaaaatttaagaacaagagggaactcccatatgtccttcacccagattcactaaattttaaccttttgccacacacgttattattttttgaaccgtttgaaagtaggttgcatatatcacattggtgttagtccatttgccttgctgtaaaggaatacctgaggctgggtaatttataaaggaaagaggtttatttggctcatggtaatgcaggctatacaggaagcatggtgccagcatctgcttctggggagggtctcaggaagcttacagtcatggtggaagaggaaggggagccagtgtgtcatatgacgagggagggagcaaggagagggaggttgcaggttcctttaaacaactagctctcctgtgaaccagcaagaactcattcattaccatggggttgtcaccaagctattaatgagggatctgtccatatgatccaaacacctcccaccaggccccacctccaacactggaggtcacgttttaacgtgagatttggaagggacacacatccaaaccatgtcagtgtctctttacttaagtgcaaaatatactctcctacatatagtataggtacacatttgggaaatttaacattgacaaagtacttcaatctcatctgcaggcaatattccaaattgatcacttgtctcagtgatgtcctttgaagcaccttttcccgccttgagtccagcatcacatactgcattttgtggtcatgtctctagtctttaatctgcatctgttcctcggctttctgtctttcaaaacattgatgtttttggagaatgcaagccttcttttccgttaagtcgagggtccctacatttacattttcctagtgtttcattataatcacattcagtgtatggatccctgaccagaatgctacctacatgatgctgtatccttctcagggtaccagatctggaggcacacggtgtccatctgccactcattagtgatgttaattttggtcacccagtcaaggtgctattcagtttctccacttacggttaatatgttttcccttccaactaatcagcaatctatgggagacactttgagaccatgctggtatcctgccttttactaaactttcccttaagatttatcatcaacagataatttttgctgaacaattatttactatgacagttgtaaaatgatgatttttaaatgatttcctccaaatttattacttggtattctactatagagccctctcttgttccccattcacccacctacacacccacccacctgcacactgattcacccatctgtcacccattaacccatccattcatccactcattcacccacccacctgcttatccactcatcgtccacctatctacccacccatccacctatccacctacttgtctacccaccatccacccatccctctatccagccagtcatccatccatccatccagtcatccacccatccagccatccagccatcaatccacccagccatccacccatccatgcacccacccatccacccacccactcacccacttacctatccatccatctttcatctacccattcacccacccatccatccatcctcacattcacctgtccatccatccacccacctatccatctactgatgcatccactgatccatccatccacccacccattctcttatccacctttctatccatccactgatccatccatccacccacccatccatccatccccattcacccatccatctatccattcagtcgcccatctattcacccatccatccatccccccattcatccatccacccattatccatccattcagccatccacccatccattcacccattcatctatccatccactcacccacccacctacccatccacccatctatccatccactcagctatccatccatccatccatccatccatccactcagctattcatccatccacccacccatccatccactcagctattcattcatccatccatccacccacctacccatccacccagctattcatccatccatccatccatccatctattcacccatctagttatcatcagtatagattcatgaatttctattttattcatcaggttaaaatccattactgtcctcatacagtttgatgttcagattgtcccagatttggccagcaaaagcccctttaagctgactccagcaacaatatgtattttaaatgtattttctaaaactaagttgagtattaaataaatagttctattaataataaggcaaatttgatcattaggatgactcagattttagggggaaattagtgtccctgaaggcataaaggagactgagaagcagtttctgtctccacagttggcttcactgacctctgtgctatcagagagcttaggatctgacatctgcctcatcatcttaccctggatctgctttctgtggaagaattgcagcagacatggtcatgttgcagttaggactgggcagcagcaaagccagactcgaggcacctagacctgagtttggagcactgttagctgaatccagagagctcagccttcctgagccctgaagagaccacagaggtggcctagtgggtgccacatgcagcctggctgggagtaagaaggagaatgggaaaaaccatggcctccttggtttgcagagaaggaagaatcactgttgttacttctctttgctttaggttggctcccatcatctgagactccacagaggcctggaagccaatgcccctgctttcgacaggtagggattgtctgacaccatccaagcctgtcattgtcatccttagacatcgtcctcccatcagacacaagggagagggtgcgacgggaaagggaggaccctgaaccctgaatctaaagctgctttccctttggtcctttatgcaagaagggagatgacaaaatgggatttttactttgttctcaggtttcctgaaggtaaattaatgaatgttcaggtagcactttataattattttatcttaccagtttcttgcaatgaggcttcatctctatgccctggttaataagggatcatctaaattatagggtatttgaagctgtttgttttttgttttaaaatagtatagaataaataagtatagaaaagtataaagtgaaaaataaaagtaccctaactcccagttaccactctcagagattttactattagtagttttttacatgtcattctagaaaacaattttggcattttatgtgtgtgtgtgtgtgtgtgtgtgtgtgtgtgtatttaaatacacaaattggatcataacacatttactgttttgcagcttgcttaagaaaagcagagctatttgtaatatgtatttgaaataataacttcttaaaagatttgcttatttaatctaaatactcaatattttaaaattgtcttagtgaatatagtaaaaattctcgaaagtaatgtgttaagtgtttgagtccttctacctgaagctttattgagactttaagtttgctttcatactcttgttaaacataacacttgtcatatgagcccagatgtgaccccctgattagtgtgtgacatgtaatgcgcttttctttaaagagatatttaatcaagtatagacaagaccattgccttttccaaagcattattagtatgtcctgagcattctacatgcggagttctttcagttgacattcatctatactaaattgtcttaggaaatagtgaacatgaaaccaaaaatgaaattctacctggctgagcttggtggctcagattttagggagtcgcctgggtgacagagcgagactccatctcaaaacaaaacaaacaaaaaacaaaaatattctacccgaagctgacccaaaacaagagggaagggtcatgctgggttcgcttcaggaaccctcctatgtttaggagctttcttaaaaaatacatacatctagttgaagcacatttgcatagactgcagatttttcagaatcctggtaatgcatggtgtgtgagatgcacgtaccacagagaatgagacctctctctcctcacaagcaccccagaggctgccttgccccttggaaagcattcctaaatctaggggtacacttagatctcttctgcaaatcacaggacaagctgctgaaagggtgagtctttctacaggcagctactgtgtccaggaagtctcttctgtaatgcttcttacccacgacactgggctggaggcaggagccctcccgttcccttgcaggtgctgctgctctcatgttcattgctgactatgttcccctcattcgagataacgtttggaaataaggtgacatgtctgcctagtggccgcagtggggcaccatgagggtccccctgaaagcaggctgcccaggtcctcgatggtgtccctggactggcatgtgcattgtcctgggtgcttcccaattctcttctctgggacatcactgcgctctcaagagtcgtgcggttctctgatggatttggttgagagtaaatcctttctttcccccgcaaaaccttcacacagatagtttttcttcccagaggatgcttgttttcctttgcctgagctgcatgggtgcccctgttagccgaggcggtctcttgtcactttgctgtatgtgctccatatctgaggagggctgtttgcagcaggactttggctgcagctgcttgagtggggtcttgtcatctctgtgtggtgatgagtctcggtggaagggctaacctttcacagggcggtgcctcagtctctcctcacaggacagtgaaccccttctccttccccgccccgctctgcgggcggctgctgtgcacatcagggtgtgctgaactcttggtccctccctgaagatgagaaggatgcttccaaatagaaatctgattcctcagtatcccgaaaaactcctgttttccaagtagcttcctatgacagtaacccgtaggcaggggaagtgaaaaaaaggcctcaatgctcagggtgacccaggaagaagcccgtatgatgccgaccttgctgctggtgccagcgtccccttacaccctgggtgccagcgctcccttacgccctgggtgccagcgtccccttacctgggtcggcagggcctctcagctcaccaataacgagcattttacaataaagggaaagaaagaggaaccacgtcccacacaccaagcactgtccttgtcactttcactcgtctttttagtcctcctcgccattctccgcaggaggggaagtagccctgctttatagatgaaggagccagctcagaagggatgaatcatttgatcaggggagtttggggttgggacagcatagagtaatgatgaggaatagtgagtaataatgagtaataacagtttccttctggccctgggctttggaaccagttgagaagaaggggcaggaatgagacaggaagagatcagaaatgggccttgtttccgatgagccacattgtgggatgtggcttggatgtgtggccacggtgggctccctcaccaggggcagagcctgcacgtgtcagagccaggcctgggatgcaccttctctgggcagaccgacccaaaagaaagcccacaagggctgaagccacacacagcccgccccagggctgcctggagctgcacgtggagacgggagcccgggagggtgctcacccttaacttaggccagggagtcagcaggcaagcctaacttcaaactacccacttcaaaatccatagtctttctactactgtcccttaaagttagtaagagaatgttttctcttactgcataagaaaaaaaatgatttttttcatgatcattattagctctttaaaaaattccgctcataaacgtgtcattacagaaatttggaaaagagaaagatgtttaaagaagaaaagaacttgaatcatataaaattctaccacttttgacatcatgtgtttttttccagtgttttttctatatttaggcataaagattgcaccattaaacgataatttgacatctgctttttgcattgtatcatttccctatgttttgtttaaggcactacatttcaacatgtttaaatttgaaatgtaaggttacttttaaaaagctggtgatcaagaataaatattggaatctctccctaatatttcaacatacatatttagaaagtagcttccaatacaaggaatgttttccaaagcctgcaagttttgttgtatctccttgttgtggtttagcataatgcaatatagcacttagattgaaaacaggatgctgagttgagagctctcctgccagttgttctagttttgagaagggtgggtaccaagcaaaataagagattcatttcacacatgtgcacattgcatgtgtaagactctagcccaggcacggtggcttatgcctgtaatcccaacactttgggacgctgaggtgggaagattgcttgaagccaggagttcgagaccagcctggacaacatagcaagaccctgtctctatgaaaaataaataagtaaaaattagccagatgtggtggcatgtacctgtagtccctattacttgagaggctgagttgggaggattgcttgagcccaggagtttgaggcagcagtgagctatgatcgtgccactgcactctagcctggacaacagactgagatcctgtctcaaaaacaaaattctcttgatgaaagttcaggttaggtgttctagatataatgggaggtgctttatagaaagtgcagcatatcctttgtctgattccaaacaaatgtagaagtctacgctagctagtagtaatggcagctgggaggtgcaggttctctccacccaggctcattttccacgatttgggtcatgggggacagctggtcctggactgtggcactaagaaagcatgactcctgccccgtcttcccttgaggggcagaacagggcagagtctgcacctgtgcccgtgcccagcatcacgcccaccccgctgcctttgcaggcacatggtgcttctgaaggagcagtacgggcagcaggtggtcgtgaaccttctgggaagcagaggcggagaggaggtgctcaacagagccttcaaggtaaggccaggctgtcctctccacagctgggctgggcggcaggtggccatggtggagcgttgagcctggaggtggctcctgcagggactggagctgacagcccagccctccttcgtttcctgaggcttccccagcattccgaccagtgaacacggcagtgctcagtgactcgggccctgatacagtgagtgtaatttcttttctttttttttttttttaagacagagtttggctcttgtcgctcaggctggagtgcagtggtgcaatctcagctcactgcaacctctgcctcccaggtacaagcgattctcctccctcagcctcccaagtagctgggattacaggcacttgccaccacgcctggctaatttttgtatttttagtagagacggggtttcaccatgttgttcaggttggtcaagaactcctgacctcaggtgatccacccgcctcggcctcccaaagtgctgggattgcaggcgtgagccaccgcgcccggcctagtgagtgtaatttctgtgagctgatggttgggagaatttgctcaaagtcaaaacagagcatctcctgtccccagccatgtgtcccttaccctccctccccatggggctttgagggcttctgacctctcaaggtacccctctcagtccagcccaggagcaggcaggcctccctttctgccctggctggtcctgggtgagttcccccagccccacagggcacccggcctcagggctcaggagcaggaacttcggtggctttcccctgcttgccggctggccttcaaatttccccctcttcctcgggctttcatggcagctcctggacctgctgctgctgggctcctgtgggctccttcagacttccttggggggcttttcctggcgatcctggacagatcctgggcagggtcacagagccatgggagcaagagactccgcccacctggccaggttccatccctgtgcatggatcccaggcctccagcccccgccccctgctccccaggcgcaagacgttccagaatgagccaagggggctcctggttcctttaccagcctccatgtcccctgcctaatagagaaaaactctctcgttgtttaaagctcaaagatatcccttacagagagagctcgaagtcgcctcactgggggttagggcgatctctgagcctttccctctgcttagaaatgccacatgctcatgctcagagcaggcacttcctggttgccaattttatttggccagacctgcttttcctgtttggtttgttgctattagcaacgagctccagaagtgtctcccttcccacccatcttggcagtgatgctggctgctaatttgaaggaagaagggaaaaagctaaaaaataagaataataataagaaccccaagtccttttcccctatgccttgagttgtggcccctcccatcagtgggtgaagtgcccggcactggtgagggcgggagatggcagccacctcatgcggagaagggtgggctcctggccaggtagggaggggcactctagctgaagacctgggtcatggccctgcctggggtggccctcagccacctcagcttggcccagaccaaggttggtggcccagcagcctgcccagggcccaatggccatcagtcctgctggatgaagcactggctgtggaatgcatggcactgagccaccaggcactgttgggctcctccagcttcttgctcacagcaagacttgcttgatgatggcagcactgcattgatttacactcagacctatcacaggcagtcacgttgagtcagatcagatgacccccaagtccttctagtccttccaagtcactaggacctctggctgggcagaggctggactggcctgacctgaagccacaagggcatgagtgcagggtgagaggcctggaagccgggtggcctgggtaggcggacagtttgtccttcatcacggggctctctggggagaaagccagggagctgccaggccagggaagcctcatatggaagggagggctcttaagggcatcctggtgccatcagcagccccttgacctgcttcccatctctccccaccttcactctggctccctgaccatcctgaagtagcatcgggatgtgggacccacctgggccacttcagctggagacttggtctcttcagagcataaccaccagaggctggtgcgcggcaggatggggccggttactagggcaacggggagctggattatgagctctgcagcctgccacagcactgctatctctgagggcctggggcacctgggccacctgaagaacagagcagtccttcctcacctgtgccctccagagagccctgcaggagtatgatctctccaggaagccacacctgctctggcttcttttgctcaagggggaccttctgccctttcgcaggcaagacgctctttgtgggttttgtccccccagggcctttgtcctgtgcttcccttttggggtcaactgcctggtccactgtgagcttccagctaaagcacgtcctgcggcgagtcaccttggttagccgcacgggtcaagctctgcaaggagcttgccctcctcgtcctcccttccctctgctcccctcaccgccctcccctcctcttttcagaagctgctctgggcttcttgccacgcgggcgacacgcctatgatcaattttgacttccatcagtttgccaaaggtgggaagctagagaaattggagaccctcttgaggccacagttaaagctgcactgggaagacttcgatgtgttcacaaagggggagaacgtcagtccacggtgaggctcgctgcgcactgtgccgcgtcttctgctggggggaagcgtcagtccacggtgaggctcgctgcgtgctgtgccttctgctgggtgaggcggcagaggggccgtgcagtctaggacatgtgccctatgaggggcagcttccttccctccccactcagttacccttgtggtttcctgggtcataagcttggcgacgccgggaatcttgggttccagcttctcatctcccttcccacagtaggagacaggcttttgaatttctcaaggagatgttgagtcatggttttctggcaaaagaaatgaactaataaaggggactgcattaaaacatggagctccacgctgtgacgcaggcctgtgagagtgagggccacagtcgcggtgggatggctggcatagacttagattgctagaggagaccagggtatggacttccctgttcagagcagaggagaaaaacgaagtccagttccctcaggtcacatgcagggggtcctcattatttgcagattccatattggcttatttacctattccttaaaactgatttgtaaccccaaaatcagtatgcaaagcatttttgctggacagagtatttaaatactctggcctcgtatttaaacaagtttcctttttaagatttagtaccatgtttttcacatttgtggggtctttgttaggggcccccctttgttcggggatctcatggtttagaatggccccaagcagtgtgccgaagagctgtctagtacttctgagcacaagaaggtggtgatgtgctttatggagaaaatgcacgttaagataagctttgtccctatatgagctacagtgctgtcggccatggttcagtgttaattaagcaaatatatatattcaataaggtgtctttatatggaaacatacataaaacaaggttgtatattgatcagttgataaaaatgtgaccagaggtttgcaggaacctaaccctatatttcccctaggagcgatggttctgtgttcatgtccaattcagtgttcctacaactttatagaacataattgctataaataacaaggaccagctaaacgtaaaacgacccagctgtgcaggctactgagtgtgtgtcctggggtctgcctgcctttccagaagtgctggggatccactgggatggacactggggtttctggggggctattgatgaggaggtgaggggttccctcttagaacatgtttcctcacacctgtaatcccagcactttggaaggctgaggtgggcggatcacaaggtcaggagttcgagactagcctggccaatgtggtgaaacaccgtctgtactaaaaatacaaaaattagccgggtgtgatggcacgcacctgtagtcccagctacttggaaggctgagacaggagaatcgcttgaacctgggaggcggaggttgcagtgagccgagatcatgccattgcactccagcttgggtgacagaggtgagactctgtctcaaaaaaaaaaaaaaaaaaaaaaaaaaaaccatgtttccttgggagtcaaaagtcagacatgggcctctgtgctatggccactgcttctttgaaaacaacatataaccgtttacatttcttcttgtcctaagttttcagaaaggcactttgcggatgaactgtcttgactgcctggaccgaaccaacactgtgcagagcttcatcgcgctcgaggtgcgtccctgccacagccttttcggccatctgtgccaggtcctgtgacttcagctggacaggctgggctgagcacctttagcggcaagatgagggtggcatcaccaagacaaccttctgactatggggaaggtggacagggagacactgggacatccagagaggggttccccaggaggctgctttctctgtcgtaggcacactttctcacaccctcttgtgaaatgcatcccagacatggtggcccaaaggctcctcgggaacagcggttgtgtgtaatgattatcgtggatgcaccattggccaaaggcagtgtgaggctggccggatgaggctggatttgaagctggggagggagacctctgtctgcatggccccagctgcctggttgacctctcctggctggggggtcgggggtagggtcagcaccccctgctgtccaccactgtttgctcttcagcctctggcattgggtggggcggggcggggtgcaggggcgttcaagtgtcagggggtgagaggagggcttgggtggaccctatagataaagttggggtgagatgtgggaagtcactctctgctgtgggaactcctcatcctctggaggggcacagagtcttccaggcacagcgtaatccacaggctgccgaataaggaacctcctgggacagtggctgcagggcctctgtgggagaagccagtgacagccatcccttattcctccccaggtcctgcatctgcagctcaagaccctggggctgagttcaaaacccatcgttgaccgctttgtggagtccttcaaagccatgtggtctctgaatggccacagcctgagcaaggtgttcacaggcagcagagccctggaagggaaggccaaggtagggccccgccgagggggcagggtgggggccccagggacccccctcacggcctgcggtctgggctctcggcaggtggggaagctgaaggatggagcccggtccatgtctcgaaccatccagtccaacttcttcgacggggtgaagcaggaggccatcaagctgctgctggttggggacgtctacggcgaggaggtggcagacaaagggggcatgctgctggacagcacggcgctcctgggtagggcctgccgcagacagggcgaggcagggaggtagggtgctccccagccccactttcccaccgcctctgtgctatccagagagcgggtggcagaggtgcctgggatctgagcagtggaccatgcaccttgcagctgtcactgcctctcccgggagcctgcgctttcctgctgggcctgggagctcacgcttcctctgtctcggcttggactgtgtttccatcctgagaagcgagagacaccaggcgggctcagggagaggccgtgcactctcctaaacgcatcggtgcctttgaatgctaacctactccagaaacttcctcagctgcctgggctcttgggcccttagcaggtgatgttggctttgggagcttcccatgaagttggcctccagtttctctcttggcccctgaggaccctgtggaaacagagaaggaggatgctgtcatcccctggggatgagggcaccttctggtctcagcggcaagacatcgtgattccatcaatataggaggttcctttgggagcattttaatggcatcttcttacctgagcctgtaaacatattaggtctcatggaaaagtaggggaaacccagcatttttccttataagaatgtacaagtgtcgctttagaaatgtcaggtgtttttgaaaaatgaactagcccatgcttaaaatgggttcacggccctttccactgtcaccgtcactgggggagctctaatttggcttccgataggcacggtgatatttagtttctactctggaaacagtgccagctctgtaaaaggtgaacaaagctccatgttgtacagtgagtcttatttaatagcaaggcagacatgagttagatttggtttacatcacaagtttaaaaggtggaatatattttggctatctagaggatggagatggttctgtgtagtgactttttaaagccttaagtctggggcaaaacaaaacatatcagacatgcaggctggaaggcagaggatgcaaaggtggctgtctgggttggtaagacacttaaagttatagtgtatatggatgcatacacaatgaaatatggtcagttacagcatgcccttgcttaaattcctatgccttgttcttctacggagtggacagtgaggacacggcttttccctgtcgtgtctgagatccctatggtctgatgtcccatggcttctggcttcagttgggggtaggggtatagacggtgagtttccagtcttatgttttcacgcctttattgtagaaatgccataagggaagccccgtggtgaccgtggttttaagccttttgtcgtcttcgtaaggagcataccctggtttatctctagaggctcatgaaccatctgtctctgccaggcagcctcatctgtctttttggaggatgcctgagctttggaactgcaaagaaatgtgcctttttatgcctcctgacagtgactcccaggatcctgaaagctatgactgagcgtcagtccgaattcacaaatttcaagcggatccggattgctatggggacctggaacgtgaacggaggaaagcagttccggagcaacgtgctcaggacggcggagctgacagactggctgctcgactcgccccagctctcgggagctaccgactcccagggtgagggcagtgactttgggggagacaaaatccaattgcacctaacctgacatgtcacgcttgaccctttagtggccatcgtcttgtggaatttcatctttggtgtcttccctcctcacaatgtctaaatagcaccatggcctgactctcaagaatgctgcctcgcaagtaactgacctttttcctttcccagatgtttagaagagttagcagatggtgaatctctcttttctctttgcatacagtgatggtgaagtcttaggctttcatcagtagaatcttttcgtcaccagtcggaaggtgtggcttctagggccatgtaactgtgaggttgggagccaagcctgtcttcggtgttttgtttttgttttttgttttgttttgttgttgtttgtttttttgagacaagtttcactcttgtcacccaggctagagtgtagtgacgcaatctcggctcactgcaacctccatctccaaggttcaagcagttatcctgcctcagcctctcgagtagctgggattacaggcgcccaccaccacgcccagctaatttttgtatttttagtagagatggggttttgccatgttggccaggctggtctcgaactcctgacctcaggggatccctctgccacagcctcccaaagtgctgggattacaggcatgcgccaccgcgcctggccctgccttcagtgttgatattgaccaagaacagctcatccctgcctctccccaaaccaactctattaatctgctttaagtagtcacaaaataattcatgtgctatttaggaataaaataattccaaatgttgacacctcaccttttatcttgtaagatacactattgaatggccccagaacttaggatctgaagaataaatgattcttgtccagtcatcgttgactcgggccttggtttttttgtttgtttgttttttgttttgcttccttggactcaggaacttgtggttcaggtttttgcctgttggtgagtgacctgtggtctagctgacatgcagtggcccatgtgtacattcatgccccacagctgcctgggtagtacccagagccccatcccttcctgtgcacacgccatctgtgccctcctttctgcctccaagggcaggtggcagagtccaccattcagagccactggggctctctgtgtcggtggtagcctgggttgctgcttgtggtgcctccagaagccattcaggatgccctccggagcaggcccatcaacgcggagagtgcttagcacagccgtggctcaagagccgtccctccagtccccacgaaagtgactcctcttcttttccctgcaggaaggtgtgcatgtttttagcaagctggctggtattttgcaggggatttttttggggtagacactagcaggctccccagcagtcccactagagatacaccaggttccagagaaggaaaggagtgctgtggttactattgccaagcagatcagacagagggacggggattgttttatttaaaaaaaaaaaaaaaaaaagctttaagtcagggaaactagaggttccaggttgcccattgtggtcaacagagaaggaagtggacagcctgcctggcctctcgctgacagaggccatgtcctcctagctggaccctggggaggtgggcctctcactttctgcagcagctggagccatgactgggcttggtggctcaggagcctgggtgtcagaggtcgtgactggacagattcagtcaatggctacaaggttatattaaattctgacctcccctgttcaaagggaacagaatggacggagggcccctctgggctcactgctgcatttaagccaggcatttctgaagcagattccactggggcagttcccagcagcaatggtagccacctggagttggactcaggcagtggacagcatgactcgggagagggcactggggagccccatgaactcgtaatgcgggacttggcggttctgacttctgtcatctcttgccttgctccccagatgacagcagcccagctgacatatttgctgtggggtttgaagagatggtggaattgagcgcagggaatattgtcaatgccaggtaaggggccaggtgtgcggggccaggcagggacttcctgagtcaggtgcctggctgggagcagagcctctgaggctctccgggagccagcctgcttctgagccagctaagctgtggccctggctgtgtggggatctctcacctggctccttctctatgctcacacatgcaccaccccgttctttccctgccacttaggaagtaaaaggaagggctgatgattgctgtgttttctttgcagtgctctggcctcggccacttgttgaggctaatttatgctgccagagggagctggcatgtgtggacctggggtgcaggggaagggcggggctgggactgggagagtagttgactcatgtttcctggggagaggtgagaaagtgtgagtgccgggaagaggtactttcttcctgcacaccagggcaaaggaaaaaatcaaaaccactggatttttatttgatatgaagtcaactgggcgctccccccaccccctgctgaactggcctggctttattttaaggaactttctgaacaaataaataagactgactctgtggggctgctatgagaaggtcctgggttgggtttcaggggtcaagggagggctgctgtgatgtgtgaggcatagccaaaaacacgcagatcctccagtagaagaaggaaagcatgacactaatattggggtgcgggcagcgtgaaatcagttctgcaaacagaataggcttgggctggagcatttggtaggtgggagatagatgtacttccagctacctgtaaacagcatcctttccttttctcttccagtactaccaacaagaagatgtggggtgaacagcttcagaaagccatctcacgctctcatagatacattctgttgacttcggcacagctggtgggcgtctgtctttatatctttgtacgtccataccatgtcccgttcatcaggtaagaacattctgtttacacacatctggggaacaaggggttgttagtctttgtgttttgttctttgacttccccctcctcccccatccccttctgtaacaggaatcgggacttaccattattttagataaatgtagcaaaaccccctaggaaaaactgggctgaatagaatattgtctagcgattaaaaagccaccatgggaaatgtctaactcaggaagctgaactcttagaaagggtgttacatgattgtcatcgcccaagctcaattccgtgcaaggaaaagggttccttgttggaatcttatagacaggaaacctctgaccaagagctgagtaactcactgggaaatgccaactcttttgtccctttttaaaagaattctaagtagaacgtgtgggcctctacaactgtgacctcattgtcatttctccaaggtgcatgctttgtgagcatcagaaagggggcgagcttaggggcggcattcctcttggggtgtgggtgtgggtgtttggatgctggaggaactcatcttttccccagcttgtggttggcctcatcttaccacctgggcctacccatggcttttgaatttccaccagcctttcggcgagctggcagcaggcgttgaactgacctccccactgagcccctgggtcccgggaagggcctgtgcctgccaagagcaccacgggtacacccctgcagcacctggagactaagactatgctgcccataatcctcttctctgactttcagaagatgtttaggtccctgtccctctgcttgtgttatttgggcagcttggcagtgtcctaggttagcaggtgaaggttagtaaaggttaaaggcaagggcggggtgagggtgagaggtaaagcatttgagaaagggctcagagctgaggagagccaggtttcccaggctcggtgtcctcggcttcacgtgcctttagccctgagctgcttccgcctacaccccttccatcagtcatccccccaaccttgtctgccagcgagcagatgcaccagcaggcctcagtctgtggcatggctgtggaaatgttaacaaatgtgcttgcagcccatgtttctatggactcgtatgcgtcataagtgggcatttgaatgcaagcaggctctggcattgcataaaagtccttttgagaccatctacccagcccagcataaacagctgcccgtttcctagctcttaaagtgcattgattgctgggcacggtgtctcacgcctgtaatcccagcactttgggaggccaaggcaggcagatcacttgaggtgaggagtttgagaccagcctggccaacatggtgaaaccctgcctctactaaaaatacaaaaattagccgggcgtgatggtgggtacctgtaatcccagctactcaggaggctgaggcaggagaattgcttgaacctgggaggccacagttgcagtgagctgagatcacgctgctgcactccagccagggtgacagagcgagactctgtctcaaaataacaataataatttaaaaatgtgttgattgcccagatgacacctcccatgcatggcgtgatggctgcacaggagtggggtgggctggtgggtggtgatgtttgcgccgctcctggtggcagtgagaacctgggcggatgcaggcattgccctgtcttcggcttcatggggtgctcaagtgagcacttcccagttggggtgtgggggagatgtccaggcagcggtgggcagcaggagggaggcggcctcctgaccaggagtcgatgacggccacggtggccactgtgttgagctgatgattttggagcactcagagcagcaggtcccgagctgctgctgggcccttctctgtggcaaagcagggtcacacttctccttcaggagccgacggcatgcgcgtatccttctgttccagggacgtagccatcgacacagtgaagacgggcatggggggcaaggcggggaacaagggcgccgtcggcatccgcttccagttccacagcaccagcttctgcttcatatgtagtcacctgacggccgggcagtcccaggtgaaggagcggaatgaagactacaaggagatcacccagaaactctgcttcccaatggtgagcggcgccgtggggacagccagcacctccctgctcagctcagtcccaaatgtgactgttgataggagccaggcactggggacacaaccacagggagggccccttcctggagggctcagcgctgggggagggggagagggctatgtccctccatggaattgacctggggcagggttagccacgtgcctggagggggccagctttgcagcatttcccgttgctgtacaattcctgagtgtctgcatggccactggatttgtatgtgtgcattttctgattttctaattcaagtgatggtttagggaagaaaaccatgtccgtggtctgtcctgtccaagtggtgaagagcatttgaatccacacagcctaagactccaccttcctgagattcacagtcttcacatgtactttctgtggtggctcagataagcacacccttttgaccaatggaccctttttgactgggaacacggttcttgaccaaggagcccagatcctgcctgtcctcgaagctgcaatagcgaaccgcacactgccctctcgtggcggtccggagggtttcattctgaaactggaggattttcttttcaaatctagacgttaatgttctccttcctgtgcaaagatgctacccgggcacagcttcagcgtgtggtgcacacgaggccacctctttcccgaagtgaggatagacttcagctgttcttgctgcaaaatcttccactgtctgagaggtggtgggttgggtcacagagctcttccctgtgagaacagatccttaaaactgacgtcccattttactgggctgcacgagcactcaaggcaaaatttccttagttttcattaagaagtgccataattcctgttggtgttgtttatttcttatgttaaaaaagaaacaaacgagttgggaaattttcaattgtgtgtaatgcagtttaaaaaaaaaaaaaaagtctaacccttctcacttaaaaatagctactttggggccaggcacagtggctcacacctgtaatcccagcactttgggaggccgaggcgggcagatcacctgaggtcaggagttcgagaccagcctggccaacgtggtgaaaccccacctctactgaaaatacaaaaaaaattagccaggcgtggtggcgtgcacctgtaatcccagctactcaggaggctgagacaggagaatcgcaacccaggaggcagaggttgcagtgagctgagatcgcaccactacactccagcctcggcaacagagcgagactctgtctaaaaaaaaaaaaaaaaaagtgctactttgacatagtaaacttgggatacataataagtaattaaaggatttataatgtagttcttttctaccataaaaatattgagggacctattaacattctacacttcttttttgtttttgttttttgagacagtctcactctgccacccaggctggagtgcagtgacatgatcttggctcactgcaaactccacctcccaggttcaagcaattctcctggctcagcctcctgagtaattgggattacaggcgtgcaccaccaggcccaactagtttttgtatttttagtagagatggggtttcgccatgttggcccagctggtctcgaactcctgacatcaagtgatccgcctgcctcagcctcccaaagtgctgggattacaggtgtgagccatggtgcctggccaacattctacactggtattgtctgataccgtagtcactggccataagtagctatttaaattcaaattaattaaaattaaataacatttaaaattccttgctttccctggccacagtgagaatgatcagtatccatgtggccagtggctcctgcatcagatggcacagagaacatttcggtgctgcagaaagttctgtctgacagtgttatctagacgctcattttatttggttgggacctgtttaatcttctgtccagattattgtcatggggggagtggaaatgcctcatattataggagaagagaagctgattttggagctaggcagatgggagctgaaatcccatctgtatcatgcactagctgtgtaaccttcagcaagtgcctttgtttctgaactttgtttttttttttttaatctaagagagagctggtggtatctgctttgtgcacctggaacagagcccagcccttgcggacagttgatccacagcagctgctgtcattgtcttccccattcctggggaagagacagggaaggcaaggaccccaggagctctccggggctgagctggggccgtgggctcctaggactgggcaggatgggaaggaggagctagagagagatggagaagggtcacctgaaaaagctcaggaagttacatgaaggtgcacatcctgagcatttctgctgctcttttgaaacctcattctcctaacgctgaatgctgggtgctgcttcctaggagtagacactccaaagtaagggtgcatctgatcttcaggacggggatccatggaggaaatgctggccatgttgctctcctccgtttagggtaggagctttcttcaaaccactcagaaacactattatttaaaattaaaaagtaagccatgtaaaaattcctccatagttttatgggatgagtgaaaaacaagatgctctagtagaaaactttcttttttctaagtagcattttgagaaaaatactcctgcttgccccagtgagcttgtttttctcctctctcccaccttccttgcaagatgggctgaatgattatgattttcttttcaacttaggggagaaatgttttttctcatgattatgtattttggtgtggcgatttcaactaccgcattgatcttacttatgaagaagtcttctattttgttaaacgccaagactggaagaaacttctggaatttgatcaactacagctacagaaatcaagtggaaaagtaagttgtgctttaaaaacattttttagcagctgctccaagatggaatgacatctgtgagatgtagaggctggtgcagcaaattcagttccgtgagtggatttcactgtttccaacattgtagaaaataggtgggcttgtgaggttacagtacaggagtggctgttcatacacacttcctgtccttttttttttttttttttttttcctgaggcagagtcttgttcagtcacccaggttggagtgcagtggcactatcttggctcactgcaacctccaccttcctgggttcaagcaattcttgtgcctcagcctcccgagtagctgcgattacaggcgtgtgccgccacacctggctaatttttgtatttttagtagagacgggttttcaccatgttggccaggctggtctcgaactcctggcctcaggtgatctgtgcgcctcagcctcccaaagtgctgggattacaggcatgagccaccatgcccggtcaaccttctcctccttctaatactgttattttagtgcctgtttgcttcctagcaggatgagctgagatgaggggagtacatttaaattccatttagctgtggagaaagaagctggttaaatgtgtgagggccaggtgcggtggctcttgcctgtaatcccaacactttgggaggccgaggcgtgcggatcacctgaggtcaggagttcaagaccagcctggccaacttggtgaaaccccatctctactaaaaatccaaaaattacctgggtatggtggcaggcgcctgtaatcccagctactcaggagactgaggcaggagaatcgcttgaacctgggaggcggaagttgcagtgagccgagatcgcaccactgcactccagcttgggcaacgagcaaaactccgtctcaaaaaaaaaaaaagtgtgaggacagggcagataaggtctctcctgaagcaagatttggacgttcttcgaggtttactgtgtcttcccacttgagccccttccagtgtgtggagtgctaaagggttgccacatggacgagtgaccataccaacctcctaaagcaggttttcctgtcttcctactaccaacattctcacatcctctcagtgatgcccaagagaatgagggtgtgtttgtcccttggtcttcccatggaagcaaggccaatccaaagttaaacaaagaaaagaaggatgtgcatgggggctcacgactgtaaggcgggaggattgcctaagcccaggagtttgagaccagcctgggaaacatagggagactttgtctctacaaaaactaaaattagccaggcatgatggtgcgtgcctgtagtcccagctacttgggaggctgaggcaggaggatcacatgagccccagaggttgaagctgtagggagccgtgattgcaccactgtattccagcctgagcaaaagagcgagaccccagggggagagagagaggagagctgactttcactctgcgcttctatgtacttagctcatttagtcaacaaacatagatgaaggcctcggggttgtgggccagacatggcaccaggcatgggactgtaaagatgagcacccctgacccgtgcctcggaccctgcactgtctcctggggggcaacaagaagacagtggatagatcagacactggagtgggtggggagatagatacgagggcggtgtgtccctcagtgggatgagctgaggatcacttttttgctaattaaaagacacatatgtccagtttcagatagattttcaaatgtaatggagcttctgttactttttaagaatagggacttgccttttcagttttcgtttttgtatataacattcaggatcgaaaactacggtggcctgatgacttctttttctcccaatagatttttaaggactttcacgaaggagccattaactttggacccacctacaagtatgacgttggctcagccgcctacgatacaagcgacaaatgccgcacccccgcctggacagacagggtgctgtggtggaggaagaaacatccctttgataaaacaggtgagggggccgtgcccgttcgagagtcggcagagggtgaataagaaatgcgacggagggagagtcacgtttacccaaccccaggcgctgctacataaatcagtttcttcataaccccagatgacacaaaagtcatcccagaccttaacccctaagctttggaagttgtgctttcagggagcctctgcttctggcctctttttttcccttttcttttcttttttttttttgagacagagtttcactcttgttgcctaggctggagtgcaatggcgtgatcttggctcaccacaacctccacctcctgggttcaagccattctcctgcctcagcctcctgagtgctgggattacaggcatgcaccaccatgcccagctaattttgtatttttagtagagacggggtttctccatgttggtcaggctggtcttgaactcccaacctcaggtgatctgcccacctcggcctcccaaagtgctgggattacaggcataagccactgcgcctggcctcctctggtctctttctagagacagtgacctgcaaataggtctgctcctggctgcccctgcatcacagctcccccccacacccccacctcttttttctgggtggggaaagcggggagcatgaggttgcctccctccctgccccccatgctccccctcatgttctttatccagcctattttgttcagctacacttttacctgcttaaagccctaattccaaattggacacgagcaagacacagtaaaaataagttagtttttaaaaatcattagttgtcaagtatgttttgaacaactgttgatgcccagctaggaagtgaagtttatttaaagttagaatatctgtaactagtacataaaaaaaaaaaaaaaaaaaaaaaaaaaaacctaattacacattttgggagagcatagccaggaaattgcatctgtgaaaagaaaatacaaattttcctctagatgagtttgtgaacgcctgtgtggccccagcgctctgagaggtggggcctagaatgagtccgagtgttctcagctcctgcagctcttaccataccaattgctgccaaccttctgggattcctgggtcctggaaacccggcagcaacactgtgtctcaagcctacagtgggcatgctggcgaggactgcaggcatggtcatgactgttttgaataattatatgcgaggaatgtttttaaccaaaggccccaaagcatccgaagcctggcttcaaggtggaggagtaaggaggatgagtctgggacgtggggtggttcgtggcgcagacctctattgtggaagtgtcatgatcgcattcttggatattgactcgattctatatgggtctctcgaatggaacccctgcgagtagctggagaactcaaccttctagacagtgatctagatgttgacaccaaagtcagacacacctggtctcctggtgccctgcagtattatggtcgtgcggagctacaagcgtctgatcacaggtgaggtcctgacttccatggcgttttctcctgtgctgggcaaggcagcgtctccctctccgcaggaaaatgcatgctgtccccataaggatgtgtgtgcgcatgggggtgcattttgtgtgcatacaatacaccaaagaacaaagaatgatggaacaaatatctgtggacccaccaccaagaactaattaatcttagcattttgtcattgctccatatcataaatgacatcattgatgaaaatttcaaagatgcaacctacgtattttgcggcttttatattttcttaaatgatgtcgttgtgcaacttgcttttttgttactatttttgagatacagtcgtgttgatgttatagctctggtgcattcatttgtaactgctgtctagtatcccactaaatatatccatggaacttacaacttatccattcacctcttgatgaatattttctccaggattttatgattacaaacaccatagggtttttaaatctgggatgcacaaccttttttttttttttttttttgagagagagtcttgctctattgcccaggctggatggagtacagtggtgtgatctcagctcactgcaacctccgcttcccagattcaagcaattctcctgcctcagcctcccaagtagctgggattacaggtgcacaccaccatgcctggctaatttttgtgtttttagtagagacggggtttcaccatgttggccaggctggtcccaaactcctgacctcaggtgatccacccaccttggcctctcaaagtgttgggattacaggcgtgagccaccgcacctggccctaggatgcagggctttttaaatgctctgtgcatcatgcattgaggatagagtggaggcagcagagggagcaccgtgggcaccagcacctgtgccctgggattgctgcagaggaagactcaccctgcagaatgtctttaaagacagaggagaggatggcatttgagggtgtgaagaaggaagagtttgatcttcccaaggctgctgcctaaactctcatgtcagtttcaacttttacaaggaaagaaattaagaaaaagaaggtaagaacagttggtcaacgaaaaaaccttttttttttttttttgagacagagtcctccaggctggagtgcagtggcacaatcttggctcattgcaacctccacccccagggtataagtgattttcatgtctcagcctcccaagtagctgggattacaggcgtgcatcaccatgcccggctgatttttgtatttttagtagaaacggttttgccatgttagccaggctggtctccaactcctggcctccagtgatgtgcccgcctcagcctcccaaagtactgggattacagccaccatgcccagactctttagataattctaaattctttagatacctgttgttgcaaatacatacctagaagtgaatcttgaggaatcttcagatatgtgacatcaaggtttgctagctcaatgtattttgaaaccttaatttaaccaatatttcttgaggggcccttacatgccaggccctgttgctggcctggagaaaagcagtgaacaaaacagatgagaccatgttatcatggaattttctggacaggacaaacagacaataaacaaacatgtgtgctatgaaagaaaaaaagtagtggcaggagtcaggccagagtcgagctattttcaatcaggctgtgtaattttcgtaatataggattttctggaaatttatagagtaataaccatccctgtgtcagaattactataaggattgcattatttcctgctggactgttttcctgtttacatcattgatttttacattattcctaatgattgcgtagggtattatatgaaggtatcataactgtttccccattaagaaacagagcattttggcctggcgcagtggctcacgcctttatcccagcactttgggaggctgaggcaggcggatcacctaaagtcaggagttcaagaccagcctagccaacacagcaaaaccccatctctaccaaaaatacaaaaattagctggtcatggtggcatgcgcctgtaatcccagctacttgggaagctgaggcaggagaatcacttgagcccgggaggcggaggttgcagtgggctgagatcgcgccactgcactccagcctggacaacagagggagactctgactcaaaataaaaaaaaaaaaaaaaacgagcatttccctttttttttttccctcccatcaacaatgctgtaaatgatcaacctcatgcattaaatctttgtctgaatccctggtcatttccttagaataaagtccgagaagtgagattactaggtgaaaagagatgaacaattttggaactctatgtaaagtgccaagtaaccctctgaaaagcttgcacccctggcagagtgcagatgtctgcttccccacctccttggtggtactgaggattaccatgtcaaaaatctttgctgatggctggttattttccaagtactgggatacatctttaaggtgccacactttattttccccctcaaatcatctttagataaaaatgccaaggtgatactaaggttaaggaaagatgaagactaaaacgccagagcagggcagctagcctgcaaatccacctgctggtggccacattcgcaggttgttggtgttgactgtttacaaagagccctgggggacagcagctggggactgggggctggagatgtggacatctgtcccaggctaactggggactggaggccgggggtgtggacatctgtcccaggctaactgtcatccctcttttgttcctaacgcagacctgtgctggcgatcgtggaggtggaagttcaggaagtcgatgtgggtgctcgggagagggttttccaggaagtgtcctccttccagggccccctggatgccactgttgtagtaaaccttcaatcaccgaccttagaagagaaaaacgagtttccagaggacctgcgtactgagctcatgcagaccttggggagttatgggacaattgttcttgtcaggtaactgctcccctggctgatgtgggttccaggggatgtcgatgaggatccgtgagagctgccaggtcgttcttggcattgacttggagtatcatttattccaggatcaaccaagggcagatgctggtaacttttgcagacagtcactcggctctcagtgtcctggacgtggacggtatgaaggtacgctgtacttggccacactgtggagtggggtctgatcaatccctctttttatgtgggcatgtcttcttcctcctcttgccctgacctgtgccttttttttttttttttttttttttttttttctctgagacaaagtcttgctctgtcattcaggctggagtacagtgatgcaatcacagctcgctgcagccttgaactgccaggcttaagcaatcctcccatctcagcctctcaagtagctgggaccgcaggcacgtgccaccacacccagctaattttttttaaattttgtagagagaggatctcactctgtagccccggctggagtgcattgggacagttatggctcactataacctcagcctcctgggctccagtcatcctcccgcctcgatctcccaatgtgttgagattacaggcatgagctttcatgcctggccaccaatctgtctttatgtatagacgccatatgcgggagggagtttggattcttcactctggttctaaggtgtctcatgtccggctctagctacttgcaaaatagggcggaagggtgggcgcagtggcttatgcttgtaatcccagcactttgtcaggccaaggtgggtagatcacccaaggtcaggagatcgagaccagcctggccaacatggcgaaatcctgtctctagtaaaaatacaaaaattagccaggcgctgggtgtggtggcttacgcctgtaatctcagcactttgggaggctgaggcgggcaaatcatgaggtcaggatttcgagaccagcctggccaacatagtgaaaccccgtctccactaaaaatacaaaaattagccaggcatagtggcaggtgcctgtaatcccagctacttgggaggctgaggcaggagaatcacttgaacccaggaggcagaggttgcagtgagccgagatcgcaccattgcactccagcccaggcaacagtgtgagactctgtctccaaaaaaaaaaaaaaaaaaaaaaaaagtagccagacatggtggcgcgtgcctctagtcccagctactcaggaggctgaggcaggagaatcgcttgaacctgggaggcagaggttacagtgagctgagatcgtgccactgcactccagcctgggtgacagcgagaccctgtctcaaaaaaccaaacaaacagaatggggaagaagaatgtcagtcactgtgtctcacgttggaaggcagctctaccagcagctgcagaagcttagccattttagagtgtagttctcgccgagttacttgatctgtctatgctcgcactgccatgtgggagactattccagtctttctctttagagtatgtattttggaatatgcagctcatagatagtttccgtttttatagtatcttggctttaaatctgtaccaaatgggaagctggagatgagagttcaactttttttttttgagatggagtcttgctctgtcacccaggctagagtgcagtggtgcaatctcggctcaccgcagcttccgcctcccgggttcaagcgattctcctgcctcagcctcccgagtagctgggactacaggcactcaccaccacgcccagctaatttttgtatttttagtacagatcgggtttcaccgtgttggtcaggctggtctcaaactcctgacctcaagggatctacctgcttcggcctctcagagtgctgggattacaggtgtgagccaccgcacccagcccagttcaacttttttttcaaccagatgtatgagagctatgctgagcctgcgtgaggtctggacccttggtttttcagggccaaatgtgaagattggcctcgttgagggtgtgtgggttttggtgagaagcattgtgtgatcaacaggaggggtcatgatttttatttattcctgggtggccgctctgccctcccaggtgaaaggcagagcagtgaagattagaccgaagaccaaggactggctgaaaggtttgcgagaggagatcattcggaaacgagacagcatggcccccgtgtctcccactgccaactcctgtttgctggaggaaaactttgacttcacaagtttggactatgagtcagaaggttagtgaccctgcagggagggacaggcaagccgttcttctagcaacaggcctgagcttttaaggacaccttctaaagcctcccttgcagaagtgacggaggacacccgcagggcaagccctctgtcccatgtgatgagcatgtttgtatgtgtggacgatgcatgccatgctacctgggacccgaggcatctaaacttaggctacaaacagtggctatgaggatatcagggctgtgggtgtaccaatggaactggggtaccgtccctgctggcgcctgggccctgagctgcagggcagggtgcacgtgtcctgacaggagctgaaccagtcccactgatggaagactgagcctttccccctcattgttttcacccgaattgtgattcatttccttctcccaggggatattcttgaagacgatgaagactacttggtggatgaattcaatcagcctggagtctcggacagtgaactcgggggagacgacctctctgatgtccccggccccacagcactggctcctcccagcaagtcacctgctctcaccaaaaagaagcagcatccaacgtacaaaggtagcctgacccttcttttctcaggagcctcagcgatggagtcagctcaggacagactttcctttttctcttggcgattgggcactgtgtgatatcaagtatgcaggtcccaggagagacctcaaccaggcaggccaagcgaggggtagggactgagccctgtggaggtagccagctccaacaccctgatttcctctagttagtttatttttttacaataacttgtacccccataacacaccagattcaagataattcttgtttcctctggatattcaaatggccacggttctgaactggttttatatttgtgattatttcccgcccccaacaaaactcttctgattcagccaggcgcagtggctcacacctgtaatcccagcactttgggaggccgagacaggtggatcgcttgaggtcaggagttcaagaccagcctggccaacatggtgaaaccctgtctctactaaaaatattttttaaaaattagcagggcatggtggtgcacatgcctgtaatcccagctactcaggcagctgaagcaggagaatcgcttgagctggggaggcagaggctgcaatgagccgagatcgccccactgcactccagcttgggtgacaaagtgagattccgtctcaaaacaacaacaacaaaaaaacttctgattcaatcccagtagagacataatccatatctatgtcctgagttgctggcgtatggtcacactcatataatatcatattattatacagtcatgtcatacggtcacatcattgtatcattttagacttcagagggcctgaaaggtcacattgattgaaccacacacccctagattaaataatacaactttttttttttttttgagacagggtctcactgtctcccaggctggagtgcagtgatacaatctcagctcactacaacctccacctcccaggctcaagcgatcctcccacctcagcctcccaagtagctgggactacagggttgcaccagcatgcccagataattttttgcattttttgtagagacggggtctcactatgttgtccaagctggtctcaaactcctgggctcaagtgaccctcctacctgggccttccaaagtgctggaattacaggtgtgagccactgcacctggccagtaactgttctgagtaacttttaaagcccactaatgttacgtggctggcaggtcgggtagttcatatttcagtgtcagctacattgatgctgttccattcatagccaggcatgcctctagctgtcaatcactgagccccgagttggaggacagctctaaccagcaggtgcaggagcttagccacgcattgggcccattgagctggggctgagagcagagaacagggctgaaagtggattaaggtacctctcagggagggtactttgccaggagaggtgcgaagacctccagcccctttgaccgtacgctggtccccacactgaccaataacttgcctataccgaaccatcaggagcttttaaacttatggatttttgagccctaccagagagatctggatttggtaggagtggggtgggaccctggaagcctggcgtttcaccaagctttccaggtggtttggacgcacagctaggtttggggacttctgcccaagactgaagcagcagccttcgccggagcatcgcggtggttctgcacgttgctcctgccaggggcttctgcccgggagttgaagtggctggagggatgtgctcttcccataagaaggacctttctctcgggggtggccgtcatgcaggcagcctctggagccagtgcaggtgtgagcacagatagtcctttgcatgaagaaactaatagcgcaacacgggacacgtgggtggctttgctacctggtgggcattgagagggtcttcccttgatgctgtggggtgttcagccattcccatttgtaggagaaatcctgcctttccccagttccagtctccaggacacatggggtggagctgctggatacagggagtggggtgtccgagtcaaagtgaaatggagaggcccatgctttgggggagccctagggctgctgatttgatctgtaaggaagcaggagctgtgcctcctgaaaacccctcagcctcttggaaggtgtgtgcagggcaggtcaagatggcagacccttgggagtggccagccatgggcccacagggtttgggatttgatgagtaagcaggacccctggtcctaggcactggccactgcatgccaggctgctctgctgccagagcagggagaacaccctcagcttcctcagccggtgtgttctagagtgaggaattgaaaacatctgcctgtggttggttgactcttcaggggttgtggtttgcaactgtctcctccactctgcccaagtcttgttatttcacaagaaaacacactttgaaatagctcagtgtctctcaagtctgagaaatacccattatccatggttcactgaatgttccaagcaggcactgggtgccctccccgcccccgcccctcgccggcagacagaggtgcccgtttctggacagagccttcagctgtcctacagcaggtccccctgccacagtcggcctcctgtgctcagatccgtgtctgacacgctcacgtgtggaacagaccattgtactcatgccccgccatgtcctccagatgacgcggacctggtggagctcaagcgggagctggaagccgtcggggagttccgccaccgttctccgagcaggtctctgtcggtccccaaccggcctcggccacctcaacccccgcagagacccccccctccaagtaagactctgcttgctttcagctccctggatgcctgccaggaataaccgcgcgttccctgctactgaaaacacggctccgaatccacttctccccggccttccggtccccacagggcttcctcctccttgggctccgttttgttgtaaatccaggacacgtttgacgtcagggctggttgtgtttctcatggcaaatgaaacagctcctttccaaagctgctgttcaccctggagctgtgctattgcttcaaactgctctcccttggcagcattagaggatgcagaatgggggccgcagccatgggagggacgtgagcttcgcagtcagaagtctctcctcagctgctgcgcagtcctccctctacttatgaggaatctggtaaacccaggtccccgcctggaggtgacctggtcacccctctgcgctccgaggcctcctgttccccgggctcagaacaagttcccccttatcctgggtctaggagcattttcttctggttgttcgaacaatgctttgcccgtccagccctccctgataacctgaaagcaaagctgtgatgtgcttttgatccacttgcattttcccaccactgtttacttctccctccccaaaaatgtgatgatcagacttagatcttcctaagccattacttcagaattgggctcattgtggctgacgtcacggtagtaaccaatggcaagccacaagcccagatataaaaataacccaaaaataaaatgcataagtcatgtattattgtggaaattttagagataactacaaagaagaacaaaattttaaaattcacttgatgacctacgggtcgtagttgttgaaaaaagtcttctttttccagtttcatgtatctgcagcaacatacttctttttttttttttttttttttaacaaaattaatacccattttctctggtcggttgtcttttatttaatgggttatattttctgtgtcattgaatgttctaaaacatgatttgttaatggctgcaagtatattttaacagtttattcccctgctttggaattttttttttttttttttttttttttttttttttttttttttttgagatgggctcattctgtcccccgggctggagtgcagtggtgcgatctcacagctcactgaagccttgacctccccggctcaagcaatcctcctacctcagcctgccaagtagctaggactgcaggcgcataccatcaggcttggctatttttattcatttatttatttattttgtagagacagtttcaccatgttgcccaggctggggtttttgaaatattttttccccacaaaatattttaaaaatctggtcctagcaatagtatttggaaccatttcaaaatcaattggtttttatatcagatctgaatcccccaagatgttaaagtttgcattctagtaatgcttctccagatcatctacatcaataggcacacactggtagaatcaagtgagaaactccatagagagtcaaggaaggcctggctctgtgggtgccctaagtgccgagtgagtattcggacctcaccgtgtctgtggtctgctgggacatccgcctcgtctagtcgggctcctggcagctggctgggaagttgtgccttcactgagattgagactctgccctcgttggtttttacagccggtttaatggtgaaaaagtcggcttcagatgcgtccatctcctccggcacccatggacagtattcaattttgcagacggcaagacttctaccaggagcacctcagcaacctgtgagttcttctgcatacatttcaatcccaagggttttgcccccgggatagtgtgggatctctcttctcagtgaatatatagatttatgtgtctttaaccctctacctgctcaccatctcatctccaaaccccataacccttcctcgcaggttctccatagggcttttaaatggttgtatggagtgttctagaaaaaatcacttttgatgaaaaatcccaaatatccctggtttccatactcatccatttctctctcttcccattcttgcctctgaccttggtgtatgggcagagcattgcttggtagaagggaaaatgggagaaattcaggtcgttatcctgggaaaatgatgatcattctggagtgaagttggttgagagaagaggctaaaaagagatgtaaataatgaagttggggaacacactaggaagactaacagccatagaggattgtggaggtgcctggttccagagggtaccatgagctgctggggaagagagcaggtgaaggcagggaagtagaggggagagaggggaagctgggtgctagggggaaactgctatgaccgggatgcctctggggtgctgggcctggttaagtgcttgtgcggccccagcaggtggaggggtgactggaggccagtgttttacagtagtgaaaataggtcataaaggcaacccacatgctggatgaagaagtagaaaaagcacttttaaggaaggtattttaacaactcagtgggaccatggaaagagtggcctcttattttgctttctggctttcacctggttattgaaaaaaagatagaagatggtctgtccatatgcaaaaatctgtaatcacccggctttgaagaccagggtcatcaggtctaagtagtatggcactcttggaaagagagtgctccaggaaagagaggattgcagggtgtggtggaggctggagtttgtatggtcagcatcgtctggtggagccctgcacagacccacgggtagcagatacgtcccacgaggctgtcctcctgcctctgctgatactctgctcttcctcattctgtcctcaagcccaaggctcggactggaataagtaaaccttataatgtcaagcagatcaaaaccaccaatgcccaggaggcagaagcagcaatccggtgtctcctggaagccagaggaggtaggtgctttcctgggggcaggggaaaaaccaattctccttttctttttatctccctgctaaaagtggtctagaaacgaaaataactctttttattcttctggaggcaatattaaatgaaaacatcctttagcaacattttatataaatctatactaagattgattgtccatttaaaattgtattttcaaaattctgtgtgtatataaaaatcatcccagggctattaagcggcgtctaaaggagagaccgaaaaaaaccaaaatgagtttttaaaaaaggtgaatgctgccggcatgaagtcattctgccagctttataaaacagagacagttatagtgtttgtcctaatttcaggcacaaaatctaccttttaaatcactggcaagtggaaataaagtttttagtgtcaggcagggacctctttcccaccacattattttttgttgctgttacttaaaccatgttagttaccttgggctctcccccacttcattcataatcactggtaatttacacttttagttttggccttggctttgttccagaatctcctagagaggagagtgtgcccttttcttcgtttttttttttgttttttttttttttttttttgagactgagtttcactctgtcagctggactggagtgcagtggctcaatcccaggtcactgcaacctccgcctcccaggttcgagcaaatatcctgcctcagccacctgagtagctgggactacaggcgcgcagccccatgatgagccaatttttgtattttcagtagaaatgtgatttcaccttgttggccaggctggtcttgaactcccaacctcaggtgattcatccaccttggcctcctaaagtgctgggattacaggtgtgagccaccacacctggccgagtgtgccctttaaaaaggtgtaagcaatcaccattgcttaatttgcttttagtcagcatgtttaacttctttggaattctcaaataatatttaagggggcatgagttaaaaggtcgagaactactgttgtagaatgatactgctacaaatgctttctttttttttattttagaaaaataactaaaactaggccgggcgcggtggctcacgcctgtaatcccagcactttgggaggccgaggcgggtggatcacgaggacaggaaatcgagaccatcctggctaacacggtgaaaccccgtctctactaaaaattcaaaaaattagccgggcgtgatggtgggtgactgtagtcccagctactcaggaggctgaggcaggagaatggctgagcccgggaggtggagctcgcagtgagccaagattgcaccactgcactccagcctgggtgacagagcaagactccgtctcaaaaaaagaaaaaagaaagaaagaaaaataactaaaactatggatataacaacccaagtgtccatcagctgataaatggataaacaaaatgtggtccatcaatacaatggaatattgttcagccattaaaaaaaaaaagaatggggctgggtgctgggtgcagtggctcacgcctgtaatcccagcgctttgggaggccgaggcaggcggatcacgaggttaggagatcgagaccatcctggctaacacagtgaaactccatctctactaaaaatacaaaaaaattagccgggcgtggtggcacgtgcctgttagtcccagttactcgggaggctgaggcagaagaatcatttgaactggggaggcagaggttgcagtgagccaagataacgccactgcactccagcctgggtgacagagctagactctgtctcataaaaaaaaaaaaaaaaaagaatgaagtgctgatacatactacttcatgggtggaccttgaagacattatactatgtgaaagaaagaaaaaaaggccacatagtgtaccatcccctttttatgaaatggccacagcaggcaaattcatggggtcagaaagttcttcttgctttccagggactggaaggaggcctgggtggggagtggctgctgtggggcttcttttttgtgtgatgaaaatgttctggagttagatcgtatgatggttgcacaactttgtggatacactaaaaaccaatgaatggtacacttagaaagggtgaatttcacggtatgtgaattatgtcacaataaagctgttaaaaaaaaaaaaactctagagatgtagatgttagtagaggtgtgaaatctacctacagtcccggcttaacactttcttggtcatggccccattgagattttgatgtctttggatcatctaccctgagaaatgtaagtacacatgagactttgcatatgatctcagggtctcactggtccccatccaaactatccacagaccccagatcaccacccctgctaggaaggtgagcatgaaaacctgggactgctgggtgcggtggctcacgcctgtaatcccagcactttgagaggctggggtgggaggactgcttgaatccaggagttcgagacaagtctgggcaacacaatgagaccctctctctacaaaaattttaaaattagctgggcgtggtggttcacaccagtagtcccagctacttgggaggctgaggtaagaagactgcatgagcccaggagttccagcaacatagtgagacctcatctctactaaaaattttaaaaattggctgggcgtggcagtgctcacccgtaatcccagctactcaggaggctgaaatgggagaattgctcgagcctgggaggttgagactgcagtgagccgtgatcatgccgctgcactccggcctgggtggcagagcgagagcccatcttaaaaaagaaaaaagaaaaaaagctgggactgaatctagctgattactcctgaaatacactgaattagtaaatgacacttaggatgtagactgtctaaggacgaaatcatgcagtgaattgccttgtcctttacacttcagccatgtggttttatgtttcaggtgcctccgaagaagccctaagtgccgtggccccaagggaccttgaagcatcctctgaaccagagcccacaccgggggcagccaaaccagagaccccacaggcgcccccactccttccccgtcggcccccacccagagttcctgccatcaagaagccaaccttgagaaggacaggaaaggtaaaagcctggtaacataaaacctcttactcctaagttgctcacatgtctcgatagataagaattgtggcctgtaatcccagcacattgggaagccgaggcaagcggattacgaggtcaggagttcaagaccagcctgaccaacatggtgtgaaaccccgtctctactaaaaatagaaaaattagccgggcgtggtggcgcacgcctgtaatcccagctactcaggaggctgaggcaggagaatcacttgaacccaggaggcagaggttgcagtgagccgaaatcgtgccactgcattccagcctgagcagcagagtgagactccacctcaaaaaaaaaaaaaacaaaaaaaaaaaaacagatttgcgtctcacagataaaaatctagttccctatggacatcctcacgttcatgagtcccagacacaggtgtgtctttggggaaagttttgacaactgcttcttccctcatatcctactgtgtcttggctctggctgagaagaacgaggagtccactgtctggcacattgtcagtgtgacaagaacagcttggaggtattatgcttcctaagtgttttgagtccccaaagggaaccatagtgggatgcttttccccacatgttctggtaccgcccatttgcgtgtggtctgtgttgtgtgcacatggtttcaaggcattaggaaaacagtaaccgattcccagattcgccatgttcacatgctctcgtgcggcctcagcctacgagaggttccacagcttttcttgccacttttcttgcagattgttttttgctctcgctctcaagcttctcagccttgcttactgcttcaaagacatgagtttgtaaggacagtagcagcccaaagactggcatctgtagacacatctggatcttccgtttgatctcagtgttctagtaacggaccctcggtaatcccttcctggtcatcacagcacgatgctgcttcccccctagagagtgtgaggggggcttcggcttcactcttgacagcgcttgctttgtatttcctgggttgctcttctgtcccacattggctcattgccatctgtcccttgtccatgcttccttacaaagtggacctttttcctccgcctcttccctgttcagatgctcctcgacttaaaatggggttacatcccaataaacccatcgtaagttgaaaaatagcgtgtcaaaactgcatctcatacacctaacctagcaaacgtcatggtctcgctgaccttgaacacactcagaacacatacattagcctacggctgggcaaaaaaaaaaaaaaaaaaaaaaaacacccatccaacacagcctattttataataataaaaataaaagatcaaacttcaaaattcaaagtatgctttctacggaacattagcgcttgtgcactagggtgaagtggaaaatcctcagtggaaccattgtaagtcggggaccacctgctttgtcttttcttgtaaaagccaggagcagaaatagattcattttcccaacctgctgcacaggagttaaagttaaaaggctgttggaaaagagactttcttttttcttagtttgttttctaaagaaccaaagaaacactgaaacgccaatgtttaactagtctactgatcaccttttctgaacaaaagcttcattttgcctgtgcagttgttttctttgtgatagatttgaaccagaaccaaggcagtgtcaaggtttccattctttaccaatatttaagtataaaagattcaaggagctgggcgcggtggctcacgcgtgtaatcccagcactttgggaggctgaggcgggtggatcacctgaggtcaggagttcaagaccagcctgaccaacatggtgaaaccccgtctctactacaaaatacaaaaattagccaggcatggtggcaggcgcctgcaatcccagctactcgggaggctgaagcaggagaatcgcttgaacctgggaggcggaggttacagtgagctgagattgcgccattgcactccagcctgggggacagggcgagactccttctcaaaaaaaaaaaaaaaattcaaggagaaagtatatccattagtccttcagttagcttatgttgtaacacaagttacttcaccctagcatgatacagaccatgaatcagcccaggttgcaacttcaaagagtgttttcagagaggtttgctttcaataaaggaagagcatcaccccatttcctaaaggacaaagaaaagtttgtctgattatttactgtggccctggttttaaattttccactcgttttcattggacctgctggtgtgacctgataaatgtgtgtttctcctgtgctttttctttttcttacctggtcacatttctggcaccccacacattctcaaatctcgaatttgctagaatgtcagcttggtctcatctctgttctctgctggccactctgttctctgatcctcagctgcctagttattggcttcttatttacactctttgtcccaccttttctcagcccctgtcaccggaagaacagtttgagcaacagactgtccattttacaatcgggcccccggagacaagcgttgaggcccctcctgtcgtgacagcccctcgagtccctcctgttcccaaaccaagaacatttcagcctgggaaagctgcagagaggccaagccacaggaagccagcatcagacgaagcccctcctggggcaggagcctctgtgccaccacctctggaggcgccgcctcttgtgcccaaggtacccccgaggaggaagaagtcagcccccgcagccttccacctgcaggtcctgcagagcaacagccagcttctccagggcctcacttacaatagcagtgacagcccctctgggcacccacctgccgcgggcaccgtcttcccacaaggggactttctcagcacttcatctgctacaagccccgacagcgatggcaccaaagcgatgaagccagaggcagccccacttcttggtgattatcaggaccccttctggaaccttcttcaccaccctaaactgttgaataacacttggctttctaagagctcagaccctttggactcaggaaccaggagccccaaaagagatcccatagacccagtgtcagctggcgcttcagctgccaaggcagagctgccaccagatcatgaacacaaaaccttaggtcactgggtgacaatcagtgaccaagaaaagaggacagcactgcaggtgtttgacccactggcaaaaacatgactgagcagctttgaaggctgcagtcctatagaatgcataccttcctccctctagacatccctccaccagaagagacatctatttaaaggcacactggccaaaacgtttgtgcatctgtcactctcgtgtagtttacaaaaatcgtgtctcttattcagtaagatggttactcagccaccaaaatatatttcactcaaggcttgtacatctgaagtttgctcttcaaggaatgggaaccttcctgttaaattcggtgtatggattttaagaaaggaatctagccaatgaggtccaagaagttctcacccattgaatttttaaatggctgttcagttcatgttgtacgtgatggagatttgtcttttgttttatttgcattttacagatttggtataacattttggggagccacctgaaggttgatgtataaagtaaggattagagaaagaggtcgttgtgaccattagtagctgtcctggcccacttaaacaaggttacaaaaaatcagagtcggaagcagccaaataggtcaacctaatgactagactgtacattcccatgagccttcatgtttaagtgtgtacatgtgcgttaaccttgatgatgcgtgaatcccgagggagccggtggcatacaccgttagcttaaccttagcttaaactagctgaaggctcctgtgccatgtcttagacattgcatgccctatcaattactataatcctgagccatggtgtgctactgaaaccaatttttatccaccatctagtccttattaaatgaaacctcacggatcctttgttccgcttatattccatgcataccacataaaagcacacagtgcgaaaactcttgctgatacgcgatattgattctcattgttagaatatggagagtgtttcagcctcgtctgtccggctggagcttcgggatggaaagtgctatgtgtccctgcatataagaatcaccaggccagtgtttctgggtttgcttgtctatatgtttgtctatattttttgcctatacatttttcccacgtttccaacagcacttctcacctattcaataactgaaaaagacattaccatagtgctttacatttttaaagtaatgttacaaggtctggaatccatttggagcagataccgtgttttcgctatttaataagaagttcagtagtgaaatcttactgtaccgcctgttgtatctgggagcctcgtacagaggctcgcacagcagtgatcaagtgtcatcccttacgtgactgggggatgtctgtcctaaaagctgactgctaggatagtaaggatcatcttgcctgggctatgccactgtcttgttaccaattagacatctggaatttcataattagttttcattgtcactgtcaagatatattgcagattacttaaatatggccatcaaaacaaaagttacaacacgtatctcttttcatctgaaaactaatacctggaaaaggataaaaaaaaaaaggaatccgtgacccacagagctagacagataagatgcatagttgaccagtcataaaaggcggtgtttaggtgatcaggatgccgttggtggcatttacgtgctttatatgatttttacctctgtaacaaacacaagaaataaacagaatggtccttaacagagtttgggggagagagcaagatgggttccttggagaagctgatttgccaagatgcacatcgctattaacagccagagtcataaatgaaatgaaattgaagaattcattcaaatgctcttttccctataacctcttttctcaccaaaaaggagataaatttgaaaacagataaatgtaacaaccagtcaaagaagcaggggaaaagtaagctcctccaaagttgcttgcagtgctggaaatagatctcatttttaggttttctcttcgttccagataccaaataaatgggacagagaataaaatttttgttaaaatatgtgctcatctcctaagtagctcttcagagtctgaccgtaagtaaaaacacacagaattgtgttgactgggggaggtgaatcacaaaaaagttacgaggagtttaagagttaaatattatttgatcgtggctgtcaaatttagtgaacaacatagattggatttggagttggtagtaggtatggttctcataccagaattctcttaaaaaaaaaaaaaaggacaattggaattgccttatttatttttaaaatcaatgcttactagttggtaggattcccaggtcagcagcagggttgattaaataatcttgacaatgagcagctgccatcttgggggatttcattctgtggttttttaaatgtttcgtctttgatgctaccatccagggcttcttattgtgaccttgtagcctattttgttcctgctgttctctaacatggtgcagttcacgcagactggtttaggtacttcacaactcaccattgtctctctgaccccaagcctagtcccttttacatcaccatcttctcagacttcttgcctattcttaaaatatgttttggttaatgattgaattaggacatcagcttaagcaattcctgtaacggtttaacgttgttgaagttcaaggcacataataaaattctccctgatgtgtgtgtaagtataaacaaagtaatgtatcaaagcgttcactttataatgaagtcatttcattgggaaggaaagctgcaaagattattgggggactagtgattaataaaatcctgtaatatttttgaagtgaaaatttgtactgaaattgtacatgatacctattaaatgtttttgtctttttttaaa

SEQ ID NO: 384 - DNA, 3643 bp, Homo sapiens
  source 1..3643: mol_type = genomic DNA; note = NC_000020.11:c59940305-59936663 PPP1R3D [organism=Homo sapiens] [GeneID=5509] [chromosome=20]
agccttgtaagtaacgccgcggaccgggaaagtgggaggggccgctcccggaacgcagccttcttgtaagaacctccaaggaagcaagaagaaaaaagaggcgctaccctgcgctcccgggaggcctctgaaagcttccactagagaaaaactccccactcttacaatttctttaaccgcaagaagcggaggacctggacaaggactcgaggagcaaggtggcgaaccaagggtagggcgcaccgggcccgagaggtcccccgcaggttgcagatacggtggactctctgcggcttctgagcacggagggagctgtcgcggggtcgggaggtcgtctctcatccctgcctcatcttccgacggccggcggggccatgtccagaggcccgagctccgcggtcctgcctagcgccctgggatcccggaagctcggcccccggagcctcagctgcctgtcggacctggacggcggcgtggccctggagccgcgggcctgtaggccccctgggagcccgggccgcgcgccgccgccaacgccagcgccgtcgggctgcgacccccgcctgcggcccatcatcctgcggcgggcgcgctcactgcccagctcccccgagcgccgccagaaggccgcgggcgcgccgggcgctgcgtgtcggccgggctgcagccagaagctccgcgtgcgcttcgccgacgccctgggcttggagctggcacaggtcaaggtgttcaacgcgggagacgacccgtccgtgccgctgcacgtgctgtcgcggctcgcaatcaactcggacctgtgctgcagcagccaggacctggagttcaccctgcattgcctggtgcccgatttcccgccgcccgtcgaggccgccgactttggcgagcgcctgcagcggcagctcgtgtgcctggagcgtgtcacttgctcggaccttggcatcagcggtacggtgcgcgtgtgcaacgtggccttcgagaagcaggtggctgtgcgctacactttctcgggctggcgcagtacccacgaggcggtggcgcggtggcgcgggcccgcaggccccgagggcacggaggacgttttcaccttcggctttccagtaccgcccttcctgctggagctcggctcccgcgtgcacttcgcggtgcgctaccaagtggcgggtgccgagtactgggacaacaacgaccaccgagactacagcctcacatgtcgcaaccacgcgctgcacatgcctcgcggggagtgcgaagagagctggatccacttcatctgagccgcgcggggaccggccacctggagcctccacacctaagctgcgcctcctgtcatttccctgctgggctctcacatctatctggttgttcttcaccaccctccaagtcctctgacctaattttctgctgcaaggtcccctggcagtggcccatcctgtcttctacttgaaacgtctgagtcacttggtctaaaaagtagcctcaggtggccagaaggccgagttgtgtaatgagttggggcagggtggtggggtaggtgcatgggagggtgggccctctggggaggcccaagcagcttgttttgcaaaggcccaagtcctcctgctaggaaaagcttttgcatgtgtcctgaatgtgtctctgtaaacatagctgttatttattattgtgatgttgggacctttagcccatagcggatgcctcctcaggaatattctcgatttaataagctaaaaaaaaaaagttctgtgtttgtgcccacagtaaacagaatgtacagtgtgacccacatcgtggtccctccaggcattcctgccccaggataaggaaaacctgagcccacatctgattgccaacggctgtagccttctaacagtgggaaactattaataggcaagaaatttctgctttatcagtcatcacacaaccattcctgggcattgagactgtcctggttaggctgtgtgtctcctacattaacagctggggaggagggaaaagcttcagacttttaaactagcaaaacagttatttctctgcattcacaattctgatttcatgtatttctctgtacatgtttgatcattatcaggccattctgtttaagtttgaaactaagcattttaagaagtcttgcctcagttatttcagttttcaggtgactagagaatttcaggcaacagtgccctttgcaattacctttttgatgattaaggtgactatttttatttcttgttaagcatcagaagatgtcagcattcatcttttgggagtccagttacaaggtggaactagaaggtgttttcagcaatagccagagcactggaggaaaaataattgacaaatatttatacttttaaattgttttgaactgtatttacatacatcatgttttatcaggtacccaccaactttatactttctgccttcagatagagtttctaacattttctagtttgtcagttttaaaatataaaattcttttatgtttttaaaccgtcaaccaagaagtcaagaccactgtcccctgctgagttaggcaatcacttaaaactccaaagaactccaggctgaggagttcttttggtgctgaacagtggtctgacaacaggtgctagaattaaggtgtgggaaaaaaaaaaaaacagccaggaaggacaagatctccaatttgtgaagcttatgatacagctgaaaccagtctgatcaattttatgctacctgtcaccaagaaattaactctaaatttttgaatgcttgttggcatctgtcaaatcaatactgaaaggatgcatttcggcttttaaccagtttggttctgatcattgcaacctctgtgcttttataattcaaagaacaaggatagctttcttcggtatcttttaatataagaacactgaattttggcttgaaatattgtgactaaattgcacaatctctggctattagcactgttcactacattaacatgcaagagagagagaagccttgttacatttcctgctatttaacaaactgtccaattaggtcagcaagcctgttagggccttcactgctacgcccctggccccaaaacagagagcaagacagttgtccagagaatttagatatgagttaagagctgccagatttattttaaggcatgtagagaatctcataatctatgtgaaagtcacttgccaaaaaggttttggttatgaaagtgaatgttatatatttaatattaagtgaacctcccgtgccttttaaaaaataccaacattatgaaatttaaaagcttaaatatatttgcctagttgataaagaggctgtggaacaactgaaggagaactttcagaccctaaaacagttatattacttagatgttaaaattttctagtgggctgtgcaattgctgggttgtccccccaaacatattttaatatgttatttaaaatgattttacccaagcctaagtattaaagtatatgtgcaaaaacagttgtgagccattctattatgcttcagtatgtttttcttgtggcctaattacagaagaccaagctttagaaacttcttgtctaaatcatttcacatgcaagtcttatcctttctacaacactgataaacgtagagccttggcaaaaataaattttgtcattgtgcctca

SEQ ID NO: 385 - DNA, 13193 bp, Homo sapiens
  source 1..13193: mol_type = genomic DNA; note = NC_000003.12:42906142-42919334 ZNF662 [organism=Homo sapiens] [GeneID=389114] [chromosome=3]
ggcctcccggatgctggggcctggcgggtgtggagcacggggagtcgggcgtggggcgggcagggagtggagtcggggtcttactccggtggctgcagggcgcagggtagccgtgtcaggcctgcccaggtgcagagcgctcttccgcgaccccaacagcctctggtccggtctggcgcgccctcgctttcccagagggcgacctgggctatggcggccgtggcgctggcgagcgggacacgcctcggccttgtcctcgagctgctcccgggacagcccgcgctgccccgggcgcgccgggtgagtgcggggccggagcctggaagcagtcttggccctgccctgggttctaggcccggagacggggtggtgcggcggctgggaaatgggggtacaacccagagtgaggggcctcgagggacaggcagcacagcggagtcgacacccctggacctgagcctcaaggagagcagacgtgcagcggcacggggttgagccgactgctggggcagagcgcacagagtgctgtcgggggcgatgaatggccagaatttcagagctgcctttacagagctggttatgtttgagctgggtattaggttgaaaaggaatttgcaatgcaggagcaggaaggaagaactggatattcaggcaagagtagccgcaggtgcaaggacacagaacagggtgaggaaagagtttggtttcccaatgcaatggtgagaggatcggagatgagagtggtggtggctgatgatcctggccaggaaagctgggtctgtgagtagtgaatggaattgtctgtagtgcagaggaatgtggactctattaggcagacaaagttgagccagccaaagccttggagccctggagtgctggataaatagctgtggagactttctagtgcgcaaggactgaagtgcagtggaccagaatgggctcctccacagtgtggagactgagaccctgaaggaggcagtggctgagaattacgggaagtcccaacggctggaggtcagcagtatttgtttcttaagaggatgagagaaagaaggtgcaggagctgagactcctagagatatagaaaatggggacatggagattgggacgtgggtaagcaagtgaggtgggatctttgtgagagtgttgcgggtggtgggggtgcagggagtaaagtcacaacgaggatctgccctgttgagtacagtgttcagagcaacctgaatgttctgaggagccctagctgcctctgtggctggtggcagtgactggggaggacaaaggaggaagagtcctatacaggggcagcagggatggcaggaatggggacggaaggcagtgtggcataacaggcaagagccagagtcaaacaggcctgggttctgtctcagttctggaactttgggggaagttaatccctccgagtctcagtttcctcttctaaaaaacggatctgatagtaggctatgagacataacaaagaatatatgtcaagtgcttggcacaggcttaataaatgatagttgttatcaagggtgggtgacctctgaaggaggacacattgtggagagaggatgggacctagagcacagatgtggtttggggtataaggatgaaacaagaaaacttttgcagactcatgaaaaagaggagaaaatgtttgctgaaataaagatgaagagacatgagaaaattgatggctgatgccttgtctctttgtacataggaggcaaaaatcttctgctgatagagttcctgtagacattcagaatccagaatccccacaggcacccccacagtaccttttgatgccctgtctccccttcctcttggcctggtcctggggttgtcctagggcatttaaacacatgttgtttcaggagtcagtgaccttcgaggatgtggccgtctacttctctgagaacgaatggatcggcctgggccctgctcagagagccctgtacagggatgtgatgctggagaattatggggctgtggcttccctgggtaagggtctctccctttgggccctgcctccacccttgagagtttgctggctccttttttctcaaaggctcaggagttgttgataaccctcagctcaatggcagcttcaggctcttggatttttaatgacctaacctcagcagccgttggaaagtaggaagtcctggtatcagtttgggccttatacaggacttccttgctccagagtgagaggtgccaaacccctacccttgtgttgtgggtatagtgagaagagagcaaattcatggtgctccactgagccttcagttccctcccctctcggtttgcaagatccagcctaattccaagcatcctcatgaggatgtctgaacttgagagctctaagagggagaggacaggtaagaattgaggactcaattcctcaatgagtgaaatcatccatttgctgactcaaacagttactgagtcgtctgtcaacttcctgacctttgtaagtctcctggcccctctcttgtcctttcccctggaattccttttcttgttcttcctagttatttccgtttttttcccctcctacccctgaagacactggcctgggaggagccttgggattactgtgtgccatgccactcacctgcctgtcccatttctttccttttaagcagcatttccatttcccaaaccggctctgatttcccagctggagcgaggggaaacaccctggtgctcggttcctcggggagctctggatggagaggccccaaggggcatctcctcaggtgagtgagggcacacgtgccggtcatctgaccagttttcttgtcatgatctttaaaatgtcatagataggtgtttttttaatctagtgttgtagacactagtgggattgcatttcttctctgtgttcccatagttttatgtcttctttttttaaaaaaattttttttagtatttattgattattcttgggtgtttctcagagagggggatttggcagggtcataggacaatagtggagggaaggtcagcagataaacatgtgaacaaaggtctctggttttcctaggcagagggccctgccgccttccgtagtgtttgtgtccctgggtacttgagattagggagtggtgatgactcttaacgagcatgcttccttcaagcatctgtttaacaaagcacatcttgcaccgcccttaatccatttaaccgttagtggacacagcacatgtttcagagagcacggggttgggggtaaggttatagattaacagcatcccaaggcagaagaatttttcttagtacagaacaaaatggagtctcctatgtctacttctttctacacagacacagtaacaatctgatctctctttcttttccccacatttcccccttttctattcgacaaaaccgccatcgtcatcatggcccgttctcaatgagctgttgggtacacctcccagacggggtggcggcctagcagaggggctcctcacttcccagatggggcggccgggcagaggtgcccccccacctcccagacggggcagcggctgggcgggggctgccccccacctcccggagggggcggctggccgggcggaggagctcctcacatctcagacggggcggccagtcagagacgctcctcacctcccagatggcgtggcggcggggcagagacactcctcagttcccagacggggtcgcggccaggcagaggcgctcttcacatctcagatgggccggcggggcagaggcgctccccacatcccagaggatgggcggccgggcagagacgctcctcacttcctagacggggtggcggccgggcagacgctgcaatctcggcactttgggaggccaaggaaggtggctgggaggtggaggttgtagcgagccgagatcacgccactgcactccagcctgggcaacattgagcactgagtgatcgagactctgtctgcaatcctggcacctcgggaggccaaggctggcagatcactcgcagtcaggagctggagaccagcccggccaacacggccaaaccccgtctccaccaaaaaatacgaaaaccagtcaggcgtggcggcgcccgcctgcaatcccaggcactcggcaggctgaggcaggaaaatcaggcagggaggttgcagtgagtcaagatggcggcagtacagtccagccttggctgggctttagagggagaccgtgcaaagagggagagggggagggggaaggggagagggagagcttttatatcttcttgagttcttgttttattcatcctggctcctctgtgtgccatcttcattaacctgttttgcctcttccccatcgctgatattatggctaccatgtatctttgccccatgagtttcctgtttactctgatcttgggtgccctttctacttcctggcctgtttacagtcttccagcttgggatataatggccatctttatcattagaaaccaagaactctcaaccctcagccagatagttcctattcctcaggggaaaaccctgggattactttaggcccaacaggactttcttactcttagtttcctagtgataactgtgtttcctggttgcctccttggccccatttcatcttcccatagggctcttatgtgggcgcagtgtgacttgagctgtgctccaaatttcctcattctcacagttccttgttctgtcttttcatattagaatactcttgattgcaggtattaaaacccaattcaaactggcttaaacaaaaataatttgttgtttcatgtaactgggaagtctgaggtagagtgggctgcaggtatagtttgatcagaactacattctctgctctgtctccgtatgtgttggctttgtctacagtctggctccccttttggttgtaaggtgattggtggtagtaacaggactctgctgcttcatacctaggtgaagaaacctggcaggccttccttaggctttaaacattgtgaatcaaagtgccaagtatactctaatggactaccttaagtcatatgccagctctaaatcaatcctgtggcaaggtaactactgtgcactgattgacttggtctgaattgccaatctctgaatcagtctctcatgtagtgagtgggatgggattaacctgcttagcttagccaagtcagagcctaccctaggaagtggagttgggatacccaactccccactccagccccctacaaagggcatagctactttacagtggggagtagtggaaggggtatggggagaccaccacagcgtcttctgcattcttagtgcttcctctcctcaccacctaagggaatttctcatctttgcttttctttgctttaggtagaaaaccaacagctaagttactccttgagcaaaattctaactctctgacgtgcagctgacttccttggcacatacatgtccctactcaaagtccacttttgtcttacagaagttagtactcagaggatacatagtccctggatttggcaacagaaaaggttgtcatttgaaggtgtagaattgatctgtttcttaggaggttttggatgaaggttacaaagagacagttctagcgaaagcagaagtaaggtgtattacagtagatctctgtgaacagaggtgtctgttattgagtaagaagtgacttttggaaatggctgagtgagggtgtgagtccatttcttatggatgccatagagagaccccatccattgaatctttgtggaatggaaagcaataaatggataggaaggaaactaggagattacggtttcccagaatagcctggctagacaggaagtcctcatgaataactatttgcaattccatcctatcctgattctattctatgtgaatttgatttcacctcctagggataggtgaagaagaggccttcatcttttctatttcttcttgacgttttaaagtgagtgatatgtttcatatctttgggaactgatggaattacaacttctctgttccagtattttctatcctttatataaatatataaaaatataaaaatatataaatatataaattaaaaatatatgtatatataaaatatataatcatataaataaaatatatataaatatataaataaaaatataatatatatcttatatattatatataaatataattatatataaaatatatgatatatatagtccatctctctattatatatgatatatatcatatataattatatattatatatgatatattaaatatatataatatatatttatatattatatattatatatattaatatatatataatatttttgtatattatatattatatgttataatatatatttttatatatttaatatatatttatatattatatatttgtatatttaatatataaatacatatatttatatatttaatataaatatatatataaatacatattttatatataaatatatttatataaaatacaaatatttttctataaaatatatatttatatattttatatatatataaatatatatatatattttttatatatataaatatatatatattttatatatataaatatatatatatattttttatatatataaatatatatatatatattttttgagacacagtctcactctgtcgcccaggctggagagcagtgacacagtctcggctcactgcaacctctgcctcccgggttcaagcgattctcctgcctcagcctcctgaggagctgtgaccacaggtgtgtgccaccatgcttggctaattttttttgtatttttaatggagatggggtttcaccatgttggccaggctagtcttgaactcctgacctcaggtgatccacccacctcggcctcccaaagtgctgggaatacaggtgtgagccaccacgcccagcctatccttattattctgtaccatcaaatttctgcttatctatgttaccaatcttttcacccacctttattctctccctaccacttccatgtctgctcttttcctgatgggcctcactcttctgactgagtcagccttatttgtatcttgaccctggcaggatatccatttctaaagcctgctgggatttcccatcctgagcaggtggaagagccattaaacctgaaactgcaaggagagggtccaagcctgatttgtccgggtaagtgagagggaaatgagcattcttctctcagtcacatcttttcctatctttcttttataagatgtaaaagtccattttgccattcatgttctaaacaaatatggggaccagatccttaaatcaaccaattaagagaaaacttaaaccctaagcttccaactttcattaggacaagctcaattaattaaattaattaaattaggatgggtcttttgcgttagacttaaactgaacagatggcctgccccatctagctgctatgatcacccaatatttttaatgtagatgctgtattttactcattgtgttagttgttagagataaaaaaaatcaagtcatatatggcccttatcctggaaggactcacagtctcatgggacatgatacataaatgtataattacagaaaaatgatgaaactgtaacagaatgtgaataagacactatgagaacaaagaggagggagtcttttccgagttctgcctggagtagtttgagaaagcacttcccatggtttcatggtgaacttggtgcttggattgaaagagaagactatacttccttttagtgttgaaaagtatgaggaagctcattcttgctactgtctgctgcatgtgacaagcccaggttctcaggtataccactaaggattccttatttctgaacaggtcctctgccctaagtcctggcctgttcttctcatggtataaactgtactcagctacctaggaggaattctgactttgttttccttagattcaattcacctgttttctgagagcctaccctggtccttggtttggtgccaggaatcatagcccgcagggattctatctagttgctgtctttacttttggtttctttctgtgtattagccttgtttttgccattttcagctgggacagggccactgagacatgggtggcacttggagagaagtggacgtattaataccacttggtgaccttagtcgctgtgtcatggataatgatgacatttgaagctccaatttcttttttcagagggtgtgttgaagaggaagaaagaagattttattctgaaggaggaaattattgaggaagcacaggacctcatggtcctatcaagtggaccccagtggtgtggatcccaggaattatggtttgggaaaacctgtgaagagaaaagcaggttagggagatggcctggttacctcaatgggggacgtatggaaagttctacaaatgatattatagaagtgattgtcaaggatgagatgatctcagtagaagagagttcagggaatactgatgtcaataacctccttggtatacatcacaaaattctaaatgagcaaatattctatatatgtgaggaatgcggcaagtgttttgatcaaaatgaggactttgatcaacaccagaaaactcataatggagagaaggtctatggatgtaaggaatgtgggaaggctttcagttttcgatcacattgcattgcacatcagagaattcacagtggggtgaaaccctatgaatgtcaagaatgtgctaaggcctttgtttggaagtcaaacctgattcgtcaccagagaatacatactggagagaaaccctttgaatgtaaggaatgtgggaagggctttagtcagaacacaagccttacgcaacatcaacggatccacactggtgagaaaccatacacatgtaaggaatgtgggaaaagctttactcgaaacccagcccttcttcgacatcagagaatgcacactggggagaagccttacgaatgtaaggactgtgggaagggcttcatgtggaactcagatctttctcagcaccagagggtccacactggggacaagcctcatgaatgtactgactgtgggaaaagcttcttttgcaaggcacatcttattcgacatcaaagaatccatactggggaaagaccctataaatgtaatgactgtgggaaggccttcagtcagaattctgtcttaattaagcaccagaggcgccatgctagagacaaaccctataactgtcagatctctcaccttcttgaacattagagagtgcataatggtgatacttgtttataattcttatgctgcaggaaccctagagacaaaatgagatgaccattcacaatttgctgtaacccttaacttaaatagccagtattatcttgcccttttgaacatttaccatgtactctagcaagactggtccctctgttctatgatgttttaacaaggcatcatttagttgggcagctactctgtatcaggtgctaaccactttacatacattaatttgcataacaatcctattaaggtaggtgctcttctccccattttacaaatgagaaatctgagttgaaagaggttataaaactcattcagggttgctcagttagtaagttatagagttgaaattggagccaggcctatctgactgcagagtttactgttctttacttaattgtacatatttatgtctctgcccatttttatttgcttattttcctgtgcttttagtttcccttcatcactcagatctagctccttcaactaagaagatctctcttcctcttctacttgtaatcagtaccacccaagttagtatttaattatgtgccatcttatatttttctaatagtctcatgtcttttaatcttaaccccagctaaatgactctgaggaccaacagtacatttcttttatgtttttcaaatcctgaaacattaatctttgactagatataacatgctcatgataaaaaagaattgaaatagttgaaaagggtgttcagtgaaaagtaaatttccttgtcattcctatctcttgagttctccccagaggcaatcactgctactggttgtgtatctctgtagatactctttgtatacaagtgtttattagtattgcttttcataattctgtctcactgaaaaccttatttgatggaagcaacattgcagttaaattgtgaactctaagaccttttcttcagaagttgctttccttttgaggccaccaaagtaatttagggaaacagcagagggtaatccaggtctttttttttttttttttttttttagacagagtctcactctgttgctctggctggagtgcagtggtgctatctcagctcactgcaagctccacctcctgggttcatgccattcttctgcctcagcctcccaagtagctgggactacaggtgcccgccaccatgcctggctaatattttttatttttagtagagacggggtttcaccatgttagccaggctggtctcgatctcctgaccttgtgatccacctgtctcggcctcccaaagtgctgggattacaggcctcagctaccacgcctggccaatccaggtcttaagagacctcattgcctttgttttatgagatatcattctgggattgggaatatgtaaactcaactggagattttttttcataaaaatttatatagttccagccctctcattgcttcctatcctaaatcctcttccagtctgtccatccctcactaccatgatagtctacattctgataagctgtgaggccactgccaagggagggagaaatggtcactttctggtggtggttaatgctttgttagatagcttcatccagtcaatagttgaaaagttttcacataatccagtattggcatcagagccagaaatgccctccctaggtccaggaccaaagataaaacaaacacgaggaacatgtagcgtctacacaggaaagtaaagaattatagaattaactaattctacttgaaatcaggagttttataaaacaacatttttagacgtggtcatcttttattggtttccatcatctcttccccttctctctgggaacagttacccgggtattctttgggaagctatcctttctcagctatgtggtttggcaccaccaccatcttcatgagtggaccctgtttggcttgtgtcaatcagtttatcccatccccttggccacagagccattgtgatatgaggagatactggctcttctggaaaagagaggcttttcttcatcgagagctaccagaggagatattatctgtcctctgtgtggcacataggaaaatgtgagacctagaattatagcaactttttttttctgttaaaaggggagattctcaagcttccaggtgctaccatatggagcctaaggataaagccaataccaaagaaaacagtgactaaacagagagaaactaggtccttggtgacatcttttgagccactagaccaagctttacctgaagcagagctacctcagaacttttcagctatgtgagccaataaacatctgtcaaacgagttagagttgagttttctgttatttgcaacttagccacactaatactgttttgtgtttgaaatcactgttttctcatacagctcctcagtgtcaccttttcctcttgctcagtagtctcataagcttctcagttttatctcatctcagttgcttggaagttgagcatctaaataggtggcttttgctgggtgcagtggcttacgcctgtaatcccatcactttgggaggccaaggtgggcagatcacctgagattgggagttcaagaccagcctgaccaacatagagagaccccgtctctactaaaaatacaaaattagccaggtgtggtggcacatgccagtaatctcagctactcaggaggctgaggcaggagaattgcttgaatctgggaggtggaggttgcagtgagccgagattgtgccattgcactccagcctgggcaacaagagtgaaactccatctcaaaaaaatgaaaataataaataggtggctctcatgacctaaggttaatttcatgcatactactaagtgatgctttaagtcataccattagtgcaggaatttttgctccttagttcagctaaaatctgggttcttgtctcatgaccaggaaaaattagtcacagggacacattgaaaagtgaggagggcagaatttattaagtgaaaaggaaaactctcaacaaaaagaggggtcctgcatgcaggttttccatctcactaaactgaataccaggccaccacacatgagctgaagagcctagtcttctccccctgcatgaattcctggtggctacaccccgttctcccagtgtgcaggcaggcccttagtctgagccactccacattatttcccttactgtgtatgtgttaaggaacggaatttttcatcatgggcatgtttaggcaatccccctgtgcacaatgacctgggcagcatttggctgtctcctgattctatcattcccccctctaaagaagtacatctaacttagaataaggataaggataagggtagtgatcgatcttaactggttcctgctgatgggggcactgttttgggaaaatagcagtgagatctccctcagaggcctatctaagggtccctggtaaaaggtggccatcatttgaggttccaattgcatgaacattcagagttcaatggcctgaaggtgagaagagacaaaccaggttattagaagacaatcaaaatgaaacaaagcggggatggtaaggacagctaaaaaaaatcctaaggctgctgacacacccagataactggtagctatagttatgcctgctaagattggggtgtttggggcttggctttcgttagctcccttggtcttattttcccaaaaaagaaacctccaggttatgggcaccttatttagtctaatcatctggcaggatttgcagggtaattgcccagaactagaatattgatccagatttttacattactcatcccttttgctgcttctgagctgcagccagagattgctggttggttcacaggaataagcagtgttagtttaaaatgtgggcaaaaacttaaaaacaacgaatgagtctaaaatctaatgacaaatatataagtcttgaaacataatttctctccagttctcatttttgttaaaaataaatcatgataggactgagttgtttgcaaaataaactttagtcttgta

SEQ ID NO: 386 - DNA, 178140 bp, Homo sapiens
  source 1..178140: mol_type = genomic DNA; note = NC_000013.11:48303751-48481890 RB1 [organism=Homo sapiens] [GeneID=5925] [chromosome=13]
agttgccgggcgggggagggcgcgtccggtttttctcaggggacgttgaaattatttttgtaacgggagtcgggagaggacggggcgtgccccgacgtgcgcgcgcgtcgtcctccccggcgctcctccacagctcgctggctcccgccgcggaaaggcgtcatgccgcccaaaaccccccgaaaaacggccgccaccgccgccgctgccgccgcggaacccccggcaccgccgccgccgccccctcctgaggaggacccagagcaggacagcggcccggaggacctgcctctcgtcaggtgagcgagcagagccgccgtcgcctcacgcgggaagggcgccccgggtgtgcgtagggcgggcgccaaggcggctcggcggggatccgtcctcgccaggggccgggtcccggcgggaggaggcgccctccctgccccccgccacggcggagcgtctgcagaatggtgacaggattctgggttcttgggcgaggggtctcggcttcaacttgacaggtgtcgggcgggtggggctagggtcctgagcgaagtgacaggtgcagttccctcttgtgaggctcggaggcagagggtcgttgcgagcgtccatcagacgcaaaaaatgaaaaataaaaatacaaaaatggtgtctgtgggagagtttttcaccggagaattggagtactccggtggtcgtctgactttctgttttggttcacgcgatgcaacagttgggaagtattttcttccgggcgtgcactgcatctgaagtccatttgtgggagaggccgaccagaaagccttggacaagaagcgcagggtcctgagtgtccattgcccacaggatactcggctcaggagctttgcggcgtttccttagaacaataatgcatcgaggccttggggactcaaagccatctgtagtgattgatggagcgtaactctttagaggaactgaaacatgggcaaaactttcatgagacatttaccagaagtgcttgaaagtttctaaacttttttttttcctgtttgatgaactcttcttgcgtgttagtcggcttcggcttgtctcattatttcttccattttgccttttgactttgaaccagcaaggatcttggtgtcccctctttttgcctttgtttttggcacaaaattagtggttctgtgcgcaaatggaaattttcgttttcccttattaagtggaatctaaatttaagcaagtccatacgaatgcactagatcttgaagggaagtatttattgtattacaacatcttacttttcttgatttttctactttatggttaaatagctatgattgaaagagtgtaattgtcattattgtcagcactggttctactttgagacaagttcattgcagagggaatgggacttgtttctgtttttcactattttctctcccattcttgtctatcaccaaatcctttcaccctcacccatttctttccactcggtatacactaacaattcacggcagaaaagattgaagtgggatttaggaaatggcccctggaaggctattaaaaatttatatatttaaatggactgtcttataggtcagttaaaaaccatattcgttaaaaaaccaaaataacaacaacaaaaaattaaaaaccacgtctggggcatgttctgggaaaagacatggctttagtttctgattaaattctgatgtatccaattcttgcaaatttcccttgggaaaatgcagtaatggctactctaaagaattccatgttatgcacacagctttggaagcatactctaatgtagggtaaccaggaatattgacgttgtggccactgcttggaaaaaagaggactgtttctttcattttttaactcattttatatattttaagtaatggaactataaaaaattctcttataagtcaaaaccatacaagatacagtctgttcttgattatccatacccacaaagggtttcattaacatagacagttgaactctataaattaaccagcaagggtagaaccgctgccgtgcagtctgatactgagcatcttgcctggagatggaatcaaggctcagtccaactgcacctccagtgacagattccattcctgatttgagagtttagatcttatttctgttgccttatctctggcctaagtaatgtagctggaagggaaactgtcactaggaacagcataccacattcattgttgaaataatcaaaggttaatcatgtttcgagctgggtgtgatggcgcgtacctgtagtccatgctactcaggaggctgaggcaggaggatcacatgagcttgggagttggaggccagcctgggcaacaaagcaagaccccagtctttaaaaaaacaaaaaagctgaccaggcatgttggctcacgcctgtaatgccagcactttgggaggccaagatgggaagattgcttgaggccaggagtttgagaggagcctgggcaacaaaacaagaccctgtctctaaaacaaattttaaaaaattagccagtggctgtggcacacctgtaggctcatctactcaggaggctgaggtgggaggatcccttgagcccaggagtttgagactgcagtgagccatgatttcaccactgcaccccagcctggatgacagagtgaaaccctatttcaaaacaagaaaaaaaaacaaaaactaattatgttttgaaggaggaattggcagtctagaatagtggtcaagggcatggattatagagttagactgttgggctcacatagtggtttacctcttaccggctgagacctcaggtaagttctttaacttctccaatttgacagacatctgtaaatgtctacttttacagatgagaatacttatctaaaagggctgatgtcgggattcagtgaaaccatatgtttaaggtactttctacaggatcatagtaaatactcaaaaattattaattattcttcatactattcttattagtagataacacatagaaattagatgaatgaaaatgaattagccaacaagaatttattaaatgcttgtctttgttaaggggaaaggacaaaaataagcagtcgcatcatgtaagatgtgctagtaggtagagagatatatgaaacattgataagagaagactacagtttaacaaagtcactggcgttgaattgtataatattatctatgggtttttatctttttgttgttatctttatcctattttcccaaacagctttagctattacatttactttccttcacagaagtgttttgctgctttgaagtatatttgacttaccatgcaagcaaatatttttcactgtgtggtatccttattttggaatgaccatgaaaaagataatcatatgtttaaatttgaagtgtaatgtttttctaagataaaataagatcttaaagtatttaataatgttctttttcacagtagtgttatgtgcaaactattgaaacaagtatgtactgaatcaatttgatttataagtatatgccaattatatgattattttcatttggtaggcttgagtttgaagaaacagaagaacctgattttactgcattatgtcagaaattaaagataccagatcatgtcagagagagagcttggttaacttgggagaaagtttcatctgtggatggagtattggtaaggattttcttaaaacgttttgaaatttttttttctcattttaaaaacaacttcaaatcactatacaaaaattgaaagatagaaaaatataaagacaataaaagctaataataattccattacccagaggaaatttacctctgctaacattaaaaatgtttgaggccgggcacggtggttcatgcctgtaatcctaccactttgggaggctgaggcaggtggattgcctgagctcaggagttcgagaccagcctgggcaacatggtgaaaccctgtctctactaaaatacaaaaaaaaaaaaaaaaattagcagggtgtggcgtgcgcctgtagtcccagctatttgggaagctgaggcaggagaattgcttgaacccaggaggtggaggttacagtgagccgagatcgtgccactgcactccagcctggcaacagagcgagagtctgtctcaaaaaaaaaaaaagtttgaaaaaaattcctccataaatgcctcccaccaaactattttaaagcaggtcttagttatattttattcactatgatacaaggacttttaaaaaaacaccgccataccttataaaataatttttataccttctaatatgcaatcagtgttcagatttcctgactgactcagaattagttttgttagaattcaggatcttgaaaatatattgatatattcctttcattttttctttgcgtaagtatagatgtatatgtttaataaaaggagcaaataattactagagttttatatgtactggggcaatagtataagaattttacatagccgggcatggtggtgtgtgcctatagtcccagctacttgggaggctgaggtgggacgatcacttgaacctgggaggtggaggttacagtaagccaagatcgcaccactgcactccagcctgggcaacacaggaagaccctgttgcaaaaaaaaataaataaaaataaggctgggcgtggtggctcaaacctgtaatcccagcactttgggaggcccaggcaggtgatcacttgaggtcaggagttctagaccagcctggccaacatggtgaaaccccatctctactaaaaatacaaaaattagccaggcatggtagcagatgcctgtaatctcagctacttgggagggtgaggcaggagaattgcttgaacctgggaggcagagtttgcagtgagccgtgatcatgccactgcactccagactaggcaacagagaagactccatctcaaaaaaaaaacaaaaaaaaccccagaactttacaaatctacgaataactcatttaaaaatcattgagatatgaaatataaaatctttttttatgtgtaaaatgtgaaatgttcatttaacagatgaagacactgagtagagtgaggttgagtaacttgaccaaggtccctaggaaataagatctcaaatataaatttgagattatacatgtagttatgtatagttacctgtagttacacatagttttgtattttcctgtttttttctcatatgagcattttcttattaaagtttttttgtaatatagtttctagtgatagtataatattttagctagtggatgtattttaatttgttaactcttactggatatttgggttttttccaactttttgatgctataaaataatgtaataaacatttgtattcgtaagaataatgcctggcacaaagtgagtccttgataacttgttaaataaattaatgaatgaatctctgattattttattagaataaattcttataagttgaattactaaatcaaaagctatgaacatttttatgactcttgatgattattgctagattacacttcagacagatacttttaatgaatttactttctcaacatagtagtataagagtatatatctgtttttactgatctgattaacacagcggaatgtgtttatgtatgtcccataagaaaattgtttaaaaccattaaataaaatctctggcagtaaaaaggagaaaacaagtgtcatgatttccaaagaattgaacatagtctcacatttcttatgtaaaaagagaggaatactgaagtatcttgaatgtatgacttgggtattataatccccaggcatctaatgtatattttaactgacttgggtacctcatgtacaaagctgtttttgtgcatatacaattaaatgggatcagagctccttcacttttctcttcctaaaatactagatttttagtgttcagaaattttggaagggatagctgattataaagagcattagtgaatatacatactgtagttttcaatttataagtgcattgtgttccaaatctgtttgcaagtttgatatagtagttaggtttccagcctggttcacataacttatttttttttgtactaaactataacaataatagttttaacagtagaggctcttttgagcttcagaattgaatacatatataagcaaatgttactgctttattaccctttttcatcctggctttgtctctaccttccctgggaactggcccagtttgaatcttatttcctaatggagctcataatggggactaggatgtgtgaaattatttatggctaggtactggaggaaggtaagaaaggaatttcatgttatttttgggatttgaggtgtgcttttgaagggtatgatggaagatgatgtcctgttgtcctgttgtaaatcaacagacttttccttgaaatatgattttaagttagagttacgtttttgaggtttggcctgagaatttaaccttcatttatataataatatctaagggagaatgtgatacagtgtgttctaagaagcaaatgtaatgacagaataaatgtgtttccagtgcagctattctagtggcagttgtctctcttctttgaaacaagaggaggaatattgtcaaaaaggaaaccctttttaacaatagaaagtaggtgatgtttattgggatagaggatgggttaagagcaaggattaagagtcaaacagatataccatgtccgaactccattatcttgaacatgttatctacaattttcaagccttagttttcttacctgtaaaagggactgacagtaatttctggatcttggagttatgtgcagattaaataaattaatgcatataaagctcttattagagtcaatgagtatgtatattaggtcttgcaaacagaataattttacttaagaaataccccagaaaattttatcattgatgtatttttttttaggagaacttaggatatcagttaaaatggttacaattttaaatgcattgtagtgattttgatgtagtaatgtttgttaaaattcttatttttaagtactttagcatcagaaaagttgtttatgcatacatgaaagcatatattaatccctttaaaggaaaagtttgtggtattttgtctagaaaagtgttttctttttttaaaataaatatttagtaaagtgtaataataaagattagctttgttcataaggttagattgtatttatgctgattatagcatatgaataggactttccattaagaaattggctaaggtgatgttcatattgtgacttaaggtgaatcagctgttagaattttggtttactttctgcatcttgattggtagtatggtagaatggaaaatgccttggacctcaaggcaggaaactttggttgtaattatattgtagctatatgattttaggcaaattggttaattctgtgagtctcagtttgctcacctgtaaggcagaaataatgcctgaatgtgaacctcataggctttttgttatacatacatatatatgtatatgaaatgtatgatatacatatctcaaagagctttgggatatattgctcttgatagaaccacttacttatttttgtgatatggtggttatattttaaataaatacagtcatgtgttgcttaacaatgggaacacatctgagaaatgcatcattaggtgatttcatcgttgtgtgaacatcatagcatgtacttacacaaacctggatggtatagcctatgacacacctatgctgtgtggtatatagcatgttgctcctagtctgcaaatgtgtacagcatgttactgtactgaacattgtaggcaattgtaacacaatggtaagtatttgtatatctatacatagaaaaggtacagtagatcatccatatccttactgattttctttctatgtgttttactaattattgagggagaaatatgaagcctccaactataattagaatggtccttttaaattctgttttttattaatgtattttttattttattttattttgagatggagtcttgctctgtcacccaggctggagtgcgtggcacgatctcggctcactgcaacctctgcctcccgggtccaagcgattctcctgtctcagcctcccgagtagctgggattataggcatgcgccaccacacccggctaatttttgtatttttagtagagacggggtttcaccgtgttagtcaggctggtctcgaactcctgacctcatgatctgccctcggcctcccaaagtgctggcattacaggcgtgagccactgtgcctggcctttattagtgtattttaaagctttatccttgggtacatacaagtttagaatttttatgccttttaggtaaattggtacctttatcattatgtaatgtgcttttttatccaaatttatatcttttgttctgcagtgtccacatatcgattccacttttcttgtgatcactctttacaatgtgtatcgtttaccttcattttgattttaacctatttcttttttatatttaaatggatttttgttgttttgtaatcagcattcattaaaaatttttagctgaatactttttacttttgttagggttccctgtgtctcttcctttcatgttgtgccacagatgagccattatttatatcttttctctcattggaggttcctttttttaggggaaattaaataatctgaaatataaggaaaggatatgttgatttcaagaaaggttgtttttgttccttatctggcttgttcttgttgtgagggtgggagcaatactctttgcagctttctgcattctaggaagaagtggaattttacactaccatttgctttctttacaggtttaccttggtattcagtgtctgtccataggactaattaaaactataccagactccttctattttaaacctatccgttcagtctcaagttatctttttgcattgcctctcacgtctgtcccttcatttcttttaccagcagtgcttggtttttactgtttgctttggttttaatttcctttttatttttttaatttcagaaggtggaagcttatgtcattgacttgagcattttttatgcatgttttagtgcctctttctgactagtctcttcttttctccatccaatccatcctgtgcctgatttttagaaaagactggtgtacagtttgccccttttgctttaaaatttatttttcattgttacaacccactctcagtagcctccattgtaacaccctcccatgctcccaccaccattatgaagaagtaaagtccaaactttctcagtatttgtagttcttcatggtctgtgctttaaccttccttccagtcttattttttatttccattgttggcccccaatgcctgtgttctcttcccttccatatgaatcttccatatgaatatcttccatatgaatatgatagtattcatattcatgcgatctcccctttttttggaatacccttcttttttcttttagcctaaattctgtttttaagatgcagttaaagcttctcctttatgcatatctcttataagatatattatttgcagacttttccccccattctgtgagttgccttttcactttcttgatgatgtcatttgcagcgtaggattttaattttgatgaagtccagttttctattttttttttggtggtggttttttttttggttgcttgggcttttgatgttgtatctaagaaggccttgactaacccaaggtcatgaagacttattctgtgctttcttctaaaagtcatatggtttttagttcttgtcagtcttgggtttttttttgttttttttttttgagttaatttttgtgtatgatgtgaggaagaggtctaactccagtcttttgaatgtggatatccagttgtctctgcaccacttatggaaaagactattctttcttcattgaattgttttggtgcccttgatgaaaatcagttgactataaaaaccagggtttatttctggagtctcagttctattccattgctctgtatgtttattctttttttttttttttttttttgagacggagtctcgctctgtcgcccaggctggagtgcggtggcacaatctcggcttcctgcaagctccgcctcccgggttcatgccattctcctgcctcagcctcccaaagagctgggactacaggtgcctgccaccacgcccggctaatttttctgtatttttagtagagacggggtttcactgtgttagccaggatggtctcgatctcctgacctcgtgatcgcccacctcggcctcccaaagtgctgggattacaggcgtgagccaccgcgcctggccgtatgtttattcttatgatagtaccatactgttttgtagtatgttttatagctttgtagtatgttttgaaatagggaagtgtgagttcgacaactttggttttctttttcaagattacttttgttactcttggtacttgaatttccatgtgaatttttaggatcaatttgtcaatttctgttttaaaaaaaggcagctgggattttgatagggattatgttggatctagatcaatttgcggaatattgcattcttaacaacatgaagtcttcagatgcatgcatatggaatgtcttttcgtttaagtctttctttcaccagtgttttcagttttcagagtataaatcttactaaatatttattcttggtgatattattataaatggaattgttttctttcctttttggcttattcattgtaggtggatagaaataaaatctattttttttggataagagcagctaaaatcagttgggcacggaggctcacgcctgtaatcttagcactttgggaggccgaggtgggtggatcacttgaggtcaggaatttgagaccagcctggccaacatggtgaaaccctgtctctactaaaaatacaaaaaattagctgggtgtggtggcatgcgcctgtagtcccagctactctggaggctgaggcaggagaatcgcttgaacccgggaggcggaggttgcagtgagccgaagtcgtgccactgcactccagcctgggcaaaaaaaaaaagaaaaagcagctaaaatctatgtatttaacaaaaatctctaatacagtaccattttatttattatagtcctcatgttgtatattagatctctggacttgttcatcctatgtatttgctacttcgtatcctttgaactacatcttttcaaaggatgaaattgggtaatgtgatgcctctagctttggtctttttgtgtagggttgccttgactattcgggctctttttcagttccatatgaattttaaaatagattttttttttctttttcctaactctgtgaataatgtcattggtagtctgatagaaacagcattgaacctgtaaattgctttgggcagtgtggccattttaatgatattgattcttcttatccatgagcatggaatgtttttccatttgttcgtgtcatctctgatttatttgagctgtgttttgtaattcttgtagagagctttcacctccctagttagctgtattcctagatattttattctttattgtggctattgtgagtgggttgcattcttgatttggctctcagcttgggtattggtacacaggaatgctagtgatttttgtacattgattttatatcctgaaactttgcttatcagctgaaggaacttttgatcagagactatgggattttctaggtgtaaaatcatcatctgcaaacaggaatagtttgacttccttttttcttattccgatgctctttatttccttctcttgtctgattgctgtggctaggacttccaataccatgttgaataggagtggtgagagagagcatccttattttgttctgcctttcaaggggaatgctttcaacttttgcctcttaagtatgatgttggctgtggatttgtcatagatggctcttattattttgaagtatgttccttcaatgcctagtttgttgagctatataccacactttctttatccactaatcggctgatgggcacttcagttgattccatacttttgcagttgtgaattgtgctgcaataaacaagtgcaggtttctttttgatattatgacttcttttattttgggtagatacccagtagtgggattgctggatcgaatggttgatctgcttctagttctttgagaaatcctcacactgttttccatagaggttgtgctaatttacatttccaccaacagtgtataagcattcccttttcactgcatcctcgccaacatctattgtttttttactttattttccatataaaaaggggtttatttagatgttagaatcatctagtgattcagaaagattggacatgaatccacccaggcccagggctgagctgcagagcagccgctgacatccgcggggatttcacatgcaacagggagctctcacgtgcttgctggccattgtgctttaaatcgttttttccagcggacagctgtgactgcagttttcaaatgtgctctggcctccaaggaccaggggggcggtggggggcgggggtgtcctctgtataaaaagtgctgtcctgcgagcttcccgacggacactttggggcatctgagcgattcccggggagggcagctctgccttcctcaggctaccactgcagccaccgacggacattctcaccagcaatcaaccaaaaaacatcagagtctctgtgaacttggctgcgatgataagaaccaaatgttttctaatctaagacttgtatgcagaacacaggaaattgcaattaggaacaccctacaaaattgaacaacagtattttctaaaaatattttttacatcactttaaataatttacagaaagctacagaaatcatatttaccaggacacatctgttaaataaaagcattgtttcatgttggtgtacgtctatacagggctatgtataaccgactcctgtttctcctccctgcaaccacagaaccatcacacacacacacacacacacacacacacacacacacacacacacacacacacacacacacacacggatacacgcacagatacgctcctttccacaaatgcacgcaaaccgggacgcaaacccacaactcgagggcttagaccttcactgctgagctgccgccactgtcctccgtgcgcggagtgtcgctgaagtcactggcgtcactaaccaaggcgtgcccgcccaaggtgccctggtcctggtcgtccctatcgatgacccttcgtcaatacctcaggtctaaaatgctttcctccgagcccgagttcctcctgtcgggcaaactccgccctgtctgtgccttgctgcttggccagggcccgccgtccttcttcgccagcaagtgtgggcttccaaagacagggctgggcccggcctgggcctccctgaaggcagagaaggacgggccctgtggaggcagccccatgtcgggctgaagaggctggcctgcctgcccccctgggagacaccctttccaaaatggaagagctgggtggacagcgcggggagaagcccacaaggggtaggctgggcaggccccaggcggggccctcggaccccttgtctttcccgctcccgacgccccgcctccactccgcatctctactttccgagcgcagcgcgcacgggttccggtgggtgaagtcgctcgagggcagggtgtggtcagcctgggctccagagtccctttcagcttcctggctaggggtcaggaagccccggctcccgcagcccatgtgaaagctccccccagcacctccggcctcggtgcccgctgtggcactgctgggcagctgaataaaagcacttctggcagcatgctcggcccctcgtgagcgctggtctttctgaatgtaaacatttctcctgctcgctgagagccccttggcggagacactgccactggtgctcctgggcggtgccggatccccttgggcgggagcagcggggagccccttcctgccctggctgaacaggtcggctgtgccctgtgctccagcgctctctgcacctcatggcccttctgccggctgtgggacccccctggcccactgactccgcgtgcacacgccaggcggtggggcccgctccttcctgcacagcaactctggcctgaatgagccccatttcccgagagcagcagggccctctgcctgaacttctgaactgctcagactccttggccttttccgccaaaaacttactaatctacagttcgatgctctcgtcactgtccactgaactcctgtcgtcagacagggagccggggctgggagctgggccctggcattccctggggaaatggattcccttcagaggcggaggcagaggcgcatcccctcactcggaaggccggggccgtgtcctggctcctgacgccctcctgcttcgtcttctctgccatactgccacagacactgggaggtttgttccctggaccctcgccgctgtctctcttggacttggagagtcagctattaagcaccggcgggcttctgtctttccagtctctcgggagcccgcccagctgctccaggaagtgcatctgggcagtgctgaacctgaccttcctgcacgcagccctgggttccctgcacctcttcttgagctttcgcttggaccttaagtccttgatggccgtgtccaggtcctcgtcactgtccagggagctgctcttgtcttcggagctctccttctcgtccaggtgcctcacctcgtctgtcttaccctggccctgcgtcatgcgagtgtcgccgggccccttggctgcgccctcccctcccgggacctcgctggctttgccctggacgggcaggtcccgcccctcatggccgggcacggctcacgcctggctgtggtcggcatcctggccaccatctttcaccacctcccgcgttttcttgggcgtggacggcctcatggcatggccgccgcctctacgtttccttttgcagctcagcagcgggtccggtgttttagagaggggggccttggggccactggtctggctgttggggccaggcggtgaaagtgggccctgggcagcctgcgagcagctctcacctctggccagcaaactccccgactatgccttgagggtcaaaacgtctggatttcctgatcgatgctgtcgtcgctgtccacggagctactgtcgccgtcagagcgggaaggcacgttcagggagtagaagcgtgggcttgcagaaagggacctgttgctgccttacatgggggccggcagggtagtcttggaaatgcccaagattgcttccgcgcgcgtcagttcagcggacgtgtctgcctggcacgaggaccgttctacaaactcgttcctggaagccgggctcgctggaggcggagctttggtttccttcgggagcttgtggggaatggtcagcgtctaggcaccccgggcaagggtctgtggccttggtggccactggcttcctctagctgggtgttttcctgtgggtctcgcgcaaggcacttttttgtggcgctgcttgtgctgtgtgcggggtcaggcgtcctctctcctcccggcgctgggccctctggggcaggtccccgttggcctccttgcgtgtttgccgcagctagtacacctggatggcctcctcagtgccgtcgttgctgctggagtctgacgcctcgggcgcctgcgccgcacttgtgacttgctttccccttctcagggcgccagcgctcctcttgaccccgcttttattctgtggtgcttctgaagggctgcagggggctgctggcttcgggctgcccttgttctcctgcttggtcgtgaccctggacttgaggcttctgggctgcacgttcgtctttgctaaccggggaggtttgcgaaaggcgaactctttatgggcgcccttcagaccctgccgatgcgccacctttgcggctagctcttcgtgggatttcaagagtgacttggtcgaattttcgtttgggtctggttttttatctattgaccccatcacatttttgggtcgcatgctatctcttctcattcagaagctgttctatttccgccttaatgctctgctcgaaggagtcgttgctgctcgctctgaccgggaaggcagaaccctagtcctcactggatctcacctggctgccagggccaccacctgagccaggtacaagttttggggggacacacggaagtcggggcactgccgtgagatagttctggcttacatctactgccactgcctgcagccctggaaggctgggctgcgcctggctggcccctgccagccccgggctgtgcggctccactctttgcctttaggtactcccggatggcttccgcaatgtcccggtccacggaatcatcattgaatctagcaccaacgggccaaagtctgcagtttcctcctccctcatggggtcaaagtcagcaacaagaccacaggcaggcaatgcgggctgctccttgtgcacggtgggcttggcagctggcttggcgtctgccctgtggcccctctgtgcagcgcgctcatcggtggtgccccgagcaaccccgctgcgctgcagcgtgctgatgagcatctgcacccgggcgctcaccgacacgctctccaccccctcgtcagcctccgagaagcacccggggaacctaaagctccctggtgggccaaaggcctcccatttggactggggagcaacccctggagtagcgttcctgagaaacattctagcagaaggggagggacgcgcagagggacgacgctttatttctctgccagcttcatatactcaaaaggttggcagcggggtgcagtggctcaagcccgtaatcacagcactttgagaggccgaggcgggcggatcgcgaggtcaggagtttgagacccgcctggccaacatactgaaaccccgtctctactaataatacaaaaattagccgggcgtggtggtgtgagcctgtagtcccagctactcgtgaggcagaggccagggaatcgcttgaagccggaaggtggaggttgcagtgagctgagatcgccccactgctctccagcctgggtgacagagcgagactccgtctcaaaaaagaaaaaaaaaaaaaagagtggcaagtggtgcccatgagataaagtctgcaaatgcttctttgcagtttaaaaaggacgacgactataaacccaggatcaggacgacgttacgcatagatttattcttgacctgaccaacgagctcttgaaattctctttgcaactaggtcgactgtgaaactgcagccagtgtccccaaacgccccaaggataaggcctttatcactccgacgcatcctctctctgctttttaaatagacttttgactcggccaggccccctgccacccaccgcgctgaccctgcctgcgcttgcgtcccgcgtcccgcatccggggggaggcggcgggcccgggtctctggggctggcccatttacttagttttgtttttgttgcatttgcttttggtgacactccctttttgatattccacatataaatgaggcaataattttctttctatgtctgcttatttcacttagcataatggtctccctgtccacctcggctcccgcgcggggaggaggggcaagggccctccgcccgggccccgcctccccgcgcgccgctgccaccgccccgcacctttttttgactttttaataatgctcattctgactgtgataaggtggtatctcattatggttttaattggtatttcccttgtgattggtgatgttgagtatttttcatgtttcttggccatttgtgtatcttcttttgaaaaatgtccgtttggctgggcgcggtggctcacgtctgtaatcctagcactttcggaagccaaggcgggtggatcacctgaggtcaggagttcgagaccagcctggctaacatggtgaaactccgtgtctactaaaaatacaaaaattagctgggcgtggtggcatgcgcctgtaatcccagctactctcgagactgaggcaggagaatgacatgaacccaggaggcggaggttgcagtgagccaaggttgcgccattgcactccagcctggacgacaggagtgaaactgcattgcaaaaacagcaacaaaaaaaatccattcatctagtttgtccactttttaacaggattatttgttttcttcttgctgattttcttgagtttcttgtagattctggatcctttgttggatgtatagtttgtaaatattttctcccattctgagggttgtctcttttctctgttgattatttattttgctatgcagaaactttttagtttaagtcccatttacttagttttgtttttgttgcatttgtttttggtgacaccccctattttttagattccacatataaatgagatcatgcaataattttctttctgtgtctgcttatttcacttagcataatggcctccatgtccacctgtgttgtggcaagtgacaggatcacctttctttttatggctgaataatattccattgtttatatatactacattttgtttatccacttctctgttgacagacacataggttgtttccatattacttagctgtatatagaaatacaggtggtttttgtatgttgattttgtactctgaaaacttggtgaactaatttattagcttcaatagtttcttagtgaattccttaggattttctagatgtaaaataatgtcatttgcaaatagagatagttttacttcttcctttaaaatctggataccttttatttctttttcttgcctaattgctttgtctaaaatctccaatagaatgttgaatagaatgatgagaaggacattgttgtctcttcctggatcttagtgggagaccatccagtttttcaccattaagtagatgttagctgtggggtttttgtagatgcctttcatcagttgaagaattttttatttctagggtgttgagtgttttgttatgaaagggtgttggattttgtcaaatgatttttctgcttctattgatataataatgtagttcttgttctttattgaaatggtgtagtatattagttgattttcaggtgttaaaccaacattgcatctctggaataagtcccacttggtcacaatgtataatccttttgatatgttgctagatttggtttgctaatttttttttttgaggatttctatacgtgtatttataagagattttggtctttagtttttttccttgtgctgtctttgtctgattttagtatcaagataatactggcctttcacagaatggactgggaagtgttccctcctcttctgttttgatggggcagtttgtgaagaatagatattaattcttctttaaatatttggtagaattcatcagtgatgccatctgggcctggacttttctctgtggaaagtttcaaaattactaattcagtcattttacttgttataggtttattcagtttgtcagtttctttctgaatcagtttttatactttatatttttctaggaatttgtctacctcatctaagttacctagttcattggcaaataattgttcatggcattgccattataatcctttttatttctgtaaggttagtagtaatttttttttatttcattcccgattttggttaatttgagccttctctcttttatcttggtcagtctaactagaagtttctcaatgttggtgatttaaagtttttttttctggtttcattgatttttctttatttctctattctctaaaaaattttgatcaaacgatttttccctgttttttcactacccaatgtttatacttaatgtgtgtattggataactctattaaagttcatcatcatgtactttcatcatgtaatagtcagatatatcttatatataattgtactgcctacttttagaattgcttgttctttaaggctttgacttcataaaagttttcactcttggccaatattatttactacagcgtgttttcttcttcatgaggaaccatggaagaaatctttggtccaagacccattaagctttcctggagaagctaactaattaatttaatttaaccttatagatactatgaatcttataattgtttgttactgttttaactgccagctttcatgatagcatgcattttgggggatactaacatttttcttgtcatttttttcacctttctatattttactttcacaattataagtaaataaagacttgttttaacataaatcacactttatagtaataaagagcggatctctgttgctctccttttttactttaaaattttttatttttaattattatggagacataataggtgtacatatttatgggatacatgtgatgttttgatacaagcatataatgtgtaatgaccaaatcatggtagttggagtatccatcatcttaagcttttatcatttatttgtgttaggagcattccaattctaatcttttagttattttgaaatatacaataaattattgttaactatagtcactgtattgtgactatatagtgtttccatagaacactagatcttgttccttctatctaactgtctttttgtacccattaaccaactcctcttttatcctcccatccccactacccttcacagcttctggtaatcatcattctactctgtctccatgagttcaatatttttttttttttttaagctcttgcttgtaagtgagaacatgtacttgtccttctgtgcctggcttatttcacttaacatgatgttctctggttccaaatgacaggatttcattctgttttatggctgaataacattccattgtttatatgtaccacattttctttatccatgcatccattaatgggcattcaggttaattccatgtcttggctgttgggaaaaatgcagcattcaacatgggaatgcagatatctctttgatatactgtttttatttcttttggatatatacccagtggtgggattgctgtatcatatggtagttttatttttatttttttgaggaacctctaaactattcttttatagtggctctactaatttacattgccacaagcagttgtgcttttgttttttttttgtttgtttgtttttgtttttgtttttttttactgttttaacataattatttggagcttcattcatgatggcatatgcatcaacaatttatttattctcattactgagtagtatctcactgcatgggatttgtttttttttttaagttcaggggtacatgtgcagttttgttacataggtaaacttatgtcatgggggtttgttgtacagattatttcattgcccaggaatgaagtccaatacctactagttgtttgtcctaatccgcttcctctcccaccctccaccctctgataggtcccagtgtgtcttgttcccctgtgtgtgtccatgtgttctcattatctagctcctacttataagtgagaacatgcagcatttggttttctgttcctgcgttagtttgctaaggataatggcctccagctctatccatgtccctgaaaaacattgctctttttctattcctagttatatccatagaaatgaccattgatagtttttgcttactctgtccctccagtttttccttcctccagcatatacacaaggattttaattttacccaattgaagtcttacttatctacaccttttaacaagtcatcatcagtaattttggaataggcattagattcacatggttcaagattcaaacgaaagaaaagtataaacagtaaaaagtctcctcattcctttccctaagccacccacttctcttcagaggcaactaataaaagtttctagttttgcattattctacaccttgcttttttcatttagcaatatatcttgaagagcacatctccctctgtatttagcttaatccttttagtggattttttttttattttttgggtatatcataatttatttatgaatttcattgttgagagacatttagtttgtttttgaatgtgtaatactacaaaccgttgcggtgaattatccttatatatacattttcatgcacaaatgagagtacttttatagtgtagattcctagaagtagaactgctaggtcagaaggtattcacatttaaaaattttaaatttgctcatagaatgaagtctttgctcatagaatagtctttgctcaaatctcactttaccaaagaggcctatcgtgaccactctgcttaatactgtaacctgcccctacttctccctgaacttctctatccattgcactctattccttttctagcatagtatatggtttacctatttatactgctttttggttactgtctttttccctctgctccaagaaacaggaatgtttgttttgttcactaatatatatttctagcagttagaatagtgtttgatgcttagtaggcatttagtaaatatttattgaataaatcgaatacataagcaaacagtatccaaaattatcctccgtaaaaatgcctaatttcttttttttcctctgtatctcaatgaataaaaaaaaatactgtctttctttacccacttattttggatttttttggtcttgttttttgtttgtttgtttgtttttgagtttgacaaatttattggtattttattaaagacattcatctcagttgtttctctctcccagcttgaccttaggttaatatttcatttgggtcaagaaaagaatatcagaagaggtatgttattttaacaaacaggaaaatggacaaaaatggatagtttgcctacattaaagtgagttaaattcaagtatcttgatataattaaatcatataagaactaagagttctatatacatttccattgttttacctggggcttattctaaacttaaatactagttaacaaagagttaggaatatacacaggttgcttctctgagttattaccgactaaaagagctcagcgagcagttaccaccaataaaacggtctgaagctgcctccaaatacaatattgtagtaggagttttcaaggaaatttttatactgtatttttttttgtctgtgactgtgcttttaaagatgtgtttaactgtcacattaaaaaaaaagttcgtatacaatacaaaaatacaaaaagaaaacaccctacaatacacaaattcacaaagtatgtgtggtgagattccaaaaaatgtttgaagatgcattttctttccttctatttcagtatctaaaatgtgctttttgagaggccattggtcaatatgtatacatttaaaataaaccatataattttactagtaagaaagccagtagttaagttcaattcaaattggatttcacaagttagtaatttaaatccttggacaaagttacagaaagtgcatcttcttgttttccatcttcatacaatgttaaattttttttttttggtgtttataccttttaaaaaataaaagcagccaaatacttaagcaatatgtacatttaaatttttggtggtggtttgtattttaaaagaaacagttttcttatgattcgcttcaagttctggtggaaatgcttacaggaactagctaataaacaaaaaacaagagaagcacattcaaaatactgatttactttggtagcaaatggtttttctttgaagattaatgaagatagacaagacccattaaggtgaagtgggctatttcaaatattcaacagtttacatataaaaaagttattttaagagctaagcgtctgtatccactgatagcaatgcaacacctagtttatgatgacttgaaagaaaacaaatgcccatgaagaaaaaagctgtattttaattttatctaaatgtactttcagtcaatagttcagtaacattttcctcccaatacaatactccctctctctataaggctattcctgggagccagacaagtttaggtaataagggagttaagagagtaactgcttgcagttttaaatagacaattaactttttgcttccctcttaatgtgctaatagttgtgtctaaaaaaataggcaattcttaaaaaggtaccatttctgatttctttattatctgtaaactttggaaactaatcacacaaaactaccaaattagcaaatgtcttgaaatctgtatacaaaacataaattacctctaatttcaaactctcatttattggtgtaccactcaatcttttaaaaagatgaaaaagaaaaaaaaagtggctccaaaggtagtcttataccattcttaaaaaaaggaaactgttctttttaactttatacccacccacaccccaatttcaaaacatcatttaattgtcttggtcatagacatttcgaagatgagattttatattccactcccatagcttctggttatcagaaaacccatgctttcctttattgaaggagtttggtccagctgatgttggtgtatcccttgcaatattcttcatcctcatctttgcttctggaggcctttcctctgattcactatcttcatcttcattaaaagctgctgctactgaaagagtttttggagcaagagttggaacagtttctttaggcttacttgatccaagtttgatggatatgggtgatgctttctttgtcgtctgactacctatggcaaatccaaagttggagatctttgcaggctttgttggaggtctgcagcttcttcttcagctgatcgcttctcagcgctgcggctggaactttcctctccattactccagcagctccagctcattgcgacttttccggcttctcctctcccgccttcccatcagccatttcccccgccgcattgtttttttaagatttcagaaatctttctaatacaagttgggatataaataattagatatagaaaatagctacaaggtatttcttttaactttctccacccccagctcccagcagtcaagagtcaagccctaagtcttgtcctttctgtcagaaatagatacaagaaggatacagcaaacactgctataacacctctctcataggattcaaatcagtgtggagattattataggctccagatgagttaggatatctttaagtctcaatttaataaaactaattgttttcctgtgctttaaatatctctccattctatataaatataatatagatctaacagatgtagtcttgaaatagatggctataatgtcagtgaagtatttttttccttatttatatacattataactttccttatttatgtacattataattttaaaggcctgatagtcataattattgatgttcagattggtagttatttctgtctcttatgtattcaactataaacatttaatcaagtttatgagacctagatatttagcagagttttggagtaaattattttattaaacaaagaatataaaataaacatttctacttatgttcctgttttaatttacctcatttatatgcatcttgatattgcattttcatattctaaaaactatttttaaagacaggttgattcagaattacagtgtacttgaaaatcatcaggtacctattattagttttcacccacattgaatctgtgtttcagaaactgtctaccaaactttgtttattaagtaattattttccctagttttattcaagatatacaaagctgccaactagtgcttttcatcagcatcaggtaaattgtgttactatactgcgttgaattttagcaaaggtaaagtatttgctattttagttattgtagctttattgaaagcaaacatataggttttttaaagtattggaaaactcgccagattatcattatatgacttggaaccctagaaactcccagaccacgagacttaatggttaatgatctctttcagttctctttcaacttggaattctcttattccaatgccaactcattgctcttttggaaagacccattctttcctctattgtcttggtacctcctcaggacatattccccaaagtggaaatgtcagtttaagataattttcagcattgtgtagaataagaatggttagacagctgatgtcagcaagatggtggaatagtagcgctgtccttcagaaacaccaattttgacaactaccatagaaagaatgcctttatatttgagcatacatggaacattctccaggatcaatcatatgtcaggccataaaacaagtattaatatatttaagaagattgagataatatcaagcatcttttctcaccataatggcataaaactagcaagcaaaaataacaggaaaactgggaaatactcaaatatgtgaaaattaaacatgttcctgaacaaccaatagtcaaataagaaatcaaaatggaaattaaaaaaaaaaaatgtgatacaaatgaacatggaaacagcacatcaagatttgtggaatgcagcaaaacagttccaataggagatttcatagtgataaacaccaacatgaaggaaacagtaggaccccagataagtaacctaactttacatctctcagaactaggtagaaaaagaacaaataagcccaaagtaatagaaggagggggataagaaagatcacagcagaaataaatgaaagactcaaaaaacaatagaaaagagcaacaaaatgaagagtttttttgaaaagataaacaaaattgataaacttttagctagaataagaaaaaaagaagattcaaataaataaaatcaggaatgaaagaggagacattatgactgatatcacagaaatacaaagaatcctgagaatactttgaacaaattatatactaacaaattggatgacctgaaagagacagattgtttgccacatactacctgctaagactgaatagcagaagaaatagaaaatctgaatgaccaataacaaataagggactgaatcagtaatcaaaaatctaccaatagagaaaagcctcaggacctgatggcttcactggtgaattctaccagacatttgaagaataccaatccttctcaaacgttttcaaaaatttgaataggaggaaacacttccaaactcatttaacaaggctagcattaccttgataccaaagtcaggcaagggtatcacaagaaaagaagattataggtcaatatccctgatgaacatatgtgcaaaaattgtcaacaaaatattagcaacagcacattaaagggatcatacatcatgatgaaattggatttatctctgggattcaaggatggttcaacatatgcaaatctataaatataccacttcaacagaatgaaggacaaattatgtgatcatcttaatagatccagaaaaagtgtttgacaaaacttaacattctttcatgatgaaaactctcaacaagttaggtataaaaggaatgtacctcaacacaacaaaggttatacgtgataagcccacagctagcattatactcagtggggaaacctaaaatcttttcctttaagatcaggatcaagacaaggatcatttgtcacttgcattcaacatagtactggaaatctagccagagatattaggcaagaaaaagaaataaaagacatttgctacagtttgaatgttttccccctctaaaactcatgttgaaacttaattcccaatatggtagtattaaagatggggcctttaagaggtgattgagtcctgaggcctctgcctttatgaatggatcaatctattcatggattaattggttttcctgagagtggcatcagtggctttatcccaagctaacatcttagcatgctcagttctctcaccatgcgataccctgcaccacctcaggactctgaggactcacagctattattcaaaaagtcagaagataacagatgttagagaggatgtggagaaaagggaactattgttcaatgttagtgggaatgtaaattggtatgtcttttatggaaaacagtatggaagctcctcaaaaaattaaaactaaaactaccacatgattcagcaatcctaccttttggtagatatccacaggaaatgaagtcagtatgttgaagagatacatacactcccatgttcattgcagcattattcacagtcgcaaagatatggaaacaacctaagtgtctgtcattagatgtatagataaaatgtggtacagattgttttaaactaatgattggttatatcctgataaacccattgtaagtcaaaaatatcttaagttaaaattgcattaagatcatgacaaacccagttgaaaaatcgcaaattgaaccattgtaagtcaaggactatctgttatatatattggaattttattcagccttaaaaaaggtaggaaatcctgccatttgcaagaacacggatgaacccgaaggacattatgttgtattagtcagacacagaaagacaaatactgcatgatctcatttatatgtaaaatctttaaaaagtcaaatacatacaaacagtaaaaaggtggttagcaggggtggggagcctggggagaatgtggagatgtttgtcaaagggtacaaactttcagttataaaatgaataagggttagatgtggcagctcacgcctataatcccagcacgtttggagaccaagataggaggattgctttaggccagagttagagaccaacttgggcaacatggggagacccccatctctacgaaaaattaaaaaaaattttacaggcggtgacatgtacttgtagtcccagctacttgggactctgaggtaggaggagtgcttgtgcacccaggaggttgaggctgcagtgagctattattgtgccacagcaatccagtctgggtgacagagtgagaccctgtcatgagacctgtctcaaaaacaaaaacaaaaaaagtagtagttctggacacttaatttacagcatggttgattatagttaataataatgttttgtattcttgaaattcactaagagaaatcttaagtatccttacgacatacacacagacaaaatggtgactatgtgaagtgatagatatgttaattagcttaattgtagtgcagtagtgcccccttatcctcagaggatatgttccaagaccctcagtagatgcttgaatccacagatagtacttaaccctatatatactatgttttttcctatcctgtacatatatacctgcattaaagtttaatttgtaaattagccacagtaagagattagtaacaatgactaagaaaatagaacaattatgacaagatgctgtaataaaaagtatgtgaatgtagtctgtttctctcaaaataggtactccgctcacctgttttcaaaccatggttgaccatgggaaactgaaactgtggaaagtgaaaccgtggatatggaatgactgatgtaatcacttcttattgtatagatgtatcaaaatatcacattgaacaccttaaatataaactttttcgtttgtcaattgtacctccataaagctggaaaaaaatgtgacctcatttgtttgttggtgatttccttttttgaaacagcacatgtcatatttggtaaaaggagttgatattgttaatccatataattggatctgagttgtaggaattaatctccttactcaatggttttcaaccttgtttccaagagtagtagatatcagttttgtagctatttttcagaaaagctaattagtagccctttgagtatggtggcagttttctttcctatatggttatacctttttggatggatcatttttgggctttgagctcaataatctaagcagagagcttgaccagaaacttagttctaggtaggttatgtatcatctgttcagaaaatgaggtctgtaatgtcgttctttgtgtgtgtgtatgtgtgtgtgttacccttattgatacttaccagtttgctattaatgtgtgaatgggagctgaagaaactatagtggaaccaacagtcttaacttacactttggtggttcagttgctgcttgtttctctgagcatatggagaaaaaaaagaaaaaaaaacaaagagagaaaaagccactctgtagctactgccacaactttttttttttttcctttttagaactacgctagtgttagtgctggacactacaaggctcttggggtaaagtagtgaattagatacaatatttctgccttcaggatgcttacatattcatagttgagatagggacaaatgagcaagcaagcaagtcacagttcagttaagagctgacaggtttatgaactgagttccataggagtttttcaaatttattttaatttttctgatcatatgctgcatgatctgtaagagttcttaagggagggagtcccaggtgctcaacttttgggcagatggccaggtaaatctgaatttgccaggtacatgtttttctggaaatagaatcaactttcttacccacaaaggcattgtgtaactgggtgactgattcacatggtgttcacccctgcatgttgtttcaaaaatgtgattgagtacaagtaaggtcagtttttacattcctcttcttggctttgccactcttgccttttacttctgtgcacatccaagaatgtccttaacactagactgctgtaagctcatattatacaggtgaaattttctagcgtcttagcctgttattccttctgttcctacgtatcacctaggtaaggaggaaatctaggagcaaaagataaaggcagttcttccccctatttctctgtaataccttcatatttcatttaatgtaaccctactgctaattacttattacagtctcatgaactatgcgtaaggatatatcttttgaccctgaggtagagcacaaaagcacatgtttcttatgacttattttcatctttcatatttcacaaagtgcaagctagatagaacattatttttaacttttgaaattgcaacttaaatttatgtcagttgtgacagcatacatagtagtacttttctgatagttccaggatgatttatgtcaccacttggtggagctcttttataagtaagtgcattgtttaaaaaagcgagtataagttgtcactaattaggggttatcattagattggttcaaatgaactcaactaaatgatggtataattggtaatctcttcaagtactgagtgtagattttgttttaaactgtaatgtatgtgattaaaattttgataaagatttttctcgagtatttctaatttttctctctcctgctttatgtaaatgtagcacttattgacttttctcctattttacaattgtagataatttaaaaaatgtatgcaggattaataaggaaaatgaaaactgttcgtaatcctaccatgtagagataatcgtgaacattttaatatatattttcattttctcttcttttttgttttttcacaaaattggaatcaaaatatgtgcagaactttttattctgtttttttcttaacgttatatgttgggtatttttacatatccctttaatattccttgaaactgttttgggtttttatattattctatgatatagctctatcacaatatgtttaaccattctgttttaagatttttaggctcttcctactatttttgctattataaataacttttcaaacatctattacactaaatctttttttaatttttaagttttgtgggtacatatcaagtgtacacatttatgggacatatgaaatgccctgatgcaagcatgcagttctgttactctaaatcttgactcaactctatttttacttgttaaattcttagctataaaactgaggtattttaaggatttttatgtaccttaacaaaatgtccttcaattgacattattctcaaatatgtttgttgaaaatatgtttgttgaaagtacctttttttttttgcaaagtgcttgttctttgcccattttccccccattttttgttctttttttggtgtgtgtgggggaattgttttggctaggtaagaattacttttcttctgtttcaacaatttttaaagtgctatcctgagtccttttcataattttcaagaaaacacatcagttacagattttaggttgcaaattgttgttggaaaaggagacctggaccttaaaagaggaatcaggctggaaagcagaatgagatatgagaatcatctgtatatgagatgatgagggctgtaggagtggatgagagtgctgaggaaaaaagagaatggtgggaaaaaagcccatggagttgagaaaccccatgaaaaagttgtgagaggaaaagagaagagaatgaggatgtgagggcatttaaaaaagctactgaaaaaagttgcatggaggtatactgaaggagaaaaattgcaacagtgtcagatgctgcatagaggtctttctggattttgcatccatgttcatcagggacatcagtctaaaattctctttttttgttgtgtctctgccaggctttggtatcaggatgattttggcctcataaaatgaattagggaggattccctctttttctattgattggaatagtttcagaaggaatggtaccagctcctctttgtacctctggtagaattcggctgtgaattcatctgctcctggacttcttttggttggtaggatattaattactccctcaatttcagaacgtgttattggtctattcagggattcaacttcttcctgatttagtcttgggagggtgtatgtgtccaggaatttatccatttcttctagattttctagtttatttgcgtagaggtgtttatagtattctctgatggtagtttgtatttctgtgggatctgtggtgatatcccctttatcattttttattgcatctatttgattcttctctcttttcttctttattagtcttgctagtggtctatcaattttgttgatcttttcaaaaagccagctcctggattcattaattttttgaagggttttttgtgtctctatttccttcagttctgctctgatcttagttatttcttgccttctgctagcttttgaatgtgtttgctcttctctagttcttttaattgtgatgttagggtgtcaattttggatgtttcctgctttctcttgtgggcatttagtgctataaatttccctctacacactgctttacatgtgtcccagagattctggtatgttgtgtctttgttctgattggtttcaaagaacatctttatttctgccttcatttcgttatgtacccagtagtcattcaggagcaggttgttcagtttccatgtagttatgcggttttgagtgagtttcttaatcctgagttctagtttgattgcactgtgatctgagagacagtttgttataatttcttttcttttacatttgctgaggagagctttacttccaactatgtggtcaattttggaataagtgtgatatgctgagaagaatgtatattctgttgattttggatggagagttctgtagatgtctattaggtccgcttggtgcagagctgagttcaattcctggatatccttgttaacgttctgactcattgaactgtctaatgttgacagtggggtgttaaagtctcccattattattgtgtgagagtctaagtctctttgtaggtctctaaggacttgctttatgaatttgggtgctcctgtattgggtgcatatatatttaggatagttagttcttcttgttgaattgatccctttaccattatgtaatggccttctttgtctcttttgatctttgttggtttaacgtctgttttatcagagactaggattgcaacccctgcctttttttgttttccatttgcttggtagatcttcctccattcctttattttgagcctatgtgtgtctctgcacgtgagatggatctcctgaatacagcacactgatgggtcttgactctttatccaatttgccagtctgtgtcttttaattggagcatttagcccatttacatttaaggttaatattgttatgtgtgaatttgatcctgtcattatgatgttagctggtgattttgctcgttagttgatgcagtttcttcctagcctcgatggtctttacaatttggcatgtttttgcagtggctggtaccagctgttcctttccatgtttagtgcttccttcaggagctcttgtaaggcaggcctggtggtgacaaaatgtctcagcatttgtttgcctgtgaaggattttatttctccttcacttatgaagcctagtttggctggatatgaaattctgggttgaaaattcttttctttaagaatgttgaatattggcccccactctcttctggcttgtagagtttctgctgagagatccactgttagtctgatgggcttcgctttgtgggtaaccctacctttctctctggctgccttaacattttttccttcatttcaactttggtgaatctgacaattatgtgtcctggagttgctcttctcgaggagtatctttgtggcattctctgtatttcctgaatttgaatgttggcctgccttgctaggttggggaagttctcctgtataatatcctgcagagtgttttccaacttggttccattctccctgtcactttcaggtacaccaatcagatgtagatttggtcttttcacagagtccggtatttcttgtaggctttatttgtttctttttactcttttttctctaaacttctcttcttgcttcatttcattcatttgatcttccatcactgataccctttcttccagttgatcgaatcagctgctgaagcttgtgcattcatcacgtagttctcgtgccatggttttcagctccatcaggttatttaaggatttctctacactggttattctagttggccagttgtctaatcttttttcaaggtttttagcttctttatgttgggttagaacttccttctttagctcggagaagtttgatcatctgaagccttcttctttcaaatcgtcaaagtcattctccatccagctttgttccgttgctagcgaggagctgcgttcctttggagggggagaggcactctgatttttagaattttcagcttttctgctgttttttccccatctttgtggttttatctacctttggtctttgatgatggtgacgtacagatgggggtatggtgtggatgtcgtttctgtttgttagttttccttctaacaggaccctcagctgcaggtctgttggagtttgctggaggttgactccagaccctgtttgcctgggtatcagcagtggaggctgcagaacagtgaatattgctgaacagcagatgttgctacctgatcgttcctctggaagcttcgtctcagaggggtactcagctgcgtgtggtgttagtctgcccctagtggggtgtgcctcccagttaggctactcaggggtcagggacccacttgaggaggcagtctgtccattctcagatctcaaacttcatgctgggagaaccactacgctcttcaaagctgtcagacagggacatttaagtctgcagaggtttctgctgccttttgttcggctatgccctgcccccagaggtggaatctacagaggcaggcaggcctccttgacctgcggtgggctccacccagttcaagcttcctggccgctttgtttacctactcaagcttcagcaatggcgggcgcccctctcctagcctcgctactgccttgcagtttgatctcagactgctgtgctagcaatgagcgaggctccgtgggtgtgggaccctccgagccaggcacaggatataatctcctggtgtgctgtttgctgagaccattggaaaagcgcagtattagggtgggagtgacccgattttccaggtgccatctgtcacagcttcccttggctaggaaagggaattccgtgaccccctgtgcttcccaggtgaggtgatgcctcgccctgctttggctcacacttggttggctgcactcactttcctgcacccactgtctgacaagccccagtgagatgaacctggtacctcagttggaaatgcaaaaatcacctgtcttctgcatcgctcacactgggagctgtagactggagcttttcctattcggccatcttctagtctttaatttttcatctgtatgatgagaagtgaatccaatgacttttttagattgaaaaattttgaatcaaactcaactaaaatgaacaaaatatatgaaactacaataatgaagacgttatgatattggtgaaaaaagacaagtaaatcaatggaacagaacagataatccagaagtagacccacatatatatattattataagttcattttctacagaggtgcgaaggtaatggaggaaggatattcttctcaacaaataatgctggagcaattgggtatccaaatgcagaaaatgaacttcaatccttacctcacaccatttataaaaactaaccagaaatgaagcatagacctaaacttctagaagatgacataggagaaagtcttaatgagcttgggttaggcaaagatttcatagatacctaccactgaaaacataacccataaaagaaaaaaaatgaataaattgagcttaatcaaaattaaaaacttctattccttgaaatatacttcttatggaagtcaaaacacaagctgcatctgaaataaaggttacattttgctcataggaaagttcttcaggtccttaaaaatcagaacctacttgtagaacatttcacttatgcattttatcatatcagatgatcctgtgtttcattgttttgactactaaatgttctaataaaattcgctgttttaaaaaaatgaataaacaacatactaaattttagcaactttcgcttcattttttaatctttaaaagagagagagagaaaaaaaaaggctggaattgatgaaaggacatatattgagagcagttattgcctgagtgcaaagaaacaaaccaaaatggtaagaaataagcataaaaatttaaagactatggtagttggggttatttattaaagagacaaacaacctttgacatcttattagttcccaagaaattgaccatattaacataaacacaaatacagaagttgatttttgttcattttattaaaatatatatttttaattagtcttgaaaacagtgaagcagtgtatactttgtatcttcaatttcagaaacagtaagtatgtaacatagtttcaaaatcagatttattgaggtataatttacatacacaaaatatgccaattttaagtgcacagttcaatacgttttaacagacatattcactcatataatcaccaccattaagatatagaactttttgatcactccagaaagttctttcattcccctttgcagtcatttcccaacacctcccctctgttccgcaggcaactacagatctactttttgactttaaagattggttttgccttttctagaatttcatatgaaaggaattattcaatgcatccttttgagtctggctttttctcagtgtaataattttgagatttatctatattgttatatatattaggacatttccttttgattttcaaataacattccattgtagggatataccccaatttatttttccatgcacttcttttttttttatatttgggttgtttgtagtttttggccattatgactgaagctgctatgaacattcacatataatgttttcatttctcttgggtatgaatatctgggagtagaattgctatgtgttatgaaaagtgcatatttaactttataagaacttccaaacttgttttccaaaatgattgtgccattttacattttcaccagtgatgtttaagtgttccattgcactacatcctcactgacccttgatattgtcagtcttttacattttagctattctagtgggtgtataattgtaatttaagttgtaaaatatttacatcccaagtagctaaaattaagaaaaagtttagagttggatggtggtaaacctttaattacctgtaaaatttggtaatctggaacaactcacttatcctaaagcttttatataattgatatttcaaaataatgtaagatggtattacatgctttttagctctattgtaatctccagttaagagtaagtaaatagttccaactatttaatgaacattaatttgacatttcttttgtttccaacttaatgtaatccaaaattacccataaaatgtaatatttaggggtggtatatattgtggggaaaaatgtgttctaaagataatgaaaaagtactctagtgataatgatagccatcaatcattaagaactgactgtatactatatactacgccaaaggctttataaatataatttcatttaattgttacaaaatggggtacatattcttattttgattttacaaagacagttaaggaactgaaacatgaaatacaaggttaaaaataattgaataaataaattgataaaaggaatgaatgaatagagcaaggaaagaataagcgaataagaacgtgggcttgtttttttcaaacaaattatatgttatggactctagatctcttaacttagcttcagtgacattggattattgaaaaatgaaactattttgaggaattgactgacccctaaagtttccacaataacttatttaattttttatctttctaatacttttttgccttataatataaaatttgaatgtttgttattagtgtgaaatgaaatcctttcaaatatatgccatcagaaggatgtgttacaaatatacagtattacaaacatttattttgtatgctgaataagaaaaaatcagttataatacagttttaacatagtatccagtgtgtgaattatttaatgaaatatttgatctttattttttgttcccagggaggttatattcaaaagaaaaaggaactgtggggaatctgtatctttattgcagcagttgacctagatgagatgtcgttcacttttactgagctacagaaaaacatagaaatcaggtaaagtttcttgtataaatataagcctctgccataaaaggaaacgaattctggattttcctctcaatagacttttgtgaattagtgagaaatgctaaaataaagtaaaacaaaaagaacttggaccaaatagtgaactgccattctctcatggagccgttatgaaagtgtatttatgctgtatttctttaagaggtagcagtttgtgtcctggaaaaattttcattgtgtctctcactattcatgtgtaagctttcttaattgtggctgttaataaagtgaacagaaaagcaaggatttgtaaataggcttgttttatattaaaacctttatataagtagtttgagtttatcttaaaggtatttaggtaagatttattaaagcctaagattgttttaactagaggatattataactaaatgctttttttcagattatatattgatttgaacatgctacaatacttgaaccagttaattacttaataggtgtttgttgttgagtttataagcctcataagaagagtttattaatgtgttttcaataatgtatgaactttatcttcagaaagtatccaggacttccagtcattttctttgcaacatatttacaaaaatgcaacagtatgtatttttaccaaataggtaattatgtttctccttgaacaaagacatctagaattaaacataattgatattttatttaaacgagatagattaaattgttgcatttttgaaatactttttttgctatatctaaataaaatgtggaaacaaaggccttgtatatttgtaaatatacaaaataatagaaatgacataaatagttcatagagtcaatacctgcaacaccacaggcactcactgcttctctcccttccttgttttcttcccttaagtttcccctagaaaaaaggctttgttgtaacaattcagttttcatggtaatctcaggacaggtattgccatatacctcaaaaaaactggaactgagagtagttctttaataaatgctattctgaggctgatttctttttctttggatatatctgcacttttgttcctttctcttttctcttctaatcaacattctgatcttctattctttgtcatttctactctttctttatttgctttttcacatagcttgtcatggctcccccattcctttctgtatcataggaactttaataaccttttggttcccctgctgattagctgaagcttttatttccccagtgtttgattggtccagcccatttttttgagtgagggctataactcattggttgctggacagcctatggatgggtcaggtgactatcttttgtttcagttagctgctttggtataattccttatacaaaattcatgattagaaattagcatgtgagatgtagttgatgattgctatctttaatatcctattggaaaatgtatatattgatgtttcaaatacgttaatttttatggaaaagagtaacgaagagtgatttaaagttattatttaaactgcttaaattatttaaatcaactttccttttccaaaaataattcaattctaaaatcattggtggggcaaataaagtatgcattttggtgtgtatctctgacaggagggtgccacagggcccagagcaggatgttagagtcaaagtagggtgaggagggcatcctttgtgtgggggcaacctgatggggctgctttgtgtgcagtgtcagagactaagcagggtgtgcaggcagccggtgcacaagtgaggtgaggagggcagcctgctgtggggagtcagaacccttccacagtgaggaagtgtctatgctaaggggtggggtaagtccagaactgggagtcagttctgagaagaacagaaaagtgtccacacgggggagggggtggctttggagatagaaaatggttacttacagggggattgattaaatgagtaagtaaactgaggatgaatgggttccaggtttcccactgtcaatgaagagttacaaatatagaaagggaaacactaaaatgaagcatatggttttatattggaattggatgaatggatgtgaactcatgttttttaaaacacatagacagatacagaataaatatacgcatatctcttcttgacccttcgttttcttatattctcaatgatgaatagatataagcataggtatatagataatagaggtgtaagttgaaggctaattatttttgcaaaaagtaattccttccaaaggatatagtagtgatttgatgtagagctgataatcttttgaattgaaatatctatgatttgaaaacgaaataacacaaatttttaaggttactgatttacttttttctattctttcctttgtagtgtccataaattctttaacttactaaaagaaattgataccagtaccaaagttgataatgctatgtcaagactgttgaagaagtatgatgtattgtttgcactcttcagcaaattggaaaggtaaagtaaacattttattaggtttacactctgattttttatgtcattgttcacaattagattctgggaattatttaacacatttagtaaagttagtaagtattaattcttagacttgtcccttttaatgttagctcattaattcttagctttcttatttatccagtaatatgcattctgaatgcttcctggaaaattaaccgttttattatcctttcatgtcttccatttgttttcaaaaactttaagcttatctcccattttagccttctttgccagaaaacttctagttctgaatagaatggtgacataaatttaaacttcttcctaatagtgttatttagtttggaacgagaaaacacttgcaatggatggtgtatgtgacctatactataaagtaatgatttgtactcccaatggtggcttagaggactttttccattacagttcgagtaggagcataattaatatgcttaggttaagttttttctatacttttcatcaaaactgtacttccctaccccaaatgtttcagcccttaatttggcatatgtctgttatcatgtttgttttgaggctcatttcatttgcggttaagagaatatgaaagttacagtgttagctaaataagcaattgtgtaatagcatggtaaagggagaagggtaaaagaggcatggccctattctggagagaatgaggatggagatagaggtggaaagaagcatctccttaggaggatggctctattttctccccctttttcttttttgaccactaaaacttcacaactgtggtggaggatgagaaaaattagagaaaaaactcaaaggcctagggcttttgaaggactgtcttttcttgcccctggttttaattgtaatatggtagcattggccatctttttttttttttttttttggtcttttcttgatgagaatagaagctttttgcacaagaaaaagggaaatttttaattattaatggagataaattatctaaataatttgcataacaaacatgaactaattatagaatacttggaaaacacagaaaggcataaataaaatatgaatcgaccaaaatgtcaacagtggagagaatcacttttcatattttagaatgtttctttcctttgggtattgtttcacattgagtagaatattatatatatgtgtgtgtgtgtgtgtgtgtgtgtgtgtgtgtgtgtgtgtgtggcttttaaaatttacctaattgtgactttctaaatttttttctattctttaaacttgtttacaacctttttaattcatatctggtagcttattttaatatgatcctaaatacaatgttgctttagagtttttttggtacaatattatttaggcccctgaaaaactggaaacaactgatattcacagctgaagttaaacaatacatattaaacatatctaaacataaaatgttataaatataaaataaaatgtgataaagaataatggcaatattggcaagtgcttctaatgttaaacaaatgaagcaggatatactctgattatgactgtgtgtaaggaagaaacctagaccactaacgcatagaatgaaatgactggagagaagtttaccacaatgttaacccaagttttatatgagtaacttacatttgtaaggaggatgtattacctttctagtaaacaaagcaagcaaaaacttctttaagccaactttaatgagtattctatacatataagtactttaagatctataatcatcagggtttttttttttctagatatagaatttggggactcattggtaggagtgatttggggtacagttctgattttttttcctgctatagtaatttcgactggatgcttccaagttgtttgctctgctgtctgagataaggaatctgcttggatatttgtttctgttgtaagaagcaggaattacatagtggacaaagcattacattgtatatgtttaagggtgaagggtaactatagtggtgattttggtcagagaaaaaaccatagaaggcaatgtccgaatagggtttacaggaaaaatagaaattcaccaagcaaaatgagtgggaactgggagcgagcatcttagagattagcatgtgtacaaagccaaagcagtgatatcaggatgtactttgatattgctaatggctgaaaggtaagaagggatcagattggtagtaatcttgggctttgccctgcaggcagtggaaactccttgaatgattttaaactagggagtaacagttggatttggcctcaaaagaccactcaggactttgtaaaagggatttaaaatttttattgacaaatcatatgagataatttaaagagtaaactttactaaccttaggtggatcagctgggtgttttctatcttatttataccttttttttgaagactaattgagaggattaactgtaattatatattaaagtgatgtgagatgtcataaattgggaaaatctacttgaactttgttttataatgctatatattttttgtttttaaaatatatacttcttaaaagaagataaataaagcatgagaaaactactatgacttctaaattacgaaaaaatgttaaaaagtcataatgtttttcttttcaggacatgtgaacttatatatttgacacaacccagcagttcgtaagtagttcacagaatgttatttttcacttaaaaaaaaagatttttatggaataatctcaaacatcttgatagttagggttagtttgatcgattatagcaggctacttcataaattaagcccatagatttaagtcctgtgtagattatttatcttctcacaaagaaaatagtataaaatacatgccttgtactacaaagaagaactaataaggtggaattgattcaggacagcatatcaccaactctgagaaaaatgcaacaaatgcaaattcattgactaaatctttattgagggtctgttacaggcactttattaactaataatcagcataatttctgtgtgagaataaatgtaaaaatctgtattaaaatttccaaatgattattttaaatgtataatgcatgctctaacagtatgcccatgtagagctccagagttttttcttggaaacagaatgagtagtacatgagattttctgcctcattggagtagtattgaagataattaatataaagggaaattgtatatttactgattaattgatatcaatctattaattccaacaagtgaatgtctctggaaagattatcaaggcaaagtgttaaattggcaaactaaagtcatccaaaccttcatttttctgctcacagtgttgataattaatcagaaaaaagagcaaaaaatattaaggtaatttgaaacaaagtatgttataacatactatgttttttatatatttttatattagaattgaaatattcagtatttcttttacaaaatttttctttcaaaatgtatacttttttttcttaatttttttttttgcagcttctcatggtcaagaatgtatactattctgtgggctaaatatcatatcttagaattataagacatagaaacattaaatgaatagagataaactcaggtgtaaattatgcaattaaaatggactgcattctattatgcatttaactaaggtcattttttttttaatgcacaaaaagaaacacccaaaagatatatctggaaaactttctttcagtgatacatttttcctgttttttttctgctttctatttgtttaataggatatctactgaaataaattctgcattggtgctaaaagtttcttggatcacatttttattagctaaaggtaagttcattatatttattaaatgctaatatttcaaatgtaataattaaattggcattcctttggactaaattccccaatttttattgagtaatgtactcctccctcattctctgcttggcttattaactgttagcaagttcctataattctggtactagaaacaaccttggaaatgctttatttaatttttgtttctaatattccatcttccctccctttcttttttttgaagaataatgatgttactgttttcataaaaatgatatttgctcatgataaataattcaaataaaataattttggtcacaaaagcacaaagaaaaattatctaaaatccacccagggataatcggcattaaaattacataattgggatgcagttaaggtatagaatttttattatttttgtttgtttatgcaaacagtgttaacttgttatcagttgaaataatgggttataagatagtatttgcaagcctcatagtaacctcaaaccaaaaaacatacaatgtagacatgaaaaataaaaagcaagaaactaaagcatatcatcagagaaaactactttcactaaaggaagacagaaaggaaagaaagaaggaagagaagaccacaaaacaaccagaaaacaaataacaaaatgacatgagtaagtccttacttaccaataataacgttgaacataaatggactaaagtctctaattaaaagacacagactggttgaatgatggaaaaacaagactcatttgatctgtttcctacaagaaacacactttgcctataaagacacataccgactgaaaataaagggatggaaaaatatattccatgcccacagaaaccaaaataagagcaggggtcactatacttatatcagacaaaatagatttcaagaacaaaactgtaaggacaaagaaggtcattatataatgataaaggggtcaattcagcaagaggatataacagtgttaaatatttatgcaactaatactggagcacccagatatataaagcaaatattattagagctaaagagagacataggccccaatacaatagaaatagctggagacttcaacaccccactttcagcattggacagatcttccagacagaaaatcaacaaagaaacatcagacttaatctgcactatatagaccatatgaatctaatagatatttacagaacatttcatccaagaatatacattcttcttgtctgcatattgatcattctcaaggatagaccatgtgttaggcttaaaacattaaaaaagcatgaaataatatcaagcatattctctgatcacaatagaataaaactagaaattaataacaaggtattttggaaactgtacagatacatggaaattaaacaatatgctcctgaatggccatgggtcaatgaagaaattaagagggaaattaaaaaaatttttgaaacaaataatggaaacataacaaaccaaaacctatgggatacagtaaaagcagtacagagggaagtttatagctgtaagtgcctacatcccaaaagaggaaaacatctttttttaaaaaaacttttaggttcaggggtacatgtgatggtttgttacataggtaaacttgtgtcacaggggtttgttgtacagcttacttcatcacccaggaattaagcccagtatccaatagctattttttctgttcctctccctcttcccactttccaccttcaagtagaccccagtgcctgttgtttccatctttgtgttcttcagttttcatcatttagctcccacttataagtgaggccatgcagtatttagttttttattcctgcattagtttgctaaggataatagcctccagctccatccatgttcctgtgaaggacatgatctcattcttttttatgggctgcatagaattccatggtatatatgtaccacattttctttatccattctgtcattgatgagcatttaggttgatgccatgtctttgcttttgtggatagtgctgcagtgaacattcacgtgcttttgtctttatggtagaatgatttctattcctttgagtatgtactcagtaatgggattgctgggtccaagggtagttctgcttttagctctttgcggaattgtcagactgctttctacaatgtttgaactaatttacactcccaaccaagagtgtataagtgttctcttttcttttgcaacctcaccagtatctgttattttttgactttatagtaacagctattctgactggtgtgagatgatatctcattgtggttttgatttgcatttctctaatgatcagtgatatggagcttttttttcatatgcttattggctgcatgtatgtcttcttttgaaaagtgtctgttcatgtgccttgcccactttttagtggggttggttttttttctcttgcaaatttgtctaaattccttataaatgctggatattaaacctttgtcagatgcatagtttgcaaaatttttccccattctgtaggttgttcatttactctgttgattgtttcttttgctgtgcagaagctcttgagtttaattcaatcccacttgtcaatttttgattttgttgtgattgcttttggtgtctttatcatgaagactttgcctgttcctatgtctaggatctattttttttttttgagacagagtctcactctgtcacccaggctggagtgcagtggcacaatctcggctcactgcaacctctgcctcccgggtttaagtgattatcttgcctcagcctcctgagtaactgggactacaggtgtgcaccaccatgcccggctaatttttgtatttttactagagatggggttttactatgttggccaggctggtcttgaactccctacctcaggtgatccatgcacctcagcctcccaaagtgctgggattacaggaatgagccaccacacctggcctggccatcttcaatccatcttgagttgatttttgtatatggtgtaaggaatgggtccagcttcaatcttctgcatatggctagccacttatcctagcaccagttaatgaaatgggagtcttttccccattgcttgcttttgtcagctttgtcaaaaagatcagctggtcctaggtgtgcaaccttatttctgggtgctctattctgttccattggtttacattattctgaaaaaaatgtgcctgtttttgtaccagtaacatgctgttttggttactgtagccctgtagtatagtctgaagttggataatgtgatgcctccagctttgttctttttgcttaggattgccttggctattcaggctcttttttggttccagttgaattttaaaatagtttttttttttttatttctgtgaagaatgtcattggtagtttgataggaatagccttgaatctgtaatttttttggggcagtatggccattttaatgatatttattcttcctatccatgagcatgggatgtttttccatgtgtttgtgtcatctctgattgctttgagcagtgttttgaaattcttgttgtagagagctttcacctccctggttagttgtattcctatgtattctttttgtggcaatttttaatgggattgcctttctgatttggctctcagcttggctcttgttggtgtgtagaactactagtgatttttatacattgattttgtatcctgaaactttgctgaagttgttgatcagctgaaggagctttttggctctaagactacagggttttctagatatagcatcatgtcatctgccacagagatagtttgactccctctcttcctatttggatgcccttcatttctttctctcacctgattcctctgattaggacttccaatactttgttgaataggagtggtgaaaaagggcatccttgtcttgtgccagttttcaaagggaatgcttcaagcttctgcacattcagtatgatgttggctgtgggttagttataggtgaaaaaaagaggaaaaactcaaataaacaatctaacattgtatcttaaagaagtacaaaaataagagcaaatcaaacccaaaattagtagaagaaaagaaagatcgagcagaaataaatgaaattgcaatgaaaaaattgcaaaagatcaatgaaacaaagtgtttttttaaaaagttaaacaaaattgacaagcctttagctagattaactaaggaaaaaagagagaagatacaaataagatcagaaatgaaaaaggagacattacagctgatactgcagaaactaaaagtatcattagtggcttctataagcaactatatgccaataaactggaaaatatagaagaaatgggcaaattcctagacatgtacaacttaccaagattgaaccaggaagaaatccaaaacctgaacagaccaataacaagtaatgagattgaagccataataaagtctcctagtaaagaaaagcctgggacctgatggcttcactgctgaattgtaccaaacatttaaagaagaactaataccaatcctacttacagtattctggaaaatagactaggaagaaatacttctaaactcattctacaaggcctgtattaccctgataccaaaaccagataaagacccattaaaaaaagaaaactataggccagtatttctgaggaatattgatacagaaatcttcaacaaaacactagcaaactgaattcaataatacattagatagatcattcattatgtcgcagtgggatttatccctgcaatgcaaggatggttcaacataaacaaatcaatgtggtatgtcatatcaacagaatgaaggacaaaaatcatatgatcatttaaattgatgctgaaaaagcatttgataaaattcagcatccttcatgcccaaaaccctaaaaaacctgaggatagaaggaacataccttaacgtaataaaagccatatataacagacccacagctagtataatacttaatggggaaaaattgaaagcctttcctctaagatctagaacatgatgaggatgtccattgtcatcactgttattcagcatagtactggaagtcctagatagagtagtcagacaaaagatataaagggaatccagattggaaagaaagaagtcaagttatccttgtttgcagctgatacaatcttatatttggaagaacctaaagactccacaagaaaactattagaactaataaacatgttcagtaaagttgaaggatagaaaatcaacatacaaaaatcagtaatgtttctgtatgccaacagtgaataatgtgaaaaagaaatttaaaaagtagtcctgtttacaatagccacacataaaataaaatgcctaggaattaaccacagaagtgaaagatctctatgatgaaaaccatagaatactgatgaaagaaattgaagagcacaccaaaaaaatggaaaaaaattttatgttgttcatggattggaagaattaatattgttaaaatgtccatactacccaaagcaatctatagattcaatgcaattcctatcaaaataccaatgacattcttcacagaaatagaaaaaacagtcctcaaatttatatggaactacaaaagacccagaatagcgaaaactatcctaagcagaaagacgacgttgcttgacttcaaattatactacagagctatagtaaccaaaacagcatggtactggcataaaagcagatacatagaccagtggaacagaacagagagcccagaaacaaatccacatgcctacagtgaactcatttttgacagtggccaagaacatatgctggggaaaagacagtctcttcaataaatggtgctgggaaaactggatatccatatgcagaagaatgaaactagacccctatctgtcaccatatacaaaaatcaaatcaaaatgattaaggacttaaatctaagaccttaaactatgaaactgctataagaaaacattggggaaaatctccaggacatcagtctgggcaaaaatttcttgagcaatacctcacaaacacagtcaaccaaagcaaaaatggataaacgagatcatatcaagttaaaaagcttctacacagcaaaggatacaatgaatgaagtgaagagacaacccacagaatggaaaaaatatttgcaaactacccctctgacaagcaattaataaccagaatatataaggaacccaaacaactctatgggaaaaaatctaataatctgaccaaaaaattggcaaaagagttgaatacacatttctcaaaagaagacatacaaatgacaaacaggcatatgaaaaggtgctcaacatcagtgatcatcagagaaatgcaaatcaaaactacaatgaggtatttatctcactgcagttaaaatggctgatattcaaaagacaggcaataacaaatgctggctaggatgtggagaaaagagaacccccgtacactgttggtgggaatgtaaattagtacaactactatggagaacagtttggaggtttctcaaaaaaattaaaaattgagctaccatattatccaacaatcccactgccaggtatatacccaacgaaaggaagtcagtatatcaaagaggtatctgcactcctatgtttgttgcagcactgtttacaatagctaagatttgaaagcaacctaagtgtccatcaacagatgaatggataaagaaaatatggtacatatacacaatggagtactattcagccataaaaaagaacaaggtctagtcatttgcgacaacatagatggacctggagatcattatgttaaatgaaataagccaggtacagaaagacaaacatcacatactctcatttatttgtgagatctaaaaatcaaatctgaactcatggacctagagagtagaaggatggttaccagaggctgggaagggtggtggaggtttgggagaggtgaggatggttaatgggtccacaaacatagaaaaaatgaataagactttatagcacaacagggtgactttagtcaataataccttaattgtacattttaaaataacttaaagagtgtaattggattgtttgtaactcaaaggataaatgcttgaggagatggataccccattctgcataatgtgcttatttcacagtgcatgcctgtatcaaaacatctcacataccccgtaaatatatgtactatgtacccacaaaaattaaaatttaaaaaattatgtaattgtcattccagatatcttcatatatacattttgattaaaaagatgggtagttgagtgcattcacgaatataattttctaaaactaggttcatattacagtgctacctttaaaatataaaaattaatttcactgaaattttatagaagagagaaatggaaggaattgcttaaatttagataagtattttgtcactttaagtgatattatttctaaaattatttctctaagattatgaaaaaatgtgaaaaaattaagaggttacaatctttatttaagtttgtgtttttatttaaagcaatatactttaatctggtttgaagaaggttactatcttcactcttcctggtgcctccccctctccattttcagattagtccattttattgttatgacattatcaagtattataacatttaaattctattttgtcactataattattgcatttggttagtctcagttctgtatttaaatggattctaaggttatcataactcctatatcatagtttctccatttctcagttctttatttttattcatctcttagctggctgtattttacaatcaacaagtttttaaaaatatgctttttggttccatgttctttatgtttgacatgtttaggaatcatgtctatagcttttatacttgaaggacagctttgtcatgtattctattcttgagtcatattttgtttccctcaggacaatattttctggcattgaacattgctgttgagaaagctgagactagcgtaattccgctcctcatttacttcctgaagaattttttttttaatttgaggtttaataccttaaacaggataacatttcttgattttgttattctgtattagctttttttttttgaacaccgtatccctttttaaactgaaggttctgctgttcattttagaaaatcttaacatactctatttaaaaatattctattcagctaggttgttctataccattgtattttgggaacattttcttatgttggattgcttttattctccctatttattgtcttctctcatattattctgaatttttaaatctttttcttacatattggctgtttttatctcaagcattttttccattttgagctaaactatttttgtaatggtgttatttggtcctcatcttttttcttagcttgtctagttccttccttttatataatttgttcattaatttcctttttatgatacatttttattgaattggatttataatagacgaattattcaataatatgtatttggatcactaaacaaatatattgagaatagcaaatggattttaaccctcctgctaacccagatcaattgctagtggcttcccggcccattgtgttaagaaggactctagattagcatcaggtctctacagggaggggtacacttagtgatgtgatggctgccaagtaaaagctatgaggtggtgatggtgatgctaccctcttatctcagaggcacgtttacatttcatatagtacattacaggtgactaaaggtcatggttgtgcatcagagagggtaagatgatgatcaggagaagcttcaatattaccatttatttattgattcaacagttagttatttattagaatttacaatgtctcaagcatgatattacgtgctaggttaaagtggtggaagatgtatatgttccctgctcagctagaacttacagtcaagtaagggagatagacattaaatgaacaatcacagaaatacttaactacatttgcgataaggaatgtaaagggaaagtgtaatcccccaatgggttcttcctgctggctgcacagacaaaatcaatccaccaagattgtggcattgcagtagagatagtttaattgaccactaggctgacccatgtgggagaactggagttatcactcaaatcagcctcagctggttaagttcttagtgcaagcactcatagggcattttcttcttttagattatctttcagattgggttctctgtctgatttttttccccttcttatgttgtgattcttttttgattttctatgtttacataatcactgtgcttttccccctcgtattgctgggactgtatatgtgtaaccctgatttgatgttctgttttctctgatttaatgtgagtgaatatcccttcactctgcacttaatctgtgacttgtttatgttccccaaagagctatggtatgggagcaggcatttttattatatctgcttttagtcaggaggtaagggagaaagtagataattcaactgtaatgatacaagccgttgttctgagtttttgttagaatgaactttataacagaacacttctagtggcagttttatcttttttctatagcaggattgttttgggattcaaattgtccccagttcaacacagtatgcagagtctctgtgttgtcagaaaaataagctatagttgtttacttcctccattttactcttctcttatcagcagtttctccctccaagtcagagaggcaaaagatgaggataccgtttgagttagtctcgctcagtcagtctctcatttgatattggtaccagcactttaatacctaataaaatgaaagcaaaagaatgtacttgagagagattctttcatctgacttcaccgtttttacctagaaatccttgatatcgttctttaccactatggtattttaaaataacttatttgtgaatatattgcagacatattttttgcaccataccattgtatctagaaaacctataaagatgcaacgttatctgttttctcacaaagtttctgcacatccagtgtttgctgagattattactggtttagcagtcagatactcagaaaatagaaagtgaatcaaattgaacttctcttttaaaaataatgtatgacatggagccataagcaaatttgtaatagctgtgttttatcatgatttgtatattttatgtagctacactatttgttttcttaggtatctgttatatgcatttattttctcacagccatctagttgtatatatattctaataactttaaagattttatggtgaacaattattttatagatgactttaaatttatatactaattttgttatctcttaatggttttggttattgtaagattttagaggggttgaaattaaaaatatataaggtttagatataaataattggaataaaatcataattttataaataaaataattattttaaatttttagataatgagaattaattgaatcattggaattagaataaattctaataaacttagtaattttatataataaatatacttataaaagtggaattaaaaatttgaattctaattattataataaaatattatacaaatataaataaaatatttataaaattagaattaaagattagcatttatcatacttcaaaatctttctctggagtaatacattctatagttcttaaaattagaaataaatttaaaaagcaaaatttatagtgattttagacataaagaattaattataacagaaatacttaaatgtaaaattctcagagtagacttaacacttgatttataattccataactttacatatttctattttacatattttataccttttaaaacagattttttttttttttacaaaaaaaagaaagaaaatctttaccatgctgatagtgattgttgaatgaataaatttatggatatactctaccctgcgattttctctcatacaaagatctgaatctctaactttctttaaaaatgtacatttttttttcaggggaagtattacaaatggaagatgatctggtgatttcatttcagttaatgctatgtgtccttgactattttattaaactctcacctcccatgttgctcaaagaaccatatagtaagtatttaatttatgccccttttactttctcattcagcagttgcttattgaatgtctagtgggtaccaaacatggttctaaggctgacaggatgataaaaaataaatcagacatggactttgcccataagtagtgtaagttatagaaggaaagataagacatggaaacaaatgattagagtatatggtagaaagtggtttgggtcaaaatacaacaaatggaggtttgggagacaagaaagtttttccagctgtggaagaccaaagaataccatataaaagaagtagtatttgaaattaacatggaagagtggttaggattggggaaaggcattctcagtaaagtgttgggggagggcattcccagtgaagaaaagcaagaaacaagaaaaagatatgaatgaaattgcatggggaagagtggcctattctaagggaacagcttaactaagtttttattactattggatgttgtaataactatgtatttttttgtatataagctataactcatactatttcagtgggtgatgagtgatgagatgggaagtatatttaaataaaaataacttgctaatataattagatagcattaaggaagtatgagtaaggtatattccttttagcctagaattgcttcctttcatggcttcaagagtaggatttcaaagtcacttattatattattatatacagaaaaatgtaaacttacttaaggtcagactaattccttgcttctgaaatgatgaaagtattaatgctaaaaataatagataacatggaagtttcaaagtgttgttgaaatggatggaaggatgaaggctcattaaactttgtgaacaagaatttagtggaaaaattaagtatggagcagaattttgaagatgtgttgaacatggtttggcagagaaggcagaaaccttcatttagcagaaaccacatgcaaagaaagaaataaaaaaaattctatatagaaaacaaatatacttcaaattttctcccaaattttataaatttcctttatataccctttccccacttttttcaatgttataactttaataagttgatgttgcaagttactttaggttgacaatctttgttcttttggataattcaaatgtacatgtgaattctctaagtgctctgttaaagagcaatcagcatggggtattattgaactgactgaatatggtaactcttagttaatttttgttgtagagaatttcaaatgaatacaaaaatagtagtataataagcctccatgtacttatcatgtaacttcaacagataatttacagttaatctgtagccccattgcctgctcagttcccccagctgtattattttgaagcacatctttgcataccatttcatccttatacatctcagtatatatctctaaaaaatactttttaaaaagcataattacagtgctctttgttatcacacctacaaatcaataaatagtgactccttaatattactgaatatctagaaagtgctcagattttcttgtaaaaataattaaaaaatttttttacagtttgaatgagaatctaaataagatttatactttgtgtttggttgacatgttttaaaaactcttttaaaagtttctcttccatcctttctttttttccttgtaatttattttttaaataatcagattgtcttgagttttccacagtgtggtttttgctgatcatattctgtggtatagtttaacatgttcttctgtcctctcaatttcttgtaagttgttgattggatctagaggcaatacatactttttatacttaatcatctgtaattttttttttttttttttgaggcagagtctcactcactctgtcgcccaggcctggagttcagtggcgcgatctcagctcactgcaaactctgcctcccgggttcaagcaattctcctgcttcagcctcccgagtagctgggactatgggcatgcaccaccacacctggctaatttttgtatttttagtagagacggggtttcaccgtgttggccaggctggtcttgaactcctgacctcatgatccacctgccttggcctcccaaagtgctaggattacaggcgtgagccaccacacccagccatctgtaatatttttaatagctgaacctgtatttagtttggattgggaatgctgaaaataatccaggagattttttttttaaatcacagtttattatcatattattatatttactataatatattttatacctatcttttaaagacatcataatttactaaaacttaaaatattgtttttatgctatgtctagaaattgaattcagaaatatttgctaattatttttaagactctaggacagaaaacttttttttcctcttgcagactaaaatacgcttagatttagtttgaaagttggctatttccatgccttctctttgtatttgtttatgagactgtagtttacagttctttttgggagcagagtagaagagggatggcaaaaactaatattagtacataatttgtagtagatatggatgaaattgttatccttctaatgaaacctaataagtaaaagtagtagaatgttaccaagattatttttgacctaagttatagttagaatacttcattattttatatgatggatgtacaattgttcttatctaatttaccacttttacagaaacagctgttatacccattaatggttcacctcgaacacccaggcgaggtcagaacaggagtgcacggatagcaaaacaactagaaaatgatacaagaattattgaagttctctgtaaagaacatgaatgtaatatagatgaggtaatttaacttcatgatttctttaaaacagttaaagtagatttagatgtaagttctccctaacaatatttacttcttttgttatgagcatgttttttttgtaattagtgctaactcttttgcagtagcaaaatatttagaaaaaattaattcgttatatttagttactttgattttaaagagagtagctccctcactctggaatcactgaaaagtatataatcaagacaatagttttcaaatgtagtttttttttttttttattcctctgaggttactgatacccctaatgttttaaaataccctgccaaggctgggcatggtggctcacacctgtaatcccagctctttgggaggccgaagtgggaggatttcttgaggccaggaggtctagaccagcctgaacaacatagcgagactctgtctctacaaaatacatatttaaaaaaatgaactgggcatggtggcatgtgcctgtagtcccagctacttggaagactgaggcaaaaggattgcttgagcccagaagtttgaggttacagtgagacatgattgcaccactgcactccagcccgggcgccagagtgagactatgtctccaaaaacgaacaaacaaaccaaaaaagccctgcttagaaaactctagtgctctagtgttttagtttagtgataagtgataccaacattaaatttctgtttggccttctataattactctctttctaaatattacagcacataatgactgctggagaatacatatgaattcccaggaattacttgtcttgttcatagaatgtggatgttagaaggaatcttacaaataatgtattcaatctcctttttataatgagtaaacaagcttccagggactgatagcttattatttacagcgtctacattagactttgggatatctggtactattgcttctttcctttttaccatacagtttttctcatagtttgttttattgtccacaatcactaacaccagatagcagtaaaaaatgttacatctttgaaatttctctgttaactttgggaaggagtgagagtgtggtcctaaaatctagtttaagaagtattagaatgatttatcaagatatatcatagtttttgcactatggcttactaatttcaacaaatatacagttgactcttgaacaacaggtttgaattgcatgggtccgtttatacacagatatatttaattacatatattagaaaaaattttggagatttgcaataatttgaaaaaatttgtagcaaaccgtgtagcctacaaatacagaaaaaattaagaaaaaggcatgtcttgaatgtacaaaatatatgtagatactagtctattttatcatttactataccataaaatacatacaaaactgtagctgcagatgcctgctgtttcaggcggacgatttttgttaacagatgacataaacttactgtaaatgtattttgtcttcttacaattttcctaatattttcttttctctatctttatcataagaagatgatatatttagtatgtatatatagtacatatacaaaatatatgtgaattcaatctttatgttattggttggcttccagtcaacagtaggctgttagttaaattttgggtactcaaaagtaatcgataggtctgtagtctcagctacttgggaggctgaggtggaaggatggcttgagcccaagcatttgaagctgtaatgcatgtgattgcacctgtgaatagccactacacttcagcctaggcaatatagagagaccccttctctaagaaaataataaaaaataaaaaagttatacacagattttttactgcatgggggattgacacctctaacttaccctgcattgttcaagagtcaagagattagattttgttttaaattttaatgatcatgttgtaacttcatctttttcaggtgaaaaatgtttatttcaaaaattttataccttttatgaattctcttggacttgtaacatctaatggacttccagaggtaatctgaaaggaaatttaataaaatattaatgttttgagactgtggagggaggataattgtctaactttcttagatcaatttactgtgtatcacattttttttttgcccaagaagaatctagccaagtagaattgtggtgaaactaacttttgtatagtaacaaaaagcttttgagtatataatcaaatgtattagcatcattttgtgatttatactagaaatcaatctttattgaattttttccaaaatcaaagtatagacttttaaacttctaaataccattaaatagctaaattttaatagctaaatataaaccattaaatttgctttggtaagcctcattaagcgtaggaaccatgattaatgccatcaacattattggcattactacattgtggaacatctcttttgaggatttttaagaactgcttaattgaaaatacaaatgtatttgttgaaatgactgtgactattgcagaagtgttttaccttagtgatattccatccatctacctgttttgtttcgcattttgctacaaatgtctttccaatgagaacagaataactgagagctttgcatggtaagacgaaatatgtggagaaaaggatgctgtgatagatgatgaagaacaaaaccagtgttttagaagacatagtattagtcactatgaccaaaaggcatgaaataaaatagctagactgctagttctgtaacctgaattgatagctagtttttgaattaatttattaattcaacaaatattttttgaatgcttaatatatgtcaggcacgtgctagatactatggatacagagatttcactctcagtcactatccttaaagtgctagtgggagaggctgacaaagaaatagagcattacaggagtctacaagagtgtgaaaaaagtattcacagggttctgtgatatctcaaaggagagctacctaatccaaactagggctgataggttttgtggaaaatagtttagaggtgatgtgatttcaaatctgagtaagcattacagatatagcatttccaagggttggacattgtagattcaaaggtgcagtgatgtatgatagtatggtctgatcagtgaactctaagtaattcattaaggttgggatacagggcagaacaattaaaatatggtactgaagaggcaagaagggaccaaatgttatattaatgagtcttgttaccacttttggtaccaaaaactaggctgttcataactttaaaatctgttgtagcaatctttttttctcctttaaaaggattatagttttaatataaatcttaagagtaattttactttttctccaatatttcacataatatagccaatcaatagatgactggtaattagtgcctcaactaaggtaggacaggaacaatgattaaacataagcatggattactgttctatctaatacatttatgaagattaatgaaaagtttgcatttaattggatttcttcctatcactccttttaaaatgcaattttacttctctgaggttggaatcactttggcgttaaaagtcacagtagaaggcatgccaatagttttctcttgggcattggtttttaaagtataattaaaaaattatggatcagaactgatgaaagatttacaaattctagcaattgaaaaagtatctaagattgggaataaattgtgcaagtgtgttaattgaactgataaattgagctaattgtcttgcccaagatacttaactgaagggtactggagtgaaccaaagggtttagaaaacattggtagaatatgtaatcaagaggatttgcaacaatgtttgaaaaaatattttatattgataagcataaaagattaaaagcaggctgggcgcggtggctcacgcctgtaattctagtactttgggaggccgaggcaggtggatcacctgaggtcaggagttcaagaccagcttggccaacatggcgaaaccccgtctctactaaaaatacaaaaattagccgggcatggtagcaggtacctataatcccagctactcgggaggctgaggcaggaaagttgcttgaaccccgggggcagaggtggcagtgagccgagattgtgccactgcactccagcctgggcgaaagagcgaaactccatctcaaaaaaaaaaaaaaaaaaaagattaaaagtaaagcatatatgggatgtttggaaaatcttggcagttaaacagttattataatacctatttttatcttaggtactgttttgtagcattggctatctttgtctacataaaattctaataaatattttctatgcacgaaatagacctaaaatcaaagttgaacaaatgttgcaattttctgtacctcacttttagatagaccttatttatattgcatgcgaactcagtgtatattacaaaattaaatgtatattatacaaaaattctttaatgaaatctgtgcctctgtgtgctgagagatgtaatgacatgtaaaggataattgtcagtgacttttttctttcaaggttgaaaatctttctaaacgatacgaagaaatttatcttaaaaataaagatctagatgcaagattatttttggatcatgataaaactcttcagactgattctatagacaggtattgcacatggtatatttgattgatttgctttagatataggttgatactgatataggtagattatatagtctttagcttagtgacctttagatatcatttataacaaattactttcaaatgtctttatacaaagaaaagtttaacagtattttaagcatataacttatctacaaatatagatttaatgtgaattgtgtgtcctataacagttacctttttgcagttaactgaatataattttttaaaatgtgcaccaaaagataatggctaaagtaattagtttcttcaaatagtggtctctaccttatttctatcctttcatatactattgcctgcctggtttatttaaaaaagtttatacaaaagtgtagtctctgttattatcatgtagaaacctaaaattggaatggttgagagtgattgttaaaatttttgactgatcataagtaaagttaattttgtgtctttagcatgaactcttttaatatgaaactgaaaatatgcgtaatttagaagttaaacacagtaaaatgttttaaattttatttaagtggaaataaagtttttagaaggaataatgcattgaaaaacttgagttttaatgctttttaatactgaacaacttggttatcaataccaccagggagaaagcatctgactttcacttttaaaaaaagacttaatgattggtatacctctttgtcataaacataatggaaagagacccacaattaaaaagagtagtgaaaaatattttatttaagcagcagctgggtcatctattttctatcctatctattattgagttatcattttatatgattttatgagacaacagaagcattatactgcttttttgatgcataaagcacaaattgtaaattttcagtatgtgaatgacttcacttattgttatttagttttgaaacacagagaacaccacgaaaaagtaaccttgatgaagaggtgaatgtaattcctccacacactccagttaggtatgaattttcctacttttaattatattataattttgttattcatggctttatagtgtttcagatttgttcacgtttctttatgtattcatacatacatgtaagaaatatatattgaaggccaggtgtggtggatcacacctgtaatcccagcactttgggaggccaaggcgggcagatcacctgaggttaggagtttgagaccggcctggccaacatggtgaaaccccgtctctactagaaatacaaaaattagctgggggtggtggtgtgtgcctgtaatcccagctgctcgggaggctgaggcaggagaattgcttgaacccgggaggcggaggttgcagagagctgagatcgtgccattgcacttcagcctgggtgacaagagcgaaactccgtctcaaaaaaaaaatgtgtatatataatctttgtgtgctgggcattttactggttgctgaagatatggttattggacctagttttgtctgttcttaaagaacataacctaaaataggaatgtgttccatttcagtaaataaaaaagaaaaaattaaagtatcactatttgatctgcatgcaaccttaaaggattagaactattttttatgtctttttcctcactcatttcccacatcaaaatctgttatcaaggcttgttgaataatctacctccaaaatatttcctgagtgcatctacttttctccatttctgctctcacaactcttgtccaagacattgttctctttctcttggattttttgcagtagcctactacctgatcttgctccttctggtctcatcattgttcctgtctcctcaccatcaaagatattctccatagagcccccagaatttctcctagaaatgtaaatcagttacattcaccttgctgttaaacccactgactgcttcccattgcaattggtatacagtgcaaattccttaacaatgcctaaaagatcttatatggtctggtttctgttgcctctccaacctcatcttgttttctttctcactctgtgttagccacactttggccttctctgtttcttgggctttccaagttttttgaaaaccctcgtacttgatattccctcttcttgaaatttcctccttttctttccatggattaccaactgctactcttcattcagcacaaatattgcttttgaaaagatatttctctctgaagtattttattatttctcatatcatcctgttccattcctttatagcatgtatcccaatttatattgatagattcatttgtgtttgcttgcttttactaatacccaaaatagccttaaaattccatatcacagagaccataacctttttgttcactgtctaataattagggcctgttataaaacttggtacatagtaggcaatcagtaatatatttcaaatgactgtatagatatgtaaatggatacattttcatataagtatagtatatactttggacaagataatgagatgacacagaagggactataaagcaatgtctgaactgaattttgaaacatgcaaaggcctgtgtcacaggataaagattttagggagtgggaacagcatgttcaaagggctggaattgtgaaacatgtaagtggagaaaaccctgctgtcacaccaccgacaacaatcaacacagaagacttttgtgaccaaatgtgggaaagttttcctcaccaagaaacaagcaatcagttctgcagcagtcaccagctgggtgtcctctaatttacttctgacactgcttacctggagatagtgtcagatcccacaggttgagggctcagtccccaaaactggccccaacttcagatgccagttgcaagtctgggtttttggatcttctgaccaaagggcttcaagttggggttcccatgacacctcttaggttcgattaatttgctagagtagttcacaaaactcaaggaaacacttctgtttactggtttattatagatgatattacaaaggatgcagatgtaaagatgcataggatgaggtatgggggatgggatgggaagcttctatgccctccctggccagacagctgtccaggagcctccacatgttcagctatccggaagttctctgaaccctgcccttttgggtttttatggaggcctcattgcataggcatgacagattagatcattggctattgattatcaacctaaccttcagcttccctccccttcctagaggttgggggctggggctgaaggttccaaccctctaactctgcctcgggctttctagtgaccagcccccatccagatgcttcctaggggctgccagccatgtcaattcattagcacacaaaaggacatcactggagtttctaagtattttacgagttgtatgtcaggatatggggtcaaagaccaaacatctatttcacaatatcacacaacacaatgtgtctggggaactattagcagctctgtattgattgactataaaatgagagtaggaagtcacaggagaggagagtgggtactagatatgaagggccttatatgccatactcacaaatttggagtgtagcatgtgcatgatatagcctgtgctataaatggatgttaagcaggggtaaggataaaatcagacataatttttgcaagttcacatggtaatagtcagtggggggatagactgaggagaataagaaaaagtgagaaatagacctgtcagtctgtctcagtggttcttaaccatgtgtgcaaattagaataacctgaggaattttgttttgttttttctttttaaaaattttgtgtcccattccactgaggaatatgcctaggccttactaccacagacatagtgtataaaaatctctgggcttgtctgttgtagcagtttacttgagagtttttaaagatctgaaccaacgatagtggtgggaatgaaggaacaataacagatttgataaatatttgatgaattcatacttagaatgttgttcttgaggcatttctgaagaagatatctagtaagcagtaggatagccttctatagatttgggaatcatcaggggagttaaacccataaaaaaaaatgagattgcttgaagggagggtgcataatggcaagagtgggtggctaagggctgaagcctaaaggatgctagcattaaggactagacagaaattgttaggttctagagcaggggtccccaattcccgggccagagactggtctgtgtcccattacgaactgggtgatacagcaggaggtgagtggtagacaggcaagtgagcattactgcctgagatctacctcctgtcagatcagcagtggaattagattctcataggtgcatgaaccttattgtgaactgcgcatgtgagggatctagattgtatgctccttatgagaatttaatggctgatgatttgaggtagaacagttcaaaaccattccccctactctccatggtccatggaaaaattgtcttccatgaaaccagtccctgttgccaaaaaggttggggactgctgttctagagaatgggaaagtatgattggggagtgcagagattgaagcgaagaaagctgagggagggagggagtttcattaagagcaagtatttctctaacagtgtcaaatgcttcaaggaaggtcaagtattagaacaaatgagaaaagtcttttgtttttatcagttggtcatttgtggctttaatcactgtagcttaaatatgattagtggacacagaagcatatagaagctgtgttgcaatatatttgaaagacgaggctgggtgtggtggctcacgcctgtaatcccactttgggaggccaaggtgggcggatcacctgaggacaggagttcgaaaccagcctgggcaacatggcaaaaccccgtctctactaaaaatacaaaaattagcccagctgggcacctgtaatcccagataatcaggaggctgaggcaggagaatcacttgaacccgggaagtggaggttgcagtgagccaagattgcgccactgcactccagcctgggcgacagagcaaggctccttctcaaaaaaaaaaaagaaaaagaaaagaaagatgaggaagtgtaaatactggtttagacatgcttagctgagaacactgagcatattttactaaataatagttgaggatcttttcagccctaaacattctacagttctttgcataattaaagtgtcccaaatgttcagctactccaaaattgtaacattgatatttaccatatactgcccccttcataatacacacacataaaattatagaattaacaagatcttaagagattgacctaattttatgctgtgaaagtggtgatttttaaatgtatccaggatcttagtatcctttcttcttgaaggtctctgtaaagaaaaatcatctgattctttacttgagttgctaagtatcttattgtctttaatttgaaaatgtttaatatttggttgtaataatgttttcttaaaacaataccattttgttgccagtttatatagtttctcctaaaaataatgccactattttattgatatgtagttttattagtaaataagtatatctgttctataactataaacttattgattgtgaatacatattttcttaaagatttaagtaaaatgtaatttcttataaaccacagtcttatttgagggaatgtagagacaagtgggaggcagtgtatttgaagatacatttaacttgggagatggaaaacatttcattttttctttttttctcccttcattgcttaacacattttcctatttttatcccctctaggactgttatgaacactatccaacaattaatgatgattttaaattcagcaagtgatcaaccttcagaaaatctgatttcctattttaacgtaagccatatatgaaacattatttattgtaatatcttggcaaagaaacttgaaattaaaagttaaagtactgagttctttttaaaatactaatctcctatctaacatgtagttatccataatcttttcttgcttttttaatcttacaaattatatattattagtagtattgttttatttatacagtgttatttaaaacatttttatgtttacctatttgccttgctcaccattcttccttgcaacttatgcctcacttctgagataatttttttcttcttcagatatatcctttgataattactttagtggtattaatttgggatgaactttttgaggttttattttgttttttgatctgaaattttctttacccttatttttttgtgagatagctttgctcgatcttcaattccaggttgacatttactttttagactcttataagtttgaagataatacattacctggatcccatttttgctaattaagaagtcttatgccactcaatctaactgttgttcctttgtagttaatctgtctttttctctctggctacttttaagatcttttctttgaatgtagtattagataggacttaacattccccatacccctacaatctttttcatccaatatttaacccatttttatttacaattcttacctggccctgttagcattatagtttgcaactcctgatagacaataagtttaatatctgaaggcatctgataccctctctcccctaaagacaaggagaaagaaagagagagaatgaaactatcatctatattgcttgcttgctccttcactccttacttaaactcagatgaggattgggacccactgaaatgctcatccactaaaattggacatagggtcaggagacttattaaaatttggcttatttcagcaactgtgctttttgtacttgttaacaattcattcattgccataacctgcctgtgattttgtcataatctgttgtcatctcttgctatgttcccccaggaattagcaaagtaatttctgtcatcatgttcgtaattgttttggctcagaattgattttgtttgtccaatatgcataaagtcgcttttgtttatgagttatctatagcacaagaatatatgccaaaacatatgtaccccaattacctaaaccttttagcaagggctaatgaaagaatttaaaagaatgataagccctttcttctcatatcattttgaatacttcctccaatatttggagtatgtaggagttcttttttatttaaaaaattctgcctcaaagacttttttttaaacttggaaactatatgatctttttttatgtttttatacagtttttcaaccctcgctctcttccttccctcctccctctagtagtctccagtgtctattgctgccatctttatgtccatgagtacctgatatttagctcccactcattagtgagaacatgcagtatttggttttctttttctgtattaatttgtttaggataatgacctccagctacatccatgtggctgcaaagggcataatttcattctttttttatgactgtatagtactccatagtgtataagtaccacattttctttatccaatccaccactgaagggcacctaggttgattccatgtctttgctattgtgaatagcataccagtgaacatatgagtgcatgtgaaagacattttctagagctcaatttaaagcttaacttttaatgaagcttaaaagcttaattatgtagatgataagttgcatatgtcaaagtgaacatgtcttgaaggtcattatgtttttccttcattttacttccttattagttcaaatttcttcatttttaaaattaatgccaccttccctccatgtaaaatcttagaagctatgaacattttaatggacattttggcaacaattcttttatgacaggaaatgcttgtttgttatatgtttctaagtttgtgtgctgttttttttttttaggaatatagaattgctgatattctagaatgtgaaaatgtcgccagacaatgcacattacaatgaaaattataatcttatttttatttatatatatatatatttttgagacagagtttcactctgttgcctaggctggagtgaaatggcatgataattggctcactacaacctccatctcctgggttcaagcgattcttgtgactcagcctcccaagtagctgggattgcagaagcctgctaccatgtccagctaattattgtaatttttgtggagatggtgtttcacaatgtttcccaggctggtctcaaactccagacctcaggtgatctgctcacttcagttttccaaagtgccgggattacagtcatgagccactgtgcctggccataatcttaattttagaaactttatttttgaatgtatatattgaatgtgttttatgtataaaggataaaaaatagaataaatctttgtagctgatgagaatcatgctgtgattactttttatatatcataatatgaattatataatattatataatatgcattttaatacatcatcttgtgatgtgttttaattattaaagttgaatagccccactccaaatgatacatgtattggaacttcttttgcaacaatttccctatcttgtatttctgaaaatgtaatcaaatgatttagctaattcataactctttcaaagcacgttttaaaattaggaaatggtccgggcatggtggctcacacctgtaatcccagcactttgggaggccaaggtggttggatcacctgaaatcaggagttcgagaccaggctggtcaacatggcaaaaccccatctctactaaagagacaaaaattagtgaggcgtggtgcgcttgcctataatcccagctacttgggatgctgaggcaggagaatcacttgaacttgggaggcggaggttgcagtaagccgagattgcgccactgcactccagcctgggcgacagagtgacacttcatctcaaaaaaaaaaaaaaaaaaaaattagtaaatgataccaagctcaagccttggttttatttcatttgctttttcggaagcaacatacatcccaatataactcttaattgaaggtattttatgagaatgtatgaggctctttctgatggatggaaagcttaacaaatttgctcttctctagcctagtggcagaaaatttagataatagggttttttagttgtactgtagtattttttgctcattaacatccagtgaaatgatattgtctgcttatgttcagtagttgtggttacctagttattatggaagtgtttccacatttttatgaacaatttaaaaagtcatatattatggagcagaaaatattaattctgattacacagtatcctcgacattgatttctgtttttacctcctaaagaactgcacagtgaatccaaaagaaagtatactgaaaagagtgaaggatataggatacatctttaaagagaaatttgctaaagctgtgggacagggttgtgtcgaaattggatcacaggtaacttgaattcattgtaattcgtggtactatagagtaataatattaaaagcagcatctttccagttcgtataaatactctaacagtatttgtctagtagtataaaatactgtcagatactatatccctgctgcctgtgtatgctgctatttatgggtaactttatggaaaactacctcccaccccattataaaaactatgtaataaaggaacacatagccattgtagaaattttggaaaatacaactaagaaaaaaattgaaatctttgatattaaatttttgattttgctttgacttctacatgtatgactgttcatgtatgcatatcctaatgtgaatgggactatacatgccatttgtcagtgatattattgagtgatattatttcaggaaatctaaagctaatataataggtaagagtatgggccatggagtgacagccctgggtttatatttggttctaccattgttgatcttggacatgtcatttaacttctctgagattcaggttctatatttgctctgctttgttgtgtggcattaatgaggataatatacaaaaatatattggaaaactggagtccactgtacacatttatttcagtgtagtgaggttatattttgatgccatcagtgttttaaacattgatatttaatggttctttttgattctacagccatgcaccacttaacagggatatgttctgacaaatgcatcattaggcaattttgttgtgtgaacctggtagagtgtgtctgtacaaacctagatggtatagccgattgtacatctaagctgtatgatatagcctattcattcctaggctacaggcctctacagcatgtgtactgaatactgtaggtaatggtaacataatgtgttaccatttgtgtatctaaatatatccaaacatagaaaaggtaaagatatagtacaaaagataaaaaatggaacatttgcacagagcacttactatgaaaggagcttacaggattgaaagttgctctgaatgagtcagtgagtcgagtggcaagtgaatgtgaaggcctacaatattacctatgacatgactgtacactatcgtagactttataaatactacacttaggctaaactaatttcataaacattttttctttcttcagtagtaaattaaccatagctcactgtaacttttttactttataaatcttcagtttgtaagaaacttttgactcttataacacttagcttaaaacacaaacaccttatacagctgtacaaaaatattttctttctttataatccttattctgtacacttttttctatttaaaaattttttcaatttcataaagatttttgccaaaaacaaaggcaaacacacacattagcctaggcctacacaggatcaggattaacaataccactgtcttctgcctccaaattctgtcccaagtcttcagggacaataaaatgcatagagctgtcaactcctatgatgatgatgctatcttctggaatatctcctgaaggagctgcctgagggtgttttacatttaacttttttttttttttacaagtagaaggaggatgctctaaactaataaaaagtatagtataataaatacataaaccagtaacatgttcattattaagtattatgtactgtacataattgtatgtactatacttttatatgactggcagtgcaataggtttatttacatcagcatcatcacaaagatgtgagtaatgtaatgcattgcactacattacactaaacaataggaatttttcagctccattataatcttatgggactactgttagatatgcagtcagttattgaccaaaaacgttgttatgcggtgcatgattatatatgagatttttgctcttagtttggaaggaaataatatggtgtgtgtttatatttctaaaatttggttattctttcaaataatgggaactagttatttggctaaaacttcttgctcataaggtcagtttgatctgatttttgcctgtgtcagttttactaaatttatggacaaagactgtcctcttaatcctggacagctatcttgaaaatacatgtcctaggtcatgagaaatgttatataaggtacataaagtgcttaaaatagtactgggcacataacctatctttagtatgaatgatataaactgaaatggagttaaggaaatccaggtactggacctaccctcttgttaatttacttgggaatgttaatcaccacttaatacttaagttgtgagttttagacaagctagcttttgtgttgtcttggcggccatatttgtaagaagggtgagaagtatgttttaagaaaaggctttttaaaaaattttagtaattgtcagctgggtatagtggtacatgcctataatcccagcctcttgggaggccaaagcaggaggatctcttgagcccaggagtgtgaaggccagcctgggcaaaacagtgagactccatctcaaaaaaaaaaaaaatttcataattgtgattttctaaaatagcaggctcttatttttctttttgtttgtttgtagcgatacaaacttggagttcgcttgtattaccgagtaatggaatccatgcttaaatcagtaagttaaaaacaatataaaaaaatttcagccgggcgcggtggctcacgcctgcaatcccagcactttgggaggccgaggtgggcagatcaggaggtcaaggcatcaagatcatcctggccaaaatggtgaaaccctgtctctactaaaagtacaaaaattagctgggcgtggtggtgtagacctgtagtcccagctacttggcaggctgaggcaggagaatcccttgaaccagggaggtggaggttgcagtgagccaagattgtgccatttcaccccagcctggcaacagagcaagacaccatctaaaaaaaaaaaaaaaaaaaaaaaaaattcaatgctgacacaaataaggtttcaattaaacaacttctttttttttttttaaattatctgtttcaggaagaagaacgattatccattcaaaattttaggtaaattttttacttttagtaaaaaatttttttctttttatagaagtaagtattttataatctttttttttttcctttagcaaacttctgaatgacaacatttttcatatgtctttattggcgtgcgctcttgaggttgtaatggccacatatagcagtaagttaaattttcataaataaacacttttgttcaatttaaagttaaaatgtggtgtgtttctttggtcgggggagagggatagtgtgaggttaaggagaaggaatgcttattttagatcactatatactgaagaatgtaattggtcattataagccatttaagaggcttatttgagttatttgaggccatcttggggataatatttcactaggcttctcttctgagtatactggtatactgaatccaaaaaaggtactttttgaaatccctccgaagacctttgagattgtagagtgccaaaggagtattcaagagtggcctctactgatatggaagcactgctgtaacctccatggttatgaaactaaagattgaagctagaatccactggataaacagaacaaaggccaattacaatgtttttaaaaacataaatgtatatcactttgcaaattatgttgcaaatgttaaaagaaagttttgcttgcagaaacaaaaggaacatttgtataaggatgcaaaacacagaaaaagaggaacttttagtttccttattagtaaacagataaggaaaactgtgaatcctcatttataaccaagaaatgcatattttaatgagataccattttgtaactaatgaaattagcagaatcttgaagaatctgtctatcctcttaccaaggattaatgagaattaaaatagatatgccaatggctgataagatactaaacctgttcctgatataagtttagggtatttaaatctttgaaaatttgagatcagctataagtcctttctctaggaaaaacacagatttgcttacactcaaaattggaaggctatttcctatgagtccgtagactccaaaataaaaaattctgctctaaataaaaatggtttaacctttctactgttttctttgtctgataataacttccaaaaaaatacctagctcaagggttaatatttcataaatagttacttttttttttcatttttaggaagtacatctcagaatcttgattctggaacagatttgtctttcccatggattctgaatgtgcttaatttaaaagcctttgatttttacaaagtgatcgaaagttttatcaaagcagaaggcaacttgacaagagaaatgataaaacatttagaacgatgtgaacatcgaatcatggaatcccttgcatggctctcagtaagtagctaaataattgaagaaattcattcatgtgcatatggctaacaaattattgttagtgagaggtgtttcttaacatctacctcaagaacatatagggaatttaatgaataatgttatttcagtctatagcccaaggatcaagtggaatattagaatggagctttaatcgagcaccctaaaccatctaatacagcacagtgatttatttaagaatagcttttcttaaaacatgccactttaaaacaaaacggattttttttttatactttaagttctagggtacatgtgcacaacgtgcaggtttgttacatatgtatacatgtgccatattggtgtgctgcacccattaacttgtcatttacattagatatatctcctaatgctatccctccctcctctccctaccccatgacaggccccagtgtgtgatgttccccaccctgtgtccacgtgttctcattgttcatttcccacctatgagtgagaacatgcagtgtttggttttctgtcttggcaatagtttgctcagaatgatggtttccagcttcatccatgtccctacaaaggacatgaactcatccttttttatggctgcatagtatatatgtgccacatattccatggtatatatgtgccacattttcttactccagtctattattgttggacatttgggttgcttccaagtctttgctattgtgaatagtgccacaataaacatacgtgtgcatgtgtctttatagcagcatgatttataatcctttgggtatatacccagtaatgagatggctgggtcaaatgctatttttggttttagatccttgaggaatcgccacactgttgaactagtttacagtcccaccaacagtgtaaaagtgttcctatttcttcacatcctctccagcatctgttgtttcctgactttttaatgatcgccattctaactggtgtgagatggtatttcattgtggttttgatttgcatttctctgatggccagtgatgatgagcattttttcatgtgtcttttggctgcataaatgtcttcttttgagaagtgtctgttcatatctttcacccactttttgatggggttgattttttcttgtaaatttgtttgagttctttgtagattctggatattagccctttgtcagatgggtagattgtaaaagttttctcccattctgtaggttgcctgttcactctgatcgtagtttcttttgctgtgcagaagctctttagtttaattagatcccatttgtcaattttggcttttgttgctattgcttttggtgttttagtcatgaagtccttgcccatgccgatgtcctgaatggtattgcctaggttttcttctagggtttttatggttttaggtctaacatttaagtctttaatccatcttgaattaatttttgtacaaggtgtaaggaagggatccagtttcagctttctacatatggctggccagttttcccagcaccatttattaaatagggaatcctttctccatttcttgtttttgtcaggtttgtcaaagatcagatggttgtagatgtgtggtattatttctgagggccctgttctaaaccaaaacagaattctttaaagtatttagataatttatttaaagtacagttgttatatatttgaaaatgcaaatgtctgctcttaaattgtgagattatgctatttagattattaaaaagtgcatttttttcttgttaaatatagtaggattcattttttcccattattaaagtataaaaatgtatactattgttcaattataggtattggttcaatcaatataggggcacaaattatattgtctaggattctctttatagcattataactattgataaggcttttgttttaataaaagtggcaacttgaggttatgctcttcaaatcaacatagttggataatactttgtgaatcatcagttttgtaaattaatggtttcttttgaaactgtgttgcatgctaagtatatatcttttaatttgtatcagtatatagaagtggtaattaaaaaattaagactttaggtatgccataatcctaatttgcacatgtaaccttagttttaatttccttacgttttgaatttttaatgactaagcgataatttatttcttagtgttttcttgtattgccatatagacagagtgaatagaggagagaaacatgggaaattgatagaagaatgttacactcctattattgaatttcataactacttatggaatgaatttacacttgataaggagtacttagaagaaaactttctgaatctgggtaattaagtgaaagtaaaaataaatagataagtaaataaaataagcacatagagtactttttaaaggcttatgtgtcctctcctcccagaaattgatattgagatattcctgtatcatctgaaagtgactattgttatttcttttagagaattaattttatttctatcaacacatatttattgaacatacgccatatgccttgaattgagagagatactgtgaagatacaaaaaagataaaggcttggaaaattgtggaggatgtaatagaaatttactgtttaaaaattgtttgtactcaagcctgtttagctcagttatttagggcttctaaacaatattcctttatttttgagaatttttggagaaaaagtgacaagccccaaatctggaaaagagtatgattgatttacaataggagacgtggaagtcataagcctctgaatttaaatattaaatgtagtatctctggcagatgaaactatagaggacttttatttagtcatatatttttagtgtttgagtcttatattacatttttaatcataaaaaccttgagtggtagtggataactttgtgaagataagttatgccacacaaacaggatactgtgtatttttcctgtgagaataattgacattatagagaagggatatggcatagatacatttgcgttttcacagacttttttttaaaatttgaaatataacacatattaagaaaagtatatatctcaagtgacagtttggtgaatttgtcacaaattgaacacatccgtgtaaacaacacccagataaaggcccagagcaagctttcatagtcttttgattctgtgtcataataaaaaattctcgttaaaactgtagattgataggaacatattcacacagagttgttgactgagggaaatttcaaatgaggtgctgcttacttctctcctgccaataatttaatgaaagaaagaacatcatcttatttttaatggttgtgtggggaactgggttcagcatttttgcttgacagccttgagataaaataaatccataaggaaaaagcccacttctgtttcttttcatcccagagagattaatgggcaatatatgagtgtaagatactggaaaagtctgttgagaaacctagtgaaatctcattctctgaaaagttgggggattacaggtgctatcgaatgcatcatacctaagggttagatgaaatgacttccaagagtttggccctattaaatctgttaagaggtttataatgccagcaggtgatgaaatgaaatttggatgccttagtttcagtattttcagaatttatcatattttttcaataaatgtttataaatcaaagtatgtcagatgctttattccctatatgatctgtctttcctggactattctggactcttcctattgatctctcatttgctaccttgagaccatttctctcacagcagccagagaaatctgctcataatgtaaatctcatcatgctaattcctcaggtaaaaaacctcctgtggaggacatattcatctggtaatgttggaagaagaccctaccatatggctttctgcaaaaaagaccactatactacctgtttggaatacaaaaagtaactgactgaaattactggacaggaagaacagatgctagttgagaaagagaagaggggagctgggagcctgaggagaaggcttttagtctagggctaagtgcagtaggtatagggaaggacagtaaggtagggcagggatgtcagtgggaaaactatgggtctcttcaccaggaaaactggaaaattgaagctagggaaaccttggccactgaagagagtggaagaatcctgcaagggaaagagccaagaaagggtacccagattctgtctgaaatctgaataattcctgtgtgtcacagactcagagcagccaaatgaagggcaaaagatctgaactgaaactggagttgctgcccaataaacagaacagttcaagttaagcaaagataattgcttcttacaacaaaaccattctcattttagaaaaataacagaatttaggatcttcacaatgtaacatttatgatgttcaggatacagttctaaaattatccagcatagaaagaaggtcaaagaaaccaaatgctggtttatagaataggagctttaggccaggtgtgtggtgcacacctaatcccagcattttgggaggctgaggtgggaggatcatttgagcccagaagttcaagaccagcctgggcaacaaagcaagaccccatctcttaaaaaaaaaaaaaaaaagctaggtgtgatggcatggtggcatgttcctgtggtcctaggtacttgggaggctgaggcaacacagcgagactctgtctcaaaaaaataaaaaataaaaacaaaaaaactagaatgggagctttaagttaactttggttaggcattgctaaatgatggggatacattctaggaaatacttcatttaggcaactttgtcattgtgtgaacatcatagagtgtgcttacacaaacctaggtggtatagcctgctacacatcagggtaggaatagcctgttgcttctagactacagacctgtatggtattttttttttaatctccactcttgagtatgtctttttaatattcaatgtgatgaaactgaagtatgtagaaagttgcataccaaagtatgatagctgtcttgaggaaaaatacttattttattggttgagttgtgaactgaacccgtcactcttttcgtgaaacacatgtgttacttgtaagactgataagcaattgtgtttatttatgcttgggtatgtggtagattcttgaaagtgaacaaagtgagcctgtcatttcaaagaaaacaactgacagtaaaggttgccaatgataaattttgtgttttcaagtaaaaattagaattttagaaacttgtatccaccactgaaagcttgacagagtcctaatatataaaatacttttctgatgaaatcggtggtgatatcaatgaatgtgagagatttgtaaacatttacaagaagtacataattcagtgaaccagtatttccaaatgaccaaatacatcgttataaaatcattcacgggtaagatattcattaaaagttcaagataaaccaatggattttaaagtcttaaaatacgaaaaatttatttcggttcattgagattgtttccagttccgccctgcaactaacctttaagaaactatgacttgtcgagttttggcgtagtgtcagaaaacagtaaccataattatctgaaaaggttattaaagtactcctcctctttccatatgaggccagatttttctttgtatacttcaacctaaacagcatattgcaacaaagtaaatgtagaagcggataggaaaattcagctctttgctgttatgccagatagtgaagacattcagaagatcataaaacagtgctattgttctatcttttttgttttgtagaatatggttatttttcattaaaaattatttatgttaacataatgggtttattaagataaatatttttaaattttctcaagttcttttgagccctcaacatcctttaatgtaaaaaagctattagctactttatgcttcctaatggaagaatatataaccaccttgaaaacatgatgttgaaagaagccagtcacagaaaaccacatattgtataaattcatttatatgaaatgtccacaagaggcaattcagtagagataggaagtagattattggttttctaaggctggtggggaggactaggtgttttgaggatgatggctagagagtatggtttttctttttgagataatgaaaatgttgtaaaattgactcattattgtagtcaattttataacacttttatcatctctgtgaatatactaaaaactattgaattgtacacattaaatgggtgaattgtataggatgtaattttttaaatttctgttttaattaaattttaactaaattaagttttaattactaacaaagtaaatattaatagatttaacccacacaaacaaaagcttttggggtccttagtaattttaagaatataaaagggttttgagtccaaaaagtttgagaacccttgcctgtattctcttccccactcagacttgtctttcactcacacaaccatgtttgtttttgcctgtccctgagtcttgaaatgctttcctctgcctttttcttgaccagattttaaggtccattttgcctttcctgatcatcctagtctatagtcattcttccctcatttagtcttaaattgtttattatctatatacttaactagtcatttataaactttgttttactatatgtgcatatctcatgttaaattcatgtaaagtacttaaaacaatatctgacattgtattataaaatgtagcagttaattacataagggtaaagaacagagaggagtcaacttatgatgacatgcaggtttctggcttgtataacttaagtggatagtagtgtcattcattaaaataagatacctaggattgaatgaggtttgcttgggaagatgaatttcatttgatgagttttaagtaattataggtcatttcaatagaggtgtcaagtagcagttggatatgtgtgtctggaacttaggaaagaaatctaggctaagattatggaccataaaaaatgccacccttttttgacagtttatcttgtgccaggcactttggtgagcacttcttaaatttaattttcatcataatccatgaggtagtttaccctagatcaggaaatgaatgcttagaaaagtttaataacttgccctagaccacacaagcaaaatggcaagatctgtgatttgaacccaggtctttctggctccaaagctattaatccttatgctttgctgagtaactgaagtttggagaagggataagatcacttaaggggagaatatagtatgagaagagaaggaggctaaagatagaattctaaggagctctaacatttaaaggatggacagaaaagagaagcctgtgcctacaaaagagattgaaatagaacagccaggaagataagaagaaaatcaggagaagtggtatcatagagagaccgaccaggtgcaatggctcccgcctgtaatcccagcactttgggaggctgaggcaggtggatcacttgaggccaggagttcgagactagcctgaccaacatgacaaaaccctgtctctactaaaaatacaaaaattagctgggcctggtggtgaatgcctgtaattctagctactcgggaggctgaggcatgagaatcgcttgagcccgggaggcggaggttgagtgagccaagattgtgccactgcactccagcctcagtgacagagcaagactctgtctcaaaaataaaataaaataaaattaaattaaattaaaaactgaaaaaaaggaaaaggagagagagaacattacaaagtctgagtgagtgcttgctcactcagacttttcagataggagctgaaaagttttagcaacaatgaagtcactggtgacagtgacaaggactgttaaatgaaggggtggggataggatgagatctgaatgagagataaagtggacacagtcaaatagatggcttttatcaaaagttttgcctgtgaagagaaataaagatataacagaagtaaagatacagcttgatgtatgtgaagtagagggaatataaacatattttttaaatcagaaaggtagggtttaaatattgatggaaaagagccattagaagtgttctctattgctggataacaaattagtggctttaaacaaatattttattttgcttatgattttttgggtcaggaatttgggttgaacttgactgggtggtttgtctccgactatgtgtcagcaggtgcctggagctatagggtccacttccaagatgcttcttcactcacaggtctggcatcttaccgctccttggtgcacactcagctctcttcctcccatcctccctccctagagtggttagaatgttaagctttggagttttcacctgcagagagaagataggagattcatagtgaaagtagaggttttaagaaacaggatatttggcagggtgcagtgtctcacacctgtaatcccagcactttgggaagccaaggtgagaggattgcttgagcccgagttcaagaccagccttggcaacatagggagaccctgtctctacagataatttttaaaattagccaggtgtggtggcacacacctgtggttcttgggaggctgaactgggagaattgcctgagcctgggatgttaaggctgcagtgagctgtgattgcaccacagcacaccagcctgggtggtagaatgagatcctgcctcaaaaacaaacaaaacaagcaaacaaccccaaaacaaacaaacaaaaagtaacaggatatttcattaaataattcattcattaaataatgaagttgaacgtaatgaatttaatgaagtttaataggtgtagtgggagtaacaatgagaatgaaagtgtaggaggttgtagtcaaagagttgtttcaccttagaatttctggagacagaacatttctgggtagtttactgtattttaagaaatgatcttgggagtgcatgaggatcctggccaaggagccagaaagtacagtgagcaagagtccaggacatgtagcaaggaggaatgtgactgaaataaagactaatgtcttcagtgcttgaggggagtaaccaggagacaagtgggactaaatggggcagagggctagagaggtcctgaaagcaaaactcctggctcacttaaaaaaaaactaatctctctctcaatacctaatctaatgtctaacatatagaatttaggtgcataaagcattagatttgtaatgtcctttgatgaatttacctctttaatcattataaaatgaccctctctttatccctcgtaatattgtttgctctgaaaactacttgtgcctgatactagtgaagccattccagctttcttcccattaatatcaacatggcatattttccccattctttatttaacttatacgtgtctttattcttaaagaagtgattttcttataggcagcatattgttgggtgttgctttcttaaatcttgcctaacagtatctgccttttaattgggatgtttagatttaaatttaatgtgactattgatatggttgggtttaaattctccatcttattattcattttctatttgtctcatctcccttttcctccctttcctctttttctgccttcttttggattgaatttttaaaattctgttttatcttctttgtaggcttactgtctatacttctttattttgtaattgttttttgatttataatatgaatctttaatctttaatagtctttctttaaatagtattacactacttcacatacagtataagaatcttagaatagtatatttccattttcccttttccaacctttgggctgttgttgtcatacattttgcttcgacagaagttataagctctacaatacactcataacttttgttttaaaccaattatctcttaaagagaattcaaaacaagagaaaaaagatgtttttatttgattacatatttacctttccagtactcttcattccttgtgtagatccagattccttttgttttccttctgactgtaaaactttttttggccaggggcagtggctcatacccgtaatcccaacacttagtggggctgaggcgggaggatctcttgaagccaggagttcaaaaccagcctaggcaacaaagcaaaactctgtctctattcttataaaacaaacaaaaagcatttctattttttttttctttttgagatggagtctctctctgtcacccaggctggagtgcagtggcgcgatcttggctcactgcaacctccacctcctgggttcaagcgattctcctgcctcagcctcctgagtagctgggattacaggcacacgccaccatgcctagctaatttttatatttttagtagagaaagggtttcaccatgttgatcaggctggtctcgaactcctgacctcgtgatttgcctgcctcggcctcctcccaaagggctgggattactggcatgagccaccgcacccagccaacaaaaaacatttcttgtgtgcatgtctactagtgatgaattcttccagcttttatgtctggaaaaaaacattttacctttatttttaaaaggtcttttgctgggtattgaattctaggttgacagtctttttgttttttctttgagtgctttaaaaatattgctccactgtcttctggtttgccttgtttctttttttcttttttttgagatgaagcctcgctcttttgcccaggctggagtgcagtggcatgatcccagctcactgcaacctctgcctcccaggttcaagcgattcttctgcctcagcctcctgagtgactgggactaaaggcacatgccaccatgcccggctaatttttgtatttttagtaaagatggggtttcaccatgctggccaggctggtctcgaactcctgatctcaggtgacccacccaccttggcttcccaaagtgctgggattacaagcatgagccaccacgcctggccttgttctttttttgctgtatctttttcctgcaggtttttctttctgtatttcatgttgaataccttctaaagctatgtcttcaagtttattaatttttttcttctgaggtatctaatctgctattaatctcatttattgtatttttagtcttactatagttttcatttctagaaatttgatttgggtcctttttatatcttccatatctatttttattatgtttatgcttttctttaccttcttgaacatatgggatataggtattataactttttaaatgtccctgttactaagtctagtacctatgtctttttaggtctgtttctcttgactgatagttctctctctctctctcttttttttaagagtcgtatgtttctgcttttttgactgcttggtgatttttttgttaggtgccagatatcatgaattttgctttagtgggtcctggatatttttgtattcctttcactattttgacctgtgttttggaacacaattaaattatctggaaataatttgacttttttaaggcttcatttatttatttatctggtttttgtttttggacacagagcagtctttaatcaatagccgattttccttcactatccaggcattgctcttctgagtactctactgaatatcccatatatgacaaggtttttccactctggctagttgaaagcagaactcttcctgaccctgtgtcagctcctggaaggattctactccttcccatggttcttccctggttttgagtagtatcatcacatccatgcactgatcagtactcagctgaagactcaagcttaaccctctgcagacctctggagttctctttttgtagctttcttctctctagtattctgtcctgctaattttagtttgccttggcatctcccatttcttaactctgtttcttcaactgggggaccactgggctgcattccagtttctcatctctggactgtggaccataaactgtccccaggcagtaagctgtggcaataatgaggctcaccatttgttttccttctcccagggattgctgttctgtactgcctgttgtttattgtgtaaaaagaattcttttatttatgttgttcaattttgtggttgtttaaacgaatctggtccctgtttcttcatcagagctggcagggttactaaacgtaaggcttagtgattgatgaagtatttacaaatatgaaatatgtacacttacagaatatttagggtatcatttccgcttccttgtgttaaatgcatcaggtcttctgactgatgcattatactgtttcagaggggtgcttactatatggagaacatagaagtactagttattaactatttttttgtattaaattttggtacgtcacataaacattgagtctcctttaaatgtgtcaaatgtagctgacttactaattggattctgtcatactctttttctgtggtcaccaaatattagcaaatttcttcattcagttacacaagtacttggccaacatacttttacataagaaaatacttaggatgggctggcaagatagccaaataggaacagctctggtctgcagctgccagcgagatcaacccagaaggcaggtgatttctccatttccaactgaggtacctggctcatctcattgggactggttagacagtggatgcagcccacggagggcaagctgaagcaggatggggcatcacctcacccgggaagcacaaggggttggggaactccctcccctagccaagggaagctgtgacagactgtgtcatgaggaacattgcattccagcccagatactatgcttttcccacagtcttcgcaacccacagaccaggagattccctcgggtgcctacaccaccagggccctgggtttcaagcacaaaactgggcagctgtttgggcagataccgagctagctgtaggagttttctttcgtactccagtggtgcctggaatgacagcgagttagaaccattcactcccccggaaagggggctgaagccagggagccaagtggtctacctcagcggatcccacccccatggagccaagcaagctaagatccactggcttgaaattctcgctgccatcacagcagtctgaggtcgacctgggatggtagagctaggtagggggaggggcattccccattactgaggcttgagttttcccctcacagtgtaaacaaagccaccaggaagttcaaactgggcagagcctaccacagctccctaaatccgctgtagccagactgcctttctagattcctcctctctgggcagggcatctctgaaagaaaggcagcagccccagtcaggggcctatagataaaactcccatctacctgggacagagcacgtgggggaaggcgcagctgtggacacatcttcagcagacttaaacattcctgcctgctggctctgaagagagcagcagatctcccagcacagtgctcaagctctgctaagggacagactgtctcctcaagtgggtccctgacccctgtgcctcctgactgggaaacacctcctggcaggaatcaacagacacctcatacaggagagttccagctgccatctggtgggtacccctctgggacgaagcttccagaggaaggaacaggcagcaatctttgctcttctgcaacctccactggtgataccaggcaaacagggtctggagtggacctccagcaaactccagcacacctgcagcagaggggcctgactgttagaaggagaactaacaaacagaaatgaatagcatcaacatcaacaaaaaggacgtccacacagaaaccccatttgaaggtcatcaacatcaaagaccaaaggtagataaatccatgaagatgaggaaaaaccagcacaaaaaggctgaaaattccaaaaaccagagcgccttttctcttccaaagaatgacaactcctccccagcaaggggagtttgacgaattgacagaagtaggcttcagaaggtgggtaataacaaactcctccgagctaaaggaccatgttctaacccaatgcaaggaagctaagaactttgaaaaaaggttagaggaattgctaactagaataaccagtttagagaagaacataaatgacctgacggaactgaaaaaacacaacacgaggactttgtgaagcatacacaagtaccaatagctgaatcgatcaagcagaaaaaaaggatatcagagattgaagatcagcttaatgaaataaagcgtgatgacaagattagagaaaaaagaatgaaaaggaatgaacaaagcctccaagaaataggggactatgtgaaaagaccaaacctatgtttgattggtgtacctgaaagtgacagggagagtggaaccaagttagaaaacactctacaggatattatccaagagaacatccccaacccaacaaaacaggccaacattcaaattcaggaaatacagggaacaccacaaagatactcctcaagaagaggaaccccaggacatataatcgtcagattcaccaaggttgaaatgaaggaaaaaatattaagagcagccactgctcaaggaaataagagagggcacaaacaaatggcaaaacattccatgctcatggatgggaaaaattatagcgtgaaaatggccatactgcccacagtaatttatagattcaatgctatccccatcaagctacctttggctttcttcacagaattagaaaaaactactttaaattttatatagaacctaaaaagagcccatatagccgagacaatcttaagcaaaaagaacaaagctggaggcatcacgctacttgacttcaaactatactacaaggccacaataatcaaaacagcatggtactggtaccaaaaaagataaataaaccaacggaacagaacagagacctcagaaataatgccacacatctacaaccatctgatttttgacaaacttgacaaaaacaaccaatggggaaaggattccctatttaataaatgatattgggaaaactgactagccatatgcagaaaactgaaactggaccccttccttacaccttatacaaaaattaactcaaaatggattaaagacttaaacataacacctaaaaccataaaaaccctagaagaaaacctaggcaataccattcaggacataggcatgggcaaagacttcatgaccaaaacaccaaaagcaatggcaacaaaagccaaaattgacgaatgggatctaattaaactaaagagcttctgcacagcaaaagaaactatcttcagagtgaacaggcaacctacagaatgggagaaaatttttgcaatgtatccatctgacaaagggctaaagtccagaatctacaaggaacttaaacaaatttacaggaaaacaaacaaccctatcaaaaagtgggtgaaggatatgaacagacacttctcaaaagaagatatttatgtggccaacaaacatatgaaaaaaagctcatcaccactggtcattagagaaatgcaaatcaaaaccacagtgagataccatctcatgccagttagaatggtgatcattaaaaagtcaggaaacaacagatgctggagaggctgtggagtaataggaatggttttatactgttggtggcagtgtaaattagttcaaccattgtggaagacagtgtggcgattcctcaaggatctagagccagaaataatatttgacccagtaatcccattactgagcatatacccaaaggattataaatcattctactaaaaagaacatgcacacatatgtttattgcagcactattcacaatagcaaagacttgaaaccaacccaaatgcccatcagtggtagactggataaagaaaatgtggcacatatacaccatggaacactatgcagccataaaaaaggatgagttcgtgtcctttgcagggacatggatgaagctggaaaccatcattctcagcaaactaaccaggaagagaaaaccaaacaacacatgttttcacttataagttaaaactgaacagtgagaacacatggacacatggaggggaacatcacacaccggggcctgtcagggggtgcgggtctaagggagggatagcattaggaaaaatacctaatgtagatgatgggttgataggtgcagcaaaccaccatggcacgcgtatacctatgtaacaaacctgcacattctgcacatgtatcctagaacttaaagtataataaaaaaacagaaaatatttaaaatatatctttcaaattatcttttcaaatttaaatcgagggtcattttatgtatgagtataatttgtaatgaatagcccatagttttagagtcctgattcattgacaaacttataaacaaaattttaagcttttttggtattcttttgaaatgtcaaaattgatgggaagcaaacacaaaagggagaacagtctgtggctctgaaaaaaccaaaaaggatatctgttgtatgtttgtatggtgggtcattaacctttggtgtactttgcagaagtattttaagtatttaccattggacattatttgttttaagttatattttgctgagagctacaactcaggaaggcaagtgaattgtaagataacgattaagccacatttaacactttttaaaagcatgggccaggacaatgaagcagtatgatgccatatatacttttacacaacagccatgctaatataatgataaagcaattatgctatatttttaaaagcttctcatgaattacctaaaataaccatgtatttacttttctttgccagaaagaggaaacattttattttaattttaaaaaattcaattctgaaaacatagctaaagctttaacctttctcactctgacccaatatattcctaatatagctttgcccttgacttccacagctaaatactagtttctcaagtgatttaggagacttgacttcattattcaaaactgaaattatttagcttgttctaaatgcaactttgcttcccactatgtctatttttccattacttttcaaatcatctgggcttaaatactgagcactttctccttttctttctcaatagtttgatagagtcctgtaatttttttttaaagctgtctctcatatttattatattattattttaatatacttcattacacttccctagaacagatcatcagctctctttaagtaatttgtctgaggtcacccagttggcatttgaactcatattggtttgattccaaattccatactggtttctagtaaaggtctctgtcactgtactacattatttctgtgaaatcattcatgctgtttttactacctctataatatatagtcaggcatatgggacagtataaagggagcaatacaaatagtaagttaattttattctaagtgaaagcataatatgtatgtgtattttttatcctgagtaacaagggaagtgttttgcctaggagctaataagtaacaagaaagggaaaagtaacatttgttgactagctcctttgtgcagtgcactgtgactattggtctggcttattcctcaggaagaaggattaaaagaagactttacaaaaatgagcaaactatattataaaagtaaatgctagtatgcatatatgtttcattcatgcaactcctagaaatgagaatttactataagtgttttcagaatccacaataatttaggttgaaattaggtatttggatcaactttcaagggaaggggtgacaatgaggtgaaatagacatctagattgttttcgtagactgaaacattggacctgaggtttttgttgttgttttactctttctctgtttttagtaaaagattccaggtatgcctaaagtcatcttctatacgaatgcaaaaatgtaacgacaaagaagggaaaataaaagaaggcaatatcttaggaataaatattttatagtgacattatttttctgctagtgaactaataatctacaaaaattttaagatagataagcagaaagaatacaaacaaaaaaagatagtaatttaactcatatgaataatcatccactgaaatgtagcaaggatatgctacatatgaaatgtaattagatgattgcttaaagatctaggaatataagctcaatgtaataaaataactttcttcatcattgttaaggattaataaggcattaaatgggttttcatgtgggtcctcatatgttaaaaaggacaacaataagaaaatctaaagaaactgagataacttataaatcaatgcaggtattctgtgttaaatgcttatgtaagcctgagttcttcatccagatctgtttatgattttaaacataaaatcattttcatttctaaacctttgctcaagtaacttgtagtacctgagtcctatgtctgatccctaagtctattcttttctctatgtatctatacccttctttaattttaaaacactctgacatatgaaaaaatgccagagtttactgtagagaaatattcataacttgtctattcatgtcactcctccccaccacaccatccatattatacacattacccattctctttgttcattaattggcaaaagggactaagaaattcaaggatgtccaaaaataaaaaacaaacaaaaatctaacaactcaggaatgtcctgtaggtagctcatagaaacttagtttaggaagtagtgctcatcacttgcttacttctttggaagtttgtctgataattatacagaccagcatcaaaataactctcatttatgtgtgtgacatttcagtgtagaagtaataataggtaatgtttttgcatatgtcctattataggtactgttaaaagtgcttcagtgtattaactcataacttctcacaactctatgaaatagattctgtcatcactgtttcacagatggagaaactttcctgtgtccacaaaactggttggtgacagagccagaattttaactcaggctatctggttccagagactatacttttagcctctatgttgccttttagtgtatattagtttactgtttggtatgtgcattgtcatgattcgtttatttgctcatgttttatctgtgtttgtatttttgtgtttgtgagtgttactatgctatggcaaaaagggcctagactttgaattagcggatcttacttaatattcacagaagcctggaagtgtaaacactgctatccctattttatagataaagagacctgaggtccagagatgtcatgtaacttgctttggtgtggttctgaacaaattatgtctctgtatctcaggtttccttgtatgtaaaatagggataactttcagttgttgtgaggaataaatgagcatttatgagaatagtaattagaaacataacaattaattgttagtacccttcattccttttcctctgctatacagtgatttcataagaacagagaaccgaggattcagttacacagtattaacctgtttatcttggcttactataagtacagagaatttttctcttctcttgaggcacccctcctcccccatcaccttctcaaaatggaaaaagttcagggggaaaaggcatcatgggactccagcattgttaagtatgggcagtgttcactgttatattacagttggaatttgttatgttgctttagttatgaatcatgtcagtaattaccctgagggtggtgttagttcactattcaagtacaaacaagaagggaagtagcaatggtagaagaatagctaggacatactctctgtacctaacctgtgggatggaagcacatatactcttattcagagaattttataaagagtcatgatgttagataattacttgaatttagttttagaattttcagtttgtaaacttacagtcaaatcttaactggaattgtgaggaagggctctagaattctggatatgcaagaaacaaagaagagaaataggagaaatcgatcctaattagtgtggcttctgaatttctgcagcaaaataaaaggctgttattaattattgagtttactaaaattttagaactactctaaggcaattatgcttcaatcatctaagcttacttacctttaattataaaatagaacaactttttggcatttcatttttccaactatttatagcatgttttaaaaactctgaactgtcacgacccagtctgtttcaacatacacatttgtggtccttggtgttgttactaatttacttaattgggtcttcatattttcagcttttctcagaaatggccaaatatcaaaggtatttttggtgtcttcctgtaagtgctagatttagaacatgataaggaaacgtagaataggaaacagctggatttgtttcttagccttttcaaaaaagccttttcttactttgctaagtttcagtggttcttatctccactaaatataacaacaaatttatctttaagattttgattatattccttaagaattcttcaaagactaacataaatctgtcttgctatcttttaagtctggtcattttatcattatgcccttttcttattttaagataatttaattgtctaaaagtttttaaatttacatattaagtaatgatagtttttatattaggttttatcatttagtttttttcttttaaacattaagatgaaaaaggtggagaagtgaaattacttgtcttttacatgagtcataaacaaaaatgaacataggatacactaatccaatactgaacttactatctgttcttgaaaatataatttttttgcattatctttttcataggaatatcagacacctttaatagtgtacacttttagattggcatctgatttagttgaacccacatattttaacggggtcttctgaaaataaacgtttgcacatttcagttccaatgaagaacaaatggcctggggaagggatggagagtggtaaagaaatcccttgtagaaaacctttttttttttttaaacagatgagtctcactctgttttcccaggctggagtgcaatgacacaatcatagctcactgaagccttgaactcttgggctcaagtgatcctcccacctcagcctccttagtagatgtgactacaggtgtgagccaacacacccagctaattttttttattctttgtagagacggggtcttgctgttgcccaggctggtctcaaactcctagactcaagtgatcctattgctttggcttcccaaagtgctgggattagtcatgagctgccactcttggcctacagaaactatttatatgtgtcctttgctttatttttctttaaatgcaggtccattttttcccctcgttttaggtagctaagattatattgaatcatgtgtgtttcagtctttgtcatctcaggaagtcttatgagaccacaacataaagtatagtaatttttgtccaataattttggccattagcaaaaattacctatatgacatataaatcaaatggtataattttttagtgctaagtcttaagtagtattcatttttatttaaataaattgcttctgttcgtaaagtactatatataaaacctttttaccttttttatatataaaacctatgattcataggttttatgtcctattaaaatatgagctaacaataattggtaaaattagttggaaaattatcagttttaaaagaaaattaaattgaaggttatgttgttagtaatttaaagatctcctgtgttttgatgtaaaaacactattttttagcagcagtcaaagggcttaagtagtatgactttttgtgtaacttggattgtgcaattgcttttaaaaatgaaactatttctcatttataatgagataatggaactcagtgtatcggaagagcagactgaacacacacttctacctcctttctccccgcaaaccctacagaagtgacaaaaaagacacatatcacaggggagtgaaacccagcagtactcagactgtgaagcagaaaaactgtggagggaagtggaggagttgattcatttttttagtataaaaaataaatgatgagtgtattgtggatacaataaagtagagaaaaccacagcacacaacacccccaggaaaggggactggtggaagtgggagtcttagagagcccccaagctcaaagtagcagatacagagagtggggcaataatcaggaaggttttctaaagtgctgtttggcaatggtcctcaaacttgagcatgcatcaaaattaccaggagggcttgttaaaacacatattacagattgctgggcccagtcacaaagtttccagtgtagggtccaagaatttgtatttctgatatgtttccaggtgatactgatgctgctggtctgggtactacactttgtgagcaacattttaagaacatgaaacacctggaccagtcccccatctaaggccatgccagcctatgagaataaaaaaaatgcacctctgtagtcccagctacttgggaggctgaggagggaggattgcttgagcctgggaagttgaggctgcagggagccgtgactgcactactgcattccagtctgggtgacagaatgagacactgtctcaaagaaaaacgaaaaaaaagcaccttcctctttactaatggattataaaaagatgccgtccggacacagcaaccctaagcttggtatgcagagtttaggctgaagccccatgctgttgtgcagtgcataaactgtacagatacaagcccgcgcccaccttcaaattttgtgtacacttacagacacggggctagggtttcctgatggtgccaaagagagaagcagaacagaaattgaagtaaaccgagacttctgtaacagacctaaagaaaaagaaataggaaaggcagttcttcctaggaggaaaatacaacaaagtattgtactggtaggttatgtagttccttactttggtattttcaggtacctcagttcaatatttattcattaccataagaaagaccagaggaaatggaggagagaaaataataaaaaagaacagaaaaaaaaaattccaaaactaatgaaaaccagggggcttcagatggaaagggcccatagtgccaagcatgatgaatgaatgtggatactttttgtttttttttaatgacagtctcgctctgtcgcccaggctggagtgcaatggtgtgatctccgctcactgcaaccgctgcctcctaggttcaaacgattctcctgccttagcctcctgagtagctgggattacaggcacgagacaacgcgcccagataatttttgtatttttagtagagacgggttttcaccatgttggttagcctgatcttaaactcctgacatcgtgatccgcctgcctcggcctcccaaagtgctggaattataggtgtgagccaccccacccagcaaaaaattcagaattctaaagataatgagaaaattataaaagcttccagagagaaaaagtaagctattttaggggaatgagatccagatcagcacagaagttctcattaggaatactggatattttataacctaaaatttgtcaaatatgacagcaaaatgaaatttggaaatgcaaggactcagaatgtttatcttttgactgcccttttgaaatgaaattactagggaatatgctttaaaaaaatgaaaaaagaatccacaaaagggaaatcataagacctaataaaaaaactgtcacaccagagcagagagaaaaatgcaaaaaatcctacgatgcaacaagcccagaaaatgtttgttccacatgagaaatcagatagtttcataaagaatgccttcaacaacaaaatggtttcttttaacaattgtataacctcatctaaatggtgggaatttaacaaatacagtttaaagttgataaatcaagtaataagagtaataatgaatttgtgtattaacaaaagaaaatttgccttttttcctcgggcttttgaagaattttaagattcattctaattattgagaccaattatgtgccagacactaaaataaatgaagttctagggtgtttttctcccatccttgttggcccatagttttgactgcatataacaggagatggcatgcacagcccacagaccataaattttgttttaacacagccgctttattcatttatatattgtctgtggctgcttttgcactgcagtacagagctgagaagttgcagccagaaagtagagcctgcaaaccgaaaatatttactatctactccttgagaagaaagtttgtcaatacccaatataaagcattaacatgtttcccaaagtcgtaactatacaaaaaggtataatctgaaaaatgtcatattctttgatattccttctatcccatttccaaccccacccttgttttttggtttatctttcctgtgtttctttttataaaaataagcaggtatgcacgttttattttgcctttttcttatacaaaaggtggcatactatgtgtgctcttttatgctttttttcatttaacactaccttcttgaagtcattccatatcaatttatagagatatttctcattattacagctgcatagtactgtattttgtatatatactacagtctgttcaactagttttctatgattggacatctaggtggtttccagtattttgcaatttcaactattaccacaataaataactctgtgtgtgtgtgtgtatgtatgtatgtatgtgtgtgttatgtaattgaaattgtgtcttgaggatcaatacctagaagtaagaatgctgggtcaaagggttaatgtgtgtgtgtatgtgtgtgttagatattgccaaatcccatccataaggtttgtactatttttcattcccaccagaaatgtatgaaggtagcaatttctccatgacggccactgtccaaattttgccaagtaatgacattaaaatattcttctcatctattatcaccatcatttaaaaaagaatttctcccattttaataaaggaaaaaggacaaatcagaaaaaaaggataagaagagccctttaaattgtataaatatagttcttgttgtgattatttttcttttcttgctgaagacaaatgcatctctaccctgtatcagacgaatctttatttgatcatgtctcccctaccttgaaattcttgaggactttccacagcttctcagcacttaacgtggtcttaacatggcatataagtacgtgtaagatgttagccctatttctccagccactttgaatgttttaattctttcagtatccaaattctctcccacagggcctttgcctgtggtgcttgccttgccaccattaagtaactagacaagtaaaaacaaagaatctgggttcagccaggtgcagtggcctgcacctgtagtcccagctgcttgagaggctgaggtgggaagattgcttgagcccaggtattcaagtccagcctgggcaatatagcaagacctcatctttctattaaaacaaacaaacaaacaaacagggttcttaccctggcgctacattaatttgttatgtgacattgtgtctgttgtttagtcttacagttcctcagtttccccagcctaaggtgtagttacatcagatgaccatcaggccctttctgttctaagttgtgaatgttccagaagccattttgataggacgataatggaacctagcacatttaccccatggctattaactgtaacgctgctgtaagtatacaacacataattgtttcttacaattatttatttttaaaaatcacttgaaatctattatgagtaaaccaagttttgagaaaactgattattaaatttttgaattataccccttctggggctctatcttttgaattctgtttttaacactgcttttccaatgaaagaggtaattttctacccttttaagaggttattgtagtaaatcttttgggagcaggaagacaggaaggtaggagaggcttaacactatcattttaaggtaataaaaaagagagagaagtttgcctggtgttaatctcctgttcatttattatctgatctgttgccttgtttaattgacattctttgtacttttataaaactgtctgacatcaagtaaaaatgataaagagaaaatagaaatttgagaattagagattttaggagttatgtacatgctgatctctggaaaatattgctaaataagtaatgctgttgatcattaagtactctggtcggtttagatattaatgtgtgttctacattcttaagtttgttcattagtcctttttaatttgtaatttatttcttagaagccatgttataaatgggtaattcagttttcaggaaagccccaaaaagctttttaaaaagtttgtttttggagtctttaagatttcatccctgcctaagcactgtttataaaattgtttctacacaaaaatttattcacaactaagaacatttgtgacatccagagttggactggcatttaggcacgaaaaaagtttaggtgctggaaggtagtgatgcttcttcttggaaatagtaatttaatatattgacaaaggacaaaatacttggttcatcaggtgtccaaaattgtaggaccaaaaagcaattgcttcagattcttgataactatgtaccattcatgaaccaaatgtttctcggatgggaatatgaagtttgctccattttctattttatatttctcaatttagtgactaatttctttaaataccaatatctataattaagatttctatttccaatttacttttcagcattttgaatgtagaatattaaggttcattgatagctccttaagtagtgtcttcagtttaattttctgtgaatataatatatataatacatatatttttatgctttttaaaataaactaggtacttgatattttctcagtaaagatgatttctaagttcagaaattattaggatgctggaaagccatttttccacacctgaaaaattttctcagcttactgtgttcctttgaagggagttaatgtgggaaggaagattagtcaaatcatctaccgttttatgaaaatgttaataacagtgggcacagtttttataggggggcttagtgctatcattttcaggtaatcaaaagtaaaatcatcagagttctaatattaatataggtttttctgaataaagggggaagggaagagaaaaccctcagaatatatgacttaccacaaagtacaacactagcaaaggaaaataaattttgttctggtacactttttttccatagttctagatgagaaaaccatgtttgttatctgttatgtattgctttatgaagaatcttacaaaacttttgattcatttatcttcctgttgacaagagacaccaaaaagtttctttatgaacatagtaataacaactatttaatgactgttttatttgcattttaaagttatattcatgttttatgatcttgccttaagttgagatctttaagctgaggagagttctgagaaatctcaaagttatacaattctccacccctttcccccagatcagtagattggtagttgcttctcaactcagtatgtttaagaaagagtgtatttttatttactgaagtgtaatatcaaataaaggaatttcaggtcaatggaagaaaacacatttatattatgtatatatttctcttgggatataaaggaccatggttagtatcttcactagttttttgggttttttttcttttctcttttttttttttttttgagataggatcttgctctgttgtccatgctggagtacagtggtgtgatcatatctcactctaacttggaactcctgggctgaaggcattaaagatgtattttgctttaggtttatctaaaggaaaccatggatccctaaagaaaaccccccactgttattttattgaaaatgggtttacctgtctagcaaatgattgtgatttttctgaaatcattacacctcaaacccagagaacagcaaaaatcaaatttatgtcttaaaagagttttttgtccaagttgtattgaggacttgaaagattaagacagtagaaatcagataggttggatgctgaatttaattacatgtccttttccttaaatagaaggcattcttttttagttaactttggagaactgcttgatttttttttttttttttttttttttttttgagatggagtctcgctctgtcgcccggctggagtgcagtggcgagatcttggctcactgcaacctctgactcctgggttcaagcgattctcctgcctctgcctcccgagtagctgggactacaggcatgtgccaccacacccagctaatttttgtatttttagtagagacggggtttcaccatgttggccaggagggtcttgatctcttgaccttatgatccacccgcctcagccacccaaagtgctaggattacaggtgtgaaccaccgtgcccggcctgaatttttttaaaaaaggaatatgttggataataaaaaagttttagtgtacttggtactttttttctaaagtatacctcagagccagacctattttatgtttagtgaaatgaaaatatagttttgtttagttatttggccttgtagttttgttactttataatgtaaggaactgtgtccttaattaatcattttgacgtacaataacatcttgcctacttgaaataatgttttgaacttcccaatatttggcttaaaatggccagaagagtgaaggaaaagaaaatatttacagtcatgcatcacgtaatagcattttggtcaatgaccgcataaacgatggtggtctcataagattatcatactatatttttactgtaccttttctgtgttgagatgtatttagatacacaagtaccattattttacagttgcctacagtattctttgcagtagcatgctgtataggtttgtagcctagaagcagtagggtgtaccatataagcctaggtgtgtaatagtgtataccttctagagttgtgtaagtacacactgtgatgtttgcacgacataattacctaagcaagcatcataagcaacacgtgacagtatattactttctaaatgccaagtactatatttcactatctctgatgtttctccgacctaacatacttaaaacataagttcttgactgtgatgtaagtgcacctttaaaatgtacctctggtagtattttatttttttgctaagtaaaaacttagcaaaatgacattttattagttttctccctctcaatttttgtggcatatatcattttgaaattgggtgcattatatacagaaaatcaaaatagtaacttcaaagcataccatatagatagcatctgctttctacaaattgcctacacagaccaaactcccaaaatgttatcaatgtgttactgctcaagatcttccaacaatgttaatatgtcatcatttctacagaagactacgtttttagttatacatatattttaaaatactcccaaaacatttatttcaaattactcttctttctcatttgttaatcatagtttaagaaatatgattagtagttttaattcaaaataaaaatggtatgttgaataaaatattacataaacataaattagtataaaataatttagtaaattaaatcatttaatataaaaaggaattcaaagacattacagattggcaccacataatttaagtcagtcacttttagacactaaataactttaagagattttttttaatgaaggaacaaatcaaaatggctcagaaaaatcagatggagtggatacacaaataaaatacatgttaatgcttaacacattgaatacaaattttctttatactaaagactttaaaatgtccatgtgttaatttcttttggaggtggaaaaatagtttgtccaaaaagacacttttcacagttgaaggaacttgaaagttctgtcccagtgagtcctaatggttttatttcaggcagcagattcattgtcaaatatcttactttttaaggtctgtaggttatgctgaataaaattctctgcaccatgaacttcagagaatctgaagtcacttctcctgacagaccagtttttcatttttattgaattctgaattgtgtccgatgtaaagtagtaaactatagggtcaaaacaacagttggaaacagcaatacagagagtgattgggtacattgtccttactgctgccactactgagcaattaacaaatgtttgtgttctcacaagagaatataaaataagattgatattgtaaggaacaaaacagaaacagaatatgatcaaatgtacaaaaatcatttttaaaaccttagttttgtttattttgcttctacttaatgtaacaggtttggttaaagtttttagcaccatactagaacaagttacatttaaaattagaggaataaaaaatcccactatttcgatgaaaattacaatccttgagagatatgttttccatgtggcttctggaaaattttcaaagcaggcttctgaggcattgttaccctgagagtgggtagactgaacaaaaacggcgggtgcacttcctccgatcacagttaaccacacgccagtgcaaacaatctttgcatttcttttggttcttagagtctttgacttaaatgggtagacaattgccagaaatcgatctacactaatacaggttaagaacagaatgcttccgtacatgttggtataaaacagcatcacagaaatcttacaaagtaaatctccaaatggccaattccgtgttgtgaagtaaaaaatcctgaagggtaaagtaaaaacaaaaagcaagtctgacattgccaagttaatcatgtaagttgtagtttcatttcggactttgaggacgcagatgaaaatgtatatggcaacacaattggatattaacccaagcacaaacaccatgctgaacatgcacccatacaaagtgtacttaaaggagtcattatagaagcagtgggagctgttaacgcttaccatcgtaaaggcacgtccaattttcagtttggaagcactttcatcagctgcagtctcctttgggattcagattataacctctataacctccaatttatttgcaaattatctggatctttggatggttttataaatatttcctttttctcagaaatacccaaaagaaacatgaaatttgttgctgtaaaatttccgctgggttcttcaacaggaaaatattttcatttgttagtctttagaaaatccatgaattccaaggctcagttaactgacgagcaacctttaaaaaatacagtcaacgagtccaacccataggattataaatttaaagaaaagctgtgatctgtgaccagaatgaaaccacttgtcttctaaacttgtatttcagtagtcaagatgaatactccaaagttaatgtttctttatgcctcagaatgttaagcttaagttatcaatcttattttcttttcagtgcagagtttcagagacttaaacattcccaatttgtcccattttacttcttgcttcttttaaatgaagttttccttttttgttttcctgcagtggatcccagattgtgggtaagcagaagagtcttttaaagattccgaaataaactcccaagcttgttagctcttgttgaattgaggccttttcctcagttgccagttgtatcttgaggtcgctttctctgaagtgaaaaagaaaggcttcctagatttgtaatatgacatcacaggaagaagaggctgggtttggacaaagaaactttcagcccagtttgtttgcacttcctttaatctgataatgtgtctgctgggaatatacctaggaggcttgcaaatggtcactggctgttgaactgcgtggtctgctcattaactctttttatgtggaaatgccttctgcggtgctggcaacctctcagagttgttttgatttgtttcagtagtaataattgaaagaaaaaaatcactattcagcctgttctcttattcgattgttttcgtgtttgggatatgacaatttagaaaagaaaatgtgtatgggtgtgtatttataaattgaaattgttagtgatatcttaacatagcatttcaaagaactgtttaatgactatgaaacaggggcctttaacctttaaggtataacaagcatttgactcttggtttctgaaaaatactcaatatttaattgttatcattatgagtagctcttatcctgggtctcattagtttttgataagcaattttctaacattctttcctctttcctatgcagttgtattaatattttagagctgtttaaatttttaaattactcatttctccaaaagaacaaactcaagaatgtttatctttggtgtggtgttaattttactttctaagcacaaaatgaaattgcatctttttaagcaaaatttttttaaccttaaattgattgaaataaggtttagagaataaaaatcctactacttggcaaaattttaggttcatagtcttatcttccttcttcctcccagctcttcccttaaccccttaatatgacattaactatatattgaaatatatttcagattttgtctccatctaaaagtttctatgaatggtttatatgtttatatttaaagtatactcatattttgggccaggtgcagtggctcacgcctataatcccagcactttggaaggccgaggcaggtggatcacctgagatcaggagtttgagagcagcctggccaaaatggcgaaaccccatctctaccaaaaatacaaaactagcctagggcaatagtgcgtgcctgtagtcccagctacccaggagactgaggcaggagaatcgcttgaacctgggaggcagatgttgcagtgaaccaagatcaagccactgcactccagcctgggcgacagcgagactatctcaaaaaaaaaaaaaaaaagtatacttatattttaaagactccaaaatcagaagaagaaagtgtgtgtaaggtgagggtacttaaatgtaggtgttatttcctcaaagattgaggatatcacaacctctatggcacatgtttttcttgttttaaatatcattttcttcagaaaaggctagatctagttatgccttactgttattatttttttaatttggtctagtttaagctgaaactcttcctcttgggtattaagtaatttaagaacaatttatttttttctcataaattacttagctagcttaaaaataacttattacagtaaaatgttttgtgttgttttgcaccattctttcacactcagcaatttttgtcatttgttgatgaactataatctatttctactgtctggactagaaaattcatctattatcaaatgacaaaaaaagatgagtattacttataaccaatacttaaaattttgaagggttgaatatcttttatatcacatttggtatagaaaagatgtatgtgtgtgttcttattagaaggctggtagaagctgagtgagcattaatgaaaaaaggagtggttaataagcttgtattctcattggaaaaaattttctgttagtagttatgtcttactgttattttttttttatttggttcagtatgttttaaaaaaacaaaatcttagtaatcttctttcaaattgatagtctcctctttagtcatctttaattaatgaaatatatgcagttgtatatgctgatctcatcctacttttactttcattttgaatatggcggcattttctcattcaaataattaaaatttattaattctacttggaatatttttctacatattgtcattactcacttgacttgttattcacttaagtcattcatctatagttttttcttttcttttctttttctttttctttctttcttttttttttctcactctgccgcccaggctggagtgcagtggtgcgatcttgtcttactgcaacctctgcctcccaggttccagcaattttcccacctcagcctcccgagtagctgggattatgggcacccgccaccacacccagctaatttttgtatttttagtagagatagggttttaccatgtggccaggctggtcttgaactcctgacctcaagtcatccacccacttcagcctccccaagtgctgggattccatgtgtgagccaccgtgcccggcctgttcatttatagttttttaatgtttgagttactggggcttaaaaatggatagatcactatttgttgaattaggcttttcattattatcagtatcatagtaaatgtttgtataattcttaccacaattcttggttctttgtagatgattctcacatgtttgctgatgaatgaatcataaacttgaattttgttgccagttgtttctactgaggaagagccatagcagagggactgtttgaacaggaagaagataattgaatactgcattttttccagatattaaatttggcctctaattaaggaaccaaaggggaatttagaaactttgaaaaattcttaggttagaattggaaaaatacagagtaactacttgcaaagggaggtaatgaatccatataatcaattatatttaatagatacttttgtatttgataaactcaggcaaactgttattttaatgtgagatctctacacttctggaacttaactctgagaatcaacttatttcttatatggattttttggggggagcgaaaattaaacagagccagatagatgttaaaatggtgaacacaggaacagctggagtctgcagctcccagcgaaatcaacgcagaaggtgggtgatttctctatttccaactgaggtacccagctcatctcattgagactggtcagacagggggtgcagcccatggaaggcgagccaaagcagggtggggcatcgccttacacgggaagtgcaaggggccagggaacttcctcccctagctaagggaagccatgagggaatgtgccacgaggaacgatgcattccggcccagactctatgccttttccgtgatcttcacaacccttagaccaggcaattccctcgggtgcctacaccacccaggccctgggtttcaagcacaaaactgggcagccgtttgggcagacaccgagctagctgcaggattttttctttttcgtactccagtggcacctgaaacaccagtgagacagaactgttaactcccctggaacaggggctgaagccagggagccaagtggtctagctcagtggatcccacccccacagagcccagcaagctaagatccactggcttgaaactcttactgccagcacaggagtctgaagtcgacctgggatgctggagcttggtgggaggaggggcttctgccattactgaggcttgagtaggtggttttcacctcacagtgtaagcaaagccaccgggaagtttgaactgggtggagcccactgtagcccaactgcttctctagagtcctcctctctgggcagggcatctctgaaaaaaaggcagcagccccagtcaggggcttatagataaaactgccatctccctgggacagagcacctgggggaagggtgctatgggtggctattggtgcagcttcagcagacttaaacgttcctgcctgctggctctgaagagagcagcagatctcccaggacattgctcgagctctgctaagggacagactgcctcctcaagtgggtctctgacccccatgtctcctgactgggaaacacctcccagcaggaatcgacagacaactcacacaggagagctccagctgccgtctggtgggtgcccctctgggacaaagcttccagaggaaggaacaggcagcaatctttgttgttctgcaacctctgctggtgatatccagacaaacagggtctggagtggacctccagcaaattccagcagacctgcagcagaggggcctgactgttagaaggagaactaacaaacagaaatgaatagcatcaatatcaacaaaaaggacttccacacagaaaccccatttgaaggtcaccaacatcgaagaccaaaggtagataaatccatgaagatgaggaaaaaccagcgcaaaaaggctgacaattccaaaaaccagaatgccttttctcttccaaagaatcacaactcctcgccagcaagggaacaaaactggacagagaataataaactcctccaagccaaaggaccatgttctaacccaatgcaaggaagctaaaaaccttgaaaaaaggttagaggaattgctacctaaaataagcagtttagagaagaacataaatgacctgatggagctgaaaaacacagcacaagaacttcgtgaagcatacacaagtatcaacagccaaagcagaagaaaggatatcagagattgaagatcacctttatgaaataaagtgtgaagacaagattagaggaaaaagaatgaaaagaaacgaacaaagcctccaagaaataggggactatgtgaaaagaccaaacctatgtttgattgtccctgtacctgaaagtgacagggagaattgaaccaagttggaaaacactcttcaggatattatccaggagaatttccccaacctagcacgacaggccaacattccaattcaggaaatacagagaacaccacaaagatactcctcaagaagagcaaccccaagacacataatcgtcagattcaccaaggttgaaatgaaggaaaaaatgttaaaagcagccagagagaaaggtcgggttacctacaaagggaagcccatcagactaatagtggatctctctgcagaaaccctacaggccagaaaagagtgggggccaatattcaacattcttaaagaaaggaattttcaacccagaattttgtatccagccaaactaagcttcataagtgaatgagaaataaaatccttcacagataagcaaatgttgagagattttgtcaccaccaggcctgcattacaagagctcctgaaggaagcactaaatatggaaaggaaaaattggtcccagccactgcaaaaacataccaaattgtaaagaccattgacactatgaagaaactaatgggcatcaactaatgggcaaactaactggctagcatcataatgacaggatcagattcacatataacaatattaaccttaaaagtaaacgggctaagtgccacaattaaaagacacagactggcaagttggataaagagtcaagacccatcagtgtgctgtattcaggagactcatctcacatgcaaagacacgtgctctaaataagggaatggaggaagatttaccaagcaaatggaaagcaaaaaaaaaaaaaagcaggggttgcaatcctagtctctgataaaacagactttaaaccaacgaagatcaaaaaagacaagaagggcattacataatggtaaagggatcaatgcaacaagaagagctaactatcctaagtatgtatgcacccaatacaggagcacccagattcataaagcaagtccttggagacctacaaagagacttagactcccacacaataatagtgggagactttaacaccccactgtcaatatttgacagatcaatgagacagaaaattaacaaggatattcaggacttgaactcagctctgcaccaagcagacctaatagacatctacagaactctccaccccaaatcaacagaatagacattcttcttagcaccacatcacacttattctaaaactaaccacatgattgggagtaaaacactcctcaacaaatgcaaaacaatggaaatcataacacagtctctgagacctcagtgcaatcaaattagaactcaggattaagaaactcactcaaacctgcacaactgcatggaaactgaacaacctgttcctgaatgaatactgggaaaataatgaaattaaggcagaaacaaagaagttctttgaaaccaatgagaaccaagacacaacatacccaaatctctgggacacagctaaagcaatgtttagagggaagtttatagcactaaatgcccacaggagaaagcagaaaagatgtaaaattgacaccctaacatcacaattaaaagaactagagaagcaagagcaaactaattcaaaagctagcagaagataagaaataaccaaggtcagagaagaactgaaggagagagaaacacgaaaaacccttcaaaaaatcaatgaatccaggagctggttttttgaaaagattaacaaaatagatagaccactagccaggctaataaagaagaaaagagagaagaatcaaatagacacaataaaaaaatgctaaaggggatatcaccactgatcccacagaaatacaaactaccatcagagaatactgtaaacatctctatgcaaataatctagaaaatctagaagaaatggataaattcctggacacatacaccctcccaagagtaaaccaggaagaagtcgaatccctgaatagaccaataacaagttctgaaattgaggcagtaattaatagcgtaccaaccaaaaaaatcccaggagcagatggattcacagctgaattctgccagaggtacaaggaggagctggtactattccttctgaaactattccaagcaatagaagaaaagagagtcctccttaactcattttataagccaagaatcatcctgataccataacctgccagagacacaacaaaaaaagaaaatttcggccaatatccttgatgaatatcgacgtgaaaaccctcaataaaatactggcaaactgaatccatagcacatcaaaaagcttatccaccacaaacaagtcggcttcatccctgggatgcaaggctggttcaacatatgcaaatcaataaacgtaatccatcacataaacagaaccaaagataaaaaccacatgattatgtcaatagatgcagaaaaggccattgatgaaattcaacactgcttcatgctaaaaactctcaataaacttcatattgatggaatgtatctcaaaataataagagctatttatggcagacccacagccaatatcatactgaatcagcaaaagctggaagcattccctttgaaaactggcacaagacaaggatgccctctctcaccactcctattcaacatagtattggaagttctgttcagggcagttagaaaagaggaagaaataaagcgtattcaagtaggaagagaggaaattaaattgtctctgtttgcagagacaatgattgtctatttagaaaaccccattatctcagcccaaaatctccttaagctgataagcaacttcagcaaagtctcaggatacaaaattaatgtgcagaaatcacaagtattcctatacaacaataatagacaaacagagagccaaatcatgagtgaactcccattcacaaatgctacaaagagaataaaatacctaggcatacaacacacaagggatgtgaaggacatcttcaagaactacaaacttcactgctcaaggaaataaagaggacacaaacaaatggaagaacattccatgttcatggataggaagaatcaatcttgtgaaaatggccataccactcaaagtaatttatagattcaatgctatccctatcgagctaccattgacttcctttataaaattagaaaaaactactttaaatttcatatggaaccaaaaaagcccatatagccaagacaatcctaagcaaaaagaagaaagctggaggcatcatgctacctgacttcaaactatactacaaggctacaataaccaaaacagcatggtattggtaccaaaacagatatattgaccaatggaacagaagagaggcctcagaaataatgccacacatctacaaccatctcatctttgacaaagatgagacaaaggattccgtttaataaatggtgttgggaaaactggctagccatgtgcagaaaactgaaactggacccctttcttacaccttatacaaaaattaactcaagatggattaaagagttaaatgtaagacctaaagccatgaaaaccctagaagaaaacctaggcaataccattcaggacataggcatgggcaaagacttcctgaccaaaacaccaaaagcaatggtaacaaaagccaaaattgacaaatgggatctaattaaactaaagagcttctgcacagcaaaagaaactatcatcagagtgaacaggcaacctacagaatgggagaaaatttttgcgatctatccatctgacaaagggctaaagtccagaatctacaaggaacttaaacaaatttacaggaaaaaagcaaacaactccatcaaaaagtgggtgaaggatatgaactgacacttctcaaaagaagacatttatgtggccaacaagcatatgaacaaaagctcatcatcagcggtcattaatgaaatgcaaatcaaaaccacaatgagataccatctcatggccgttagaatggcgattattaaaacgtcaggaaacaacagatgctggagaggatgtggagaataggaatgcttttacactgttggtgggagtgtaaattagttcaaccattgtggaagacagtgtggcgattcctcaaggatctagaaccagaaataccatttgacccagcaagcccattactgggtatatacccaaaggattataaataattctaatataaagacacatgcacacatatgcttattgcagcagtatttacaatagcaaagacttggaacccacccaaatgcgcatcaatgatagacaggataaagaaaatgtggcacatatataccatcgaatactatgcagccatgaacaaggatgagttcatgtcctttgcagggacatggatgaagctggaaaccatcactttcagcaaactaacacaggaacagaaaaccaaacaccgcatgttctcactcataagtgggaactgaacaatgagaacacatggacacagggaggggaacatcacacatcggggcctgtcggggttgggggttagaggagggatagcattaagagaaatacttaacatagatgatgggttgatgggtgcagcaaaccaccatggcacgtgtatacctatgtaacaaacctgcacgttctgcacatgtatcccaatacttaaagtataatacttttaaaaaatggtgaagacaagcctttttttaggactgttgccataatgaccttgtagactgatttgaaatatagtgtatcagctttggcaacatagggaaaccctgtctccataaaaaatttaaaaattacctgggtgtggtgatgtcaacctgtggtcccagctggttgggaggctgaagtgggaggattgtttgagcctaggaggttgagactgcagtgagctttgattgtaccactgcacttcagcctggtgacagatcaagaccttgtctaaaaaaaaaacaaaaaggaaagaatatagcctacatatacaaccaattcaaaatatagtgaatcttggccaggatctgtggttcacacctataatcccaacactttgggaggctgagatgagaggatcacttgagaccaggatttcaagaccagcctaggcaacatagtgacaccctgtttccaaaaattagccaagtgtggtggtgggcacctgtagtcctggttactagggaggctgaggtgggtggatcacttgggcccgggagattgaggctgcattgagctatgattgtaccattttactccatcctgagtgacagagagaggcctgttctcaaataaataagtaaataaataaaaagaatgaaatatagtgaatttcattatgtaatgcatcggtttttaaaatttaatgacatctgattctgattctttgaatactttcactgcttaagctgctgggttgggtttttgtttttgtttttgtttttgtgtttttgagacggagtcttgctctgtcatccaggctggagtgcagtggcgcgatctcggctcactgcaacctccgcaggttgggttttttcactctcaggtataatagatcaaggagtcaccttacactctttatgtttaaggatttctgatttttgaaacaggttgcacaagaaacatgtataagattaaatattctgtaaaaggcttccctttatgtttcaatagcattcttctttaaaagacctatttttttccacaataagacaccgtgttcttttactataaaattgatcaaagaggaatcgattaaaactttaaagaattctctcattaaaagtttcgaaggccataattgaaattgtacataacattgagaacaggggatatgcaaaaagaaaaaagaaaaaaatcaaatgagagagtatgtgagacttaaaacagaaataaattgatttaagttcaaaagaaagtgtgagccaggcatagtggtacactcctgtagtcgaagctactctagaggctgagacaagaggatcacttaaggccataggagtttggggcttcattgctctttgatgacacctatgaatagccacagcactccagcctgggcaacataacgagacactgtctcttgaagaaagaaagaaaaaagtatgggacattgatattttaaaatttaaaaagaattattctaaacttacttcagtcattttgcatgcagcaaatgtttgccatggtgaaatgtgacttccatctcttaatttacacttatgcaaaaagcagttttctcatttgggattcttttgatgctcattatgataaaattttctatttaggtatagaaacaaataaacctttttcaatttgagaaatgaacatttgtaatttatgttgacagaatatatttattttctataaaaatatcttttagcctaaggagaaaaaatcttaaattctagactagtattaccataagtctatcggtatcatttcgaagtgatttaccttcctttcattattgtaaacacttaatactttatgttactttttaccggaatgtgagtcatctacccaagttcaaagagttgaaccaacttttatagagttggatgggagtagaagaggaaagatttaaagggtgatgaatgatgattagagcaaagtaaaagttgatgggaatgatggttgaagcaggttcaaacaagtagggaaaggaaatcaagaggagtgaaaatgttattgtggtaagatttaaaacttgaataagcatatttatctgtgcatacacttgagttgtcccttcttccttatctttttttccgaactctcttgttgcttcttcatctccaactcttagaatcatatcacgtcttttctatggagtctccttaatctcatcagttccttttctgtacttccacagtacttagtttgccttttaagacatatacgtgcaattcaattaagaatgaaaaacaaggccatgtgtggtggctcatgcatgtaatcctagcactttgggaggccaaggcgggcagacctcttgaggtcaggagtttgaaaccagcctggccaacatggtgaaactctgtctctactaaaaatacaaaatgttatccaggtgtggtggctcacacctgtaatcccagctactcagaaggctaaggcaggagaatcacttgaacctgggaagcagaggttgcagtgacggagatcatgccactgcactccagcctgggtgacagagcaagactctgtctcaaaaaaaaagaaaaataaaagaatacaaaacaaagaaataattgcaatacaagatataacaacagctattagtaacacatagacatgagaatctacgaatttagtaaagagcttcttgaggagatgatgtgtaatgaaggctagcctttacagttgaatacaaattttaaatttcaggtcttgaaggctagagccattcctggtaataatgtcccattaatatagtcatgctgcctttctcatccaaaaacacagaaaactatttgagtgactattttctccattctctcaaggatgctatgtaacctagtcctactctgaattcctggaagatgttaattcttcacatacaatatatgccttgtggcataaaggctgaatttggtcataaaaccttagttgggtaaggctaggtgggttgtagctttcaaaaatttttcacctagtttagacgctgcaaagtgtaatgaaaggaccaatttcactaggtgttaagtgacttggattctaatccaagttactaaaaattaatgtgcgtctcctgagccccacctactcaggaggcagaggtaggaggatctcttgagcccaggaattccagtttagcctgggcaatatagagagtcctcaactcttaaaggaaaaaaaaaatgacatgaccttgagcaaataatttagcttctctattgtatatttgtaaaaggagagtattaaattagacctatagaattcttttcagctcttagctttctatctaattcagtctccccactaattttcaatgacaagaaagaacatatattattgtttcaattttacagaccaagaaactaaaattcagagaagttgtgacttgcttaggattacaaagtgattattggtggagaatgacgaagtcaaaactaaaaactgggtcctcacaagaagtacccaacccagttccttatacatgtttgtataatgaaagaatacaacttagtgagtgcatgcataaaggataatagaaagcactgtgacctagagatccagaatccttgatttctaaattttgaccttaccttgggcaaactctgccctgaactttaagatggatatgacatgcccttttgaccttatgaagagttttcagaataaaatgaaatgaaaacatattctgaatgtaaacctctaaaaagatactattatagatgacatcacctataatatcttaactttatagaaataaaggttatgttgtgggaaatcatggaacaataagatttgttttgttttcttgaccagataggatgcctgtgctctgtcagataaagaagtgatcatgtgatgcatttggtatgccttttttagcactgctaatgtacagccaatttaaatcaaatagacataggctttgcttataaaaaccacatatatttctaagttagtttgcttggtggttaacacattgcatattgcattagtcttaatatcctctaatgttggagctagcactggatcctagaaattcagaataaaagtccaccttacccctgttacaactagccattcatcttctttggtatatagtttagctctccttccagtcactcaagtacaacttaggaaactaaaaccatagctgattattgctggagcaggaactcgaatcctagtttcttgacttctagtcaaatgttctcgtagtaacaggtagctttcaccctttttttcttactgatgttgtgctagttcgttcttgcattgctgtaaagaaatacctgagactgggtaatttgtaaagaaaagagtagggtttagttggctcacggttcttcaggctgtacaggaagcatggcatcagcttctcctcagcttctggtgagtcctgaggaagtttatattaatggcagaagtcggaggggaaacaggcatgtcacgtggtgacaataggagcaagaggaaggaggaggtcccatgccctttttaaacaagcagatctcttgtgaactaactgagcgagagctcggttatcaccaagggggtggtgctaaaccattcatgagggatccacccccctgatgtagtcatcttctaccaaacctcacctccagcattggggagcacacttcaacacgagtcatctaccaaacctcacctccagcattggggagcacacttcaacacgagtcatcttctaccaaacctcacctccagcattggggagcacacttcaacacgagtcatcttctaccaaacctcacctccagcattggggagcacacttcaacacgagtcatcttctaccaaacctcacctccagcattggggagcacacttcaacacgagtcatcttctaccaaacctcacctccagcattggggagcacacttcaacacgagtcatcttctaccaaacctcacctccagcattggggagcacacttcaacacgagtcatcttctaccaaacctcacctccagcattggggagcacacttcaacacgagtcatcttctaccaaacctcacctccagcattggggagcacacttcaacacgagtcatcttctaccaaacctctcctccagcactggggagcacacttcaacacgagtcatcttctaccaaacctcacctccagcattggggagcacacttcaacacgagtcatcttctaccaaacctcacctccagcattggggagcacacttcaacacgagtcatcttctaccaaacctcacctccagcactggggagcacacttcaacacgagtcatcttctaccaaacctcacctccagcactggggagcacacttcaacacgagtcatcttctaccaaacctcacctccagcactggggagcacacttcaacacgagtcatcttctaccaaacctcacctccagcactggggagcacacttcaacacgagtcatcttctaccaaacctcacctccagcactggggagcacatttcaacacgagtcatcttctaccaaacctcacctccagcattggggagcacatttcaacacgagtcatcttctaccaaacctcacctccagcattggggagcacatttcaacacgagtcatcttctaccaaacctcacctccagcattggggagcacatttcaacacgagtcatcttctaccaaacctcacctccagcattggggagcacatttcaacacgagtcatcttctaccaaacctcacctccagcattggggagcacatttcaacacgagtcatcttctaccaaacctcacctccagcattggggagcacatttcaacacgagtcatcttctaccaaacctcacctccagcattggggagcacatttcaacacgagtcatcttctaccaaacctcacctccagcattggggagcacatttcaacacgagtcatcttctaccaaacctcacctccagcattggggatcacatttcaacacgagatttggaagggacaaacattgaaaccatatcagacataaaataggaaacttggtccatagcttaggtaaatattaagcaaagaactttgtctttaaatgagtaagctctgcagactttttaaaacactaaattctaacattatgatagaaatttaagattaagagattttagacattttcatccttctgtagattaaaatcgtatgatgaccatccttcatttttagcttcatctttatttatttaaaaagtttgcatttgtacatagtaatgtgccaagttttatacaaaagcaggaaatatctctgctgctttcaaataattagaacaagggttttctgtgaatagtaaatttaacaccttccagcatagattattatcagaaatccaagtactcttcagttaaagtaaacacttattgacttgtatcttttacctattactgaggggtagaagttaaaaaggattggtctctcaggatgctcctggaagctgcatgcttgtggctataaagctattctctgatatacctgaattcttttgctcccagtagtgaaattgtgtgtgtattaaaagtttaagcattgtttactccctgatttatatttgctgatttttcatattattgtaatgttataaaatggaagtgcaaaaaagggttgttttagtcaaaccaagttcggtgctttgaaatgactcagaggcaagttgcagaaaatattgtagacttagatgtagaaaagatatgagggggcaacgtaagaaactagaaaggattgctaggtgcagtgacacatgcctgtagtcccagctactctgtaggctgaggtgggaagatcactggagcccaggagttctgggctgtgcgctatgctgattaggtgtccacactaagttctgcatcaatatggtgacctcctgggagcaggggactaccaggttgcccaaggaggggcgaacccacccaggtcggaaagtagaaggattgtgtctctaggcctcagactcctttgcatttttctgtcctcaccctgcacatagtgaaaatcataaacccacattattggtgtggtttatagaagaaaaacaacttagaactaaaaaaaaaacaaaaaaccttgaccttacgtaaagagattttcaaatgaatacactttttgtgtttttaaaattaaaatgttatatggaattatatatattattttaaaatgatttcctgcttagctttttaaattaactggtgccaatctctcaaataagacaatttatgtaccagcagtaatcaactggaaaatgtaatgaaaaatattcaatttacagcaataacaaatagtacaaaataccttaggaataagcttaataggcaaagtgcaggatgtagatgaaaacaaagcaaaagactacaaaactttaataaaggccataagagaatacttgaacatgtgccaggcagtttttctgggacaaatctatacatttaatgccaatccagtaaaaatctcagtatgttttcagtgcatgtttttacaagtttgttcacctgtagatactgtgggttatatcacctagcagtttcatttctaagaaaaaaatcccctcctaatttgcattctccacaccttcacccaaaccagattattattagacttttaacaggtcaaagtagtatcttgtttagtttgcatttctttagttataaggagtccagaaataatcccatacccaggggaatttaatgtatgataatttatccacttcaaatcagtggagaaaattcaggataattcagtaaatgctcatgagttatcaggatagcaatttgaaaaaaagaggtagactttgatttattctttataccaaaataaattctagctagatcaataatctcaataaaaaatgactccatttaaaaaatgactccatataagttctggaaaaaaatgagcacgttagaaaaataacagtagaggccaggcactgtggctcatgcctataatcccagcactttgggaggcgagacaggtgggtcatctgaggtcaggagtttgacaccagcctagctaacgtggtgaaaccccgtctctactaaaaatacaaaaattagctgggcatggtggcacgtgcctgtagtcccagatactcggaaggctgaggcaggagaatggcttgaacccagggggcggaggttgcagtgagccgagattgtgccactgcactctagcctgggtgacagagtgagtctccatctcaaaaacaaaaaaacaaacaaacaaacaaaaaaaaaaaacagtagaggcctgctgtggctcacacctgtaatcccagcaaagaggctgaagcagaaggattgatttctggagcccaggagtttggggctgcagtaggccatgccactgtacttcagcctgggtgacagcccaactctaacaattaaaataaaataatatatttaaaaatagcagtagaggctttctaagtattatataaaatctagtgtttaaaaaaagataggtttgactaaataattttgttgcaagaacaacataaagtggaatgaaaacatcagtccatcatatgaatcatatgagttataacatttacagaatagttaaatgacaaattatggaaacaagtctgttagaacaaactaacaaaaaataacaacccattcaaaaaggtgggagatgcatctaaacaagcatatcattttgtccttaacttaaaagtggttctcagttttaggtacccaaatttaatatttgtattttttttaagttttggccttcaaaataaaaatgactatacatttgattagacttctttcttttctttttattatagatgattgatttttaaggactagtgctatgaacattaaagcaagtatgcttaaaaccaaaaacatattttgactttaggcatttatgcagataaatgtttcgctcttaacccacttggaattcaaagagactagctctttaacagatactgatactcaaaggtaaggaagaattattggtatgattctaagccactagtcatctattcccagagcaaaatttctgtggttacttttttttattggttttctagtgtgcttgctttaatcaactgttttcacatgtttggaaaatttgagggtttcctgtctatactagaagatacgagcactactccagaaaggttagaaacaaaagaccaaaggacggcttctacaaaaggccccctgttaaagcccagccgtttgttgttgttttagttaaacagaagtggactatttcaacctaaccgaaaaagattgctggatttttgccctggccatataaataggaaattaagacaggcatattaaaattttttcctgcttatgttgtcttcatctctgggtcaactgatacttatttttttttccagtagcaaaatatttattgagtgtaactgtgtaccaggtgcttttctaggtgctgggaatatagcagtgaataaaacaaaatccctgagcttatattttatttggagaagacaatcaataaataaacaattatacaactggtcatatggtgataagttctctgaagaaaaataatttaggaggaaaaagggggtgggcttttactgttctacatagggaggtcaaagaaggccttgctaataaggggacatttgaacagagacttgaaagaagtgaaggaatgaatcatgtggttgtctcagggaattaacctttaactgatcaacatctttaaaaggccttctccaatctgtatttccagctcacctcccagaaattcactcaccatgttcatgtccccaagatctttggggcaaatagaaatttctaaacagtatttcaacttggtaagattctacatttctgcttctgattcttatttttcatggcacctcataaaataggaatgcatgttttgtttttttgtttttttttttgggctacttgccagtgttctgaaactaaatacttctcggagagtagctgtctctcattaaagagccccagatcaacagttccatttcagtcacattccaccctgacttgtctcttctcaccattcggtgattaggttcatgtcttttactctttaatgctttggttagcatcctgtttacctcaagagactgaactttcttctcctgaatttaatttccctgatagcagggacatctgacagcctatgtcaactgtcttccttgacttctgtcaattatttgtcctaactatgcttgagtaagcgtacaggaatataaaattttatttccttggaataaaattttaatttataatataggagagatattactattaaggctcttgaaaagcaattataagagacagaataaaattaaaaggaaaaaagatagcataaccctacaactctaataaatctgctgtttatgattttccagatttaatttcagtctttgctattatgcttatatagttgaaatcagagaataatatctttaagatttggaatgggatactgctctttctttttatgtgctcttagataagaactctttctactgtgtcttataaactctgtcataccataagtttctcaaagtgattttaaccactgtacattttaaacaatatgagaaataaattaatttctgatatgaacatacatgtaagctactaaacctcagtattatgaaatatctaaaacgtgacttattagaaatagattcttttagacgttaatttttttttcaaaaagatacatatgtacttttctatttatgagtatacctgggtaaatatagaacataggaaaatgtactttgatgttttaaaacatttaaaattatttaaatataccactaactctaaattttaaaattatctttgattagaagcattaaaattcttatttaagatgtatactatttgaagaagagaattgggattctgttgccttgctttgtaacttaaaagagctttttcagggactccctcagagtacctgctggagatgaatctgtaaaaaatttttgttcagagaatttctgccactaaataagtcttaaataagtatgccacataggatagactgtatttaaatgaaaccattttttataacttacaccaaatattatgacaaaagcataattgtttcttgataaaactgttccactgttttatttgttttactgttaacaaaaatgcatttttttttttttacctttagtaggtatgcattgtattacaaaacaatgatatcttttggaaaactttcagttaaactagacaaataaggactttggcttattcagatttattccattcatcatctttgaattagtttcttcttgagaagaagcatatcttacaacttttgtctttattacctcaatatgttttatttatatgtatatacatatatactttttttcagatagggtcttgctatgttgcccaggctggtcttgaactcctggactcaagttattctcctgccttagcctcccaaagtgctgggattataggcatgagccactgtgcctggcctcaatatttatttaaaggttacaagaatatatgttcttaaaatgttgagaattaaaataaataatttctccaatcataatagctttgtattttattatattataaattgaaacattgaagttttaaaattcttcttcaatgagccaggcctggtggctcatgcctgtaatccttacactttgggaggctgaggcaggaggatcagttgaggccagtagtttgagaacggcctggacaacatagtgagaatctctctccatttaataaataaataaataaaattattcttcagtgaatctgtttttggattcagtcttgataataaaaacggagaaaaaaaattttaacagatagattatttcaatattgctctgtcagcaatatctggaaatagcattagtcatttttcttcaggtgcttttatccaacaagcctaagactcctaagattcccttccccattaggaagctccaggcaagcaagtgaaaccagcagaaggcacccagccacaaaaaacaccctggcccaggaagtctctttaaccctacagccgagactctttctcagcccaggaacaccaggcctgtagagagacactattcaggggtttccactatacaccattccaccaggcagcttgacctggtgaaaatgtgtaggtccatgtatccaccaccacaagcaattgcacccatatccctccagcctctctacccctgtccctaacacctggccactgctaatctgcccttcaattctcaaattttgtcatttcaaaaatgttatgtaagtggaatcaaacaggattagttttttttctcattcagtataattttctggagatccattcacgatattgcatgtatcaatagttcatacctttttattgctgactagtattttgtagcatgaatgtactacagtttctttggccagacacatgttgaagaatatcaggacaggttctagtttttggctatcacaaataaagctgctatgaacatttatgtttagtatcagtatgggttttcttttctctgggataaatgcctaatgagtaaaattgaagagttgtatggttattttgcattttctttgataaaagactgcaaaagtattttccagagtggttgaatcattttaaatttccgccagcaatatacgagtgagtgatccagtttctctgcattctttccatcatttggtgatgtctttattttttattttagtcattctgatagtgtaaggatatctcagtgaggttataatttgcatttcccatcaggatgatagctaatgatattgattaacctttccctgtttatttgtgacctgtatttcctctctggtgaaatttctcttcatgtctttgctcattttctgattggattgtttgttttttaccattgagttttgagggttctttatatgttctcaatactagtcttttttgttagatatgtggttagcaaatattttctcttggcctgtagcttctttcttcatcttcttcacatcatgtttctcatccaaaagtttttaattttcataaagtccagtttatcactttttccttttatggattatgcttttggtgtcaaatctaagaactccagatcctgaagattttcccttatacttaaaaaattatagtttcacattttaagtccatgatccattttaagtttatttttgtacaaagtttgagatttgggttgaggtttttttagggggtgctgagttgggcaccatggatgttcagttgtttcagcaccatttattttaaaggctatcctttttctattgatttgcttttgtatctttgtcaaaaagggaacaaagaaaagatgagacaaatagatgtagaatttaaactaattatattaataattgcattaaatgtcagtgctctaagcagcccaattaaaaggcagagattatcagagtggatgaaaaacaaaacccaactctatgctatctaaaagaaatctattgtaaatataaagacacgaatatgttaaaaggatgaatgaaaagattaggtcctggatggaactgaggttaactgaggataattttaagatttgtactatgggtgattaggtggttgataacacaattaaccaaagtaggtattgaaagaccatctcatagctggttggtgatgaaggaaatgagttcatgttaatgtttgaacctattatatttgagatgtttgccacatattcatgtggatatctttggtgtccagttggaaatatggatctagaacttgaaagcatagttttagtcagaaatgtagacttaggaataatatagatatagttaaaatcatgaggccaattgctgtggctcatgcttgtaatctcagcactttgagaggccaaggcaggcggatcacctgcggtcagaagttcgagaccagcctggccaacatggtgaaacctcatctctactaaaaatacaaaaattagctgagtatggtggcacatgcctgtaatcccagctactcgggaggctgaggcaggagaatcgcttgaacccgggagacggaggttgcagtgagccaagattgcaccactgcactccagcctgggtgacaagagcaagactctctcttaaaaaaaaaaatcatgatagtggctcagccagcatatgtattggcaagcagatctgcagaaatattagtattaaaggaccagcaaggtaaaatggaaaagatcttcagaaaggccaaggtctgccaaaattcttctattttctattctagtttcctcttgcgaggcaaaacagtcttagaatttagcttagggtggcacaaaaacatttcctgtaatgtagttctaataatattccttaaaatacccagaaaacaatagcaatttctgccttccacttcctctattgttaatttttctactagcactactgacttgtacttactttgataatcagaatctcttttaggagcaccttgacttaatagccttggagtcctttactttctagacaagttcatgcttgccttagaaatgtatgttagttatgaaaagtcatgtagaacagacttatagcttctactttttctatcaatattatttacccagtgaaatttatactaatcttgctgacagtgagagcctggtttccttcacaagactaagtagcaaaacagagtgaagcgttgttcagagagcaattaggctgacagttaatttgagtagataagtaataacatgagttgagtacaagagaaaactactgcccaagtcctggatagaaacaatgctttagaaagaaatatacatattttactttcaaaagttaagtattccatgaaatattttctttatagttaaaaaagatcaattgctatattaattatctgttagaacaactaacatttattatctcacacaaattctgaaagtcgggaaactgggagtggctttactgtgtgattttgactcatgtttcctcatgagagattcttaaattgtcaaccaaggctgcagctagtttaaggcttcactgggattggagagtctacttccaagttcactcgtgtggttgttggcaggcctcagttctttgctggctgatggccaggggcttcattttttttgccatgtgagcctctccgtagggctactccatagcagctccctgcctcaaccccagtggaagagatcctagagagggagagaacctaagatggaaactgcagatttttataaattcatctcagaagtgacatgccatcacttctgccctatgtcattggcccacagactaaccctggtacagtttaggaactgtctgcacaaggatataaatacccagtgtcagagattattggggtgatcttggaggctggctgccatagttatgacttagtgtcaattagaaaacaaatcctattatcagttttcttgtttgtgctttgctgtagttaatttgactcatgatatggctgcatcatatgtcaatattctagaaatatttaccaagtgtccattatatgcttggcactggaattttattttaagaactccctgaaagtcccatctgaaccctggtagtcacctgtctaaaatccttcagcgagtttatattttgctatttccttgctatgaaatctgtattttagcattatggaaagaaaaatttctgtctcaaaggcttgtgtgccaggtgcccttctaagcactttacatttattatctaacttagttgtcaaaacagccctatagtaagcattatttttcttatcttatagattagctgcatgaagtttccccagggccatattattttttcttctcttgcttctgagcacactattcttctgctttttacttaaaataatttgttctttctttaggattcaactcaagcataatctcttccaagaagttttctctaatgctcctaatctgagttagttgtctcttctgattttcatggcaccctgtgtattcttttattctggtacttagcactttgtattgctattttttatttacttatctgttttttttttcattagactgtaaactatagcataaaagttcaaaacaaaggctctgaaatcaaacagtttggaactgtgtcctggatccaccacttattcatgtgactggacaatttactccttgtctacctttcttcacttataaaatggcatttaaaaaataattaccttctttctagagtttgttgtgagaattaaataatataagtaatgtggttggtgctatgtctggcattcaataaatgttatctgttaagctctttgagggtagaattattgattgcttatcatgtgccatgtatcataccaaactttttatataggttattttattttcacaacaactctatgtagtgggtactactatgaatgtgctatttctcttagcatctctagatgaatggatcagtgaatgaatgatagatggaattgtggccagtggaactaattgtaggggtaaacagcaacctagaaacatggttaaaagcatgacaatgggcaaagaaagagtgaaagaggcagtaagcaaaggaacgtgactcccatactagtatagcagctaacggcacaagttttagaaacaggtagacttgggtttgaatcactgctccatcacttatcagccatataatatggggcaaaatttataatttctataaaatacacatatctactttatggacgtattttgaagattaaatgagataatatatgtaaaatatttagcatagaacctagcatatagtagatattcaataaatattaactagtactattattaaattaagataatcatgaagacagaattttggtagtgaggtagtgagagaaataaaatagaatcatgaagtataaggtaatgactttgaatcattaatcatagttatcgaaatcaggcatgatagaaagattacggttgttaatcttccttatagtgcaatatcctcaccagtccacacaacatttttgcccactgagtctgggataaagttaaaaattaatcctcataaactaaagttaatgaaatgttcagaatattctgccttcttaccgtatcatcactttagcccaaatgctgggaaaaagagaaacaaaagtcttctgtcagctattgaatgtgttatgatttagagaatttctgagattcacagtagagtctgtactttttacatttgatagacctcaaatttgcctgagtttttagtgttccagaaaataggctttggggaaggtttgaaagaaggcctttttgaacctaagaagacaagaaattgaactgttatcacaatattgctatttaagaaagaatattaagtcacttttcagaaatttatatcagaattagaaaaatgcagaaatatagtttatacttcttaaggaggtggtggaggagattagatagatacatgcatacatatatacataagtctaaatatttttatatgtatatgagagaagtatcaggaatagggtaggaaggagatagaatagtaggattacattagaatctgcttaggagcttttcttacatgtagatattctctctttttgggtatatcaaaatcttgggagtaaaagggaaacctggcatgcatgtttaataaagcttccttggggactctgatatatgctgcctcccaaataaattacaagccatatcaggaaataggagtttacagtataaaatataaccgaaaactaaagtcagatgttctacaaaatattaactatttttcctgagatagaagtggttgaaatttgggagataacttttgctatgttctgtgaggcaaagaggagggaggctagagttgatgaagacatctttcttttatgtatgatattgtctatgttgggccctgttaattttcatttacttatgtacaaatagctaatgcatattttttaactttaatgtttgttatttacatgcatagcctgatgggcacatgatccaaagtttaattttttggttgaaatttagtatttggcttcatatatataaagattggggtaaggcgatctgccttgcctttcttctactgtgtcaaagaatttatgatcaagggctagagtcagtattaattatatgattttgttttaaccaagaagaacttagttaaatttaaaattgtagttgcactcatagataaagggttttctttgttaaaaggtaaaaaagagacatctcttatacttgcttaacttttcatttaaaaaattaatgtattcataataaatagaaaatgaaaggagcttaaaaagcaaattgaacacatagttatcagagaaaacaattttaaaattatgattttaaactctcatctgtattgctaagaatgccctatattgtaatattcaaggtttgcttataattaaaatgtagggaagaaaaaaagaatcctgcagacattctaaggatgacctaggccattgatagtctaagcttgaaattaatcattagattttctgaactcttattacactggatctgttcagtctgctttaacaaaataccatagatttggtggcttataaacaacagaaatgtatttctcacagttctgaaagctgggaagtccaagatcaagtttccagcagatctgatatctggcggaggcctgtttcctggttcatagatggcaccttcttaccatgtcctcagatggtggaagggacaaggcagctctctggggtcccttttataagggtactaatcatccttttcatgagggatgtgttgaaactaaattgtgcctgaagacccttatgttacctttacatatcaaatttctattgtatctggccaacctttgattttaaggcactagggcaagaatgaccaacgggtttccaaacatatagaagtagtaacatgtgcatatcaacaaaaatcacttggtaggaacccaatactagctaataagcctactcctactgtcttagatctagttctgtttcagaattggaagctttaaggattatgaaattctgggaacttggagtaggtccacctagaagtagaagcagcaaaacccaaaaaaccaatacaatttttaatagtgttgtttaatttttaagtgttatttactagaaaataaaactatactgtgtttaatcatcaagcaatttttaacaaaaaagtttagcactaggaataggttaaacttgacacaatttgctatcatagaattatatatatgggtaaagggtaccagttagattcccattggcaaaaacctggtgattttcattctgtggtatagagatcctagttaagaggcaggaattatttaaaaatgactttaattttgatcatttaattataggacctatttattcacttgtttttaacttattcacaaatcttagtcatgagcattattaatagataatttgatgccttgtcacttagcagtacaagcatgtttatttctgacttttaaactcgaattcacccttcttgtgtttttctattcagtcgtaacccactccttctacatctacaaaatttggtgaggcatctttgactttcatcatattcagacatgctagcttcaagaactttcctattcctcttttaatgtctgtttctcacattgtattagttccttttatagtattaattcttcctacagtatgaattttattttttttttttgaaatggagtcttgctctgttgcccaggctggagtgcagtggcaccatctccactcactgcaagctctgcctcctgggttcacgccattctccttcctcagcctcccgagtagctgggactacaggcgcatgcaaccatgcccggctaattttttgtattttttgtagagatggggtttcaccgtgttagccaggatggatatagtatgagtttttattcattttgcaaatattcatcatagatatttttgtcttatttcagttagaacaggatttttttctttggattcagaaggtaactttcctactgtacttaggataaattccacaaaaactctttaacaaggtttttttcctggctattagaaaggaggaagaccctcactgaattgaagatagtaatgatgggtgaggactttgacttctgttaacacctcattcagataagtgactattttagtttaattacatgaattttgtcatctcccttggagctgcctcccagagctggtatatcagacatcctcaagtaaacctggacccaattttagaaatcttggctaattttgagttaggaagtcctttctttaaacaatattttaaaattaacagaacaatcacaaaatatattttacatattgcacttttcaaaatactttaaatatttaaaaaaatacccaacaccacaaagtaacttagtttaaaataaaataaaaatttttgaaatcagacctaatcaaattgatatatctctcattttctttgaaaattttgaccaagatatcaattaataaatccactttgaaagacattttaagacatttaattaataaatccatttgaaacacattttaaaatgtgtttgttcatgtgtataaaattatgtcattgatataacattactattcctttaaacattgttatgttcttaaaaatatctcctcttagtctataatttagcgaaaggattactgttttgaaagacttaaaaaaaatgcttagctattttttagctaagaaaaaagattcctttttcagtaaatggataaagctgaaaaataagaaattaataaaatgttttaaagaaagagtcataaatatcttaatatttaattctaggaagcttctctattcatttgcttttttatttttaaaaagaagtttaaaagagttttagttttaatatctataaacttcaaatgttattccacactcaaaaaatatttctaatgtattaagtcacagtttactaaaatagctaagttttctgattcataaaatgaataataacacttaattttaagacttattttgaagattaaatgaggtaatacattcaaataaaaccttttaaactgaaagtactttcattcttgtgtaaggaaaccatgaaagtaaaagacacatcattctattttgccagtgtatcttaaattaactagcttttattgtcagtttagtgttcagggcaccaagggtacatttcatactaagattgtgcaagtgagagtaaatgcctccttaaattttccatcttaggcacctccgttgcttttagacctggctatgttttatattgcttatatacatttttttttcttttggaaaaaagataagctgaaaaacatttttgttgatgacatgctattgctgaaataaaaacccagaacatagtgatgtgtaggaaaaaactctctcaaaccatgtttttcttctgctctcataccaccacaacagttgtcaacacaaaagacttctgtgacaaaatgtgtgggtttttttccccacacactaagcagcagataccagctgggcatcctccaactcagttctgatactgtctacttggagatagtgtcagatcccactggttggggtctcagtgcccatacctcatacccccagacaccatcctaggcctccagaacttctgacctactggcttcaaattggggttctcacaccacactcttcaggttcaattaatttgctggagctgctcacaaaactcaaggatactgggcacggtggctcaagcctgtaatcccagcactttgggaggtcgaggtgggcagatcacttgaggccaggagttcaagaacagcctggccaacatggcaaaaccccgtctctactaaaaatacaaaaattatctgggtgtggtggcatgcccctgtagtcccagctactccagaggctgaggcacgagaatcacctaaacccaggaggcagaggttgcagtgaactgagattgtgccactgcactcctgcctgggccgcagagcaagactgtctgaaaaaacaaaaagaaaaaatcaaaggaaacacacttaccggtttattacaaaggatattgcaaaggatacagatgaggagatgcgtagggtgaggtatgggagcaggggtgcagagcttccatgccctctgggggccacaccctccagaaacctccatgtgttcagctatccagaagctctcctaatccagtttttatgatgtcagcattgggatttttatgatgtcagcattcctcccctacactatagggcaaaaaccatctctggggagggtcttaaagacacacaatttacaatgatgggggaaaaattagagtcctgccttggaacaggttaaaggagggcaagagaaggtccgaggcctgcccctgaggcctaccacaccaaacgttataacaacacaacagtttttatatattttcagttttgcataatatgaagttaaagacttaagtaaattgagtaaatagtagtttttttttttttaatttcacagatcaatagagttaactcctgagttatatgcatacaaccccaaagttgtttgctgtctggagctgtgcctacacccgcctggcatattcttgagacattggagctaggaagttggaaattgatagaaaattttgtcacttgtaacagagctaaagcaatatggattatggtggaccctatcacttggaatactttcctgaaagcaacacaggtcatcattgccaaatatttttaggaccccaattctgtactaagtgctagtgatgtgataggaagccagacacaattgaactagctatctctatattagtgacttatcctaaaacagagtttctgttgtaattggtttactgtttctcttagaatatttaaacgttttaccatggtctttcagattctgcgtgatcatacagcaacctcttctttagcaacctctccactatcccacccgggtactttagttctggtggcctctttcattttctgaaagaacatcagtttcttagcatatgatctttcatcttttggaagatctctgccccttctcctttcaaagcacagcctccttctcacatttcaagactcagcgtccatgttaccttcccagatcagccttccttgaacccaccccatccacctggatctccctgtttattcttcatgagagaaccctgttctttcataggatttttctgaatttgtcatcacatacttatttccttgtttgtgtgcctcttctcaccagaccctgagcaccgtgtaagtaggaacaaagtattatttcaaagacccaagtctgaaacggtttatctgtttatacttaatggctaaggtatacatgtacacgtattctatttgactaacatttgaggtaaaaaacatgggggaaaggagcagataacacatatttttagaggatttagagtatatataactaagaaggttccctttatttgttattttttgggagggaatcctgctctgtcacccagactagagtacagtggcacgatctcagctcactgcaacctctgccctctgggttcaagcgattctcctgcctcagcctcctgagtagctgggattataggtgcgtgccaccatgcccggctaatttttatatttttagtggagatggggtttcaccatgttggccaggctggtcttgaactcctgatctcaggtgatccacctgcctcagccttccaaggtgctgggattacaggcctgagccaccatgcctggccccattttaaatcttattctcactttgaggtggagttaatctcagaaaactttgagattaagttatcttaatatcaaccttctcactttattcatttattcaacaaatgtttattgagcccttactgtgtgccaggtagttttaaacattggggatactattgaataagatagacaaagcccaagccttcctgcatcttgcttgctagtagcgagataataaataagaaaataaatgaatttataacataacctcaagtggtgatcaatactatgaaggaaatagagcagaggtaggagtagcaaataaatgggaattatggctgtcttaggcaagatgtttagacaaggctttgcttaggaggtgctatttgaggagatatgtgaataatggagtggggtgagtcataggaagcatggtcaaagagtattttgggcagaggaaacagcaagtacaaaaacccagagaaaggaagaattatgccacagtcatggaatagaaagatgaccaggatggctggagtaagaagagtgttagagcatgaggtctgagaggtatcaaggggccagaactcatgtagtgttttgtaaaccaagataaggcatttgaatttattctacgtgtgacaggaagctcttgcagggttttgagtgtggaggtgggttagggagtaacatattagctctatgaggacatctaggaggcagcaagagtagaagtatggaaaccagtttgtaggatgcttttgcagtgggacagaaaagagataagaattgctttgactctagcaatggtacaggtaatgaaaagaagtcaaacttggaatatattttgaatttagagccaatatgacttgcctggtgtcttggataagtatgagagaaagaataataatgatgactccttgtcttttttgctttgggcaactggatacaaggagtgatttaatgatatggtaaagactagggagaagcagtcgtttttggggggtggtagaggatgattaaagtttattttatacatagacatcaagtgaagatgttgagtaaggtcaaatagggcagatgcttctgaaatactccttcaaggctatttagtatctgacaaatggagcattgttacatttatggctctacttcctagcatagacatacaacatatactgggtggatggatggataactaggcatacagtcatacgtttgaggaaatagagtgttctttgtataatggcactcatagatgtaaataatcacaaccataataatatcaaatattatatattactctgtgtcaagcactgttcccaattcttaacattattaattcacttctcatatactatgatttaagttactactattatcattagtatctctgctctacagttgagaagcttattgagggtcatgtagctacaggtggccaggatttgaacccatgtactgtggctccagagtttgtgctcctacctactgcactatagttttcccgtgatcatgacatactcatcatcataaaccaatatctatatatctgtgtgaccatttggtttggggtgatggagtgataaaagtgatatttgaatgaaatatgaagactattggtgaaaaatgccaccttaatccttggaagagaaatttacttttagtataatcctattgggtgaatctgaagcacaactagattttatctcatatctgaaaggtatctaaaatatctaattagtgtacttaagtcctattaatcacacatctttgcaaggtctcaagagtctcctaaaatttcattgtttgaaagaaaaattggtagtaggccactcttgaatatatgtgggtttatactcataccattttagttaaagattttcaattcatccatggctaggaagtataaaatatttagtataacagtatgtgtattagctggaatgaatttcctaagtgttaattgttagcattactttgctcagatgaaagccattatttacactgcagtgcccctaatgaatataggaaaagatgacttgtcaacaaaaattatatgattggagttgtagagtctgcttctttttccaaagcatacatgccaccttctcttttttctccccgccataaaatccagctcctgtaggacaccttttcttctgatgcctccataggagacaactcatgctcaccatctccacctttaagaattatttctgtagtgagtcactattacagataataacccatctcctgttggtctgctgaaactgaaaaagggctgaaaattgttaaacttttgcagtgatatgtgtaatgactatatgattatcatgcctctttttattcacagcttatcaagtacctacttgacatgtagaaaggaaaagagtaaagttaagaaaagacagtttgtttctcctgaaagtttagagttgaaagcgcatctttaacacattcatacatacatccaagaaattcaaataaaataatcaagccaaatcactgaaagctgagaaaagagttgaatgttcaagtggctacttgaagtcacttcatgtgatgtatcatgtaatcctgcaaaatgagtgctgtattcctgtttttcaagtaatgaaactgaggttcagagagcaaaacgtttcattgctagtaaacttcaaactagtaaacaagaatttgagcttatatatctctaattccaggacctgtgcttttattgctaatggcttttttaaaacttgttcttcatgcttttttttattgagtgaattaagagcaggataaataagaaaaatagtatttagtaatgtattgcttaggcatgagtaacttcctatttgaaagaactgttgcgtaatcgccgtttttttttctttctttttaaatttcttctccctgcatagtttctgcatctcccagatcgcctttttgttattttgttttggcatatttatattagggactttctggaaatatttgattgccactcatataaaagagtaaatcactaaaaattagttagaaactctgagcacctggatgaggtttgggaacttcattgtatagttatttggtagagcaatttcttaagaaacccccattgcgtatctttaggttttttatcctgttactcagtacctcactgcccaaagtacctggtatcgccactgccacatccttttggtgggttaaaagtttatctggtttgcctgttggctttccttaatgctgagttccaattcagttttttctcacctactgagtaggttaccatttgtgtatctgccttccaagctttcaaaattttgtatctccagcctggacaacatagggagaccctgtctctacaaaaaaaatttcagaaaattagctgggcaccatggcgcattcctatagtcccagctactcaggaggctgcagtgagccatgattgtgccactgtgctccagcacgggtgacagagcaagaccctgtctcttaaaaaaaaagtgttgtatctgaaaggtttatgtcttttaaaataagtcagtttattgccgttttagtggggttttatgagagagagttaatgtctgcattcatttggcatctttaaccaatgttgtttatcttctgcagattccatttaatttagtttgttgtagttttagtcatccagaagtttccaatttatatgaattcagatctgttcatatcctttgcccacttttgaatggagttgtttgtttttttcttgtaaatttaagttccttgtagactctggatgttagaactttgtcagatggatagattgcaaaaattttctcccattctgtaggttgtctgtgcactctgatgatatatatatatttttttttttttgctgtgcagaagctgttgaatttaattagatcccactgtcaatttctgcttttgttgtgattgcttttggtgttttcatcatgaaatctttccccatgcctatgtcccgaatggtattgcctagattttcttctaggatttttagagttttcggttttacatttaagtctttaattcatcttgagttaatttttgtataaggtttacagaaggggtctagtttcaattttctgcatatgactagccaattctccgaggaccatttatttatttaatagggaatttatttaggaccatttatttaatagggaatgctttctccattgcttgtttttgtcaggtttgtcaaagatcagatggttgtaggtgtgtggtcttatttctgagtcctctactctgttccattcgtctgtgtgtctgcttttgtactaataccatgctgttttggttactgtagccttgtagtatagtttgaagtcaggtagtgtgatgtctccagctttgttctttttgcttaggattgtcttggatatttgcgctcttttttgattccatatgaattttatgaattttggttccatgtgaattagttttttctaattctgtgaagaaagtcaatggtagtttaatgggaatagcattgaatctataaataactttgggctgtatggtcagtcttacaatattgattctttctatccataagcatggaatgtttttccatttgtttgtgtcctctttgatttctttgagcagtggtttgtggttgttgaagaggcccgtcacttcccttgttagctgtattcctaggtattttattcattttgtagcaattgtgaattggagttcattcatgatttggctctttgcttgcttattgttggtgtataggaatgctagcgattattgcacattgattttgtatctgagagtttgctgaagttgcttatcagcttaagaatgttttgggttaagatgataatttgacctcctctcttcctatatgaatatctttgtttctttctcttgcctgattgccctggccagatcttccaatactatgttgaataggattggtgagagagagtatccttgtcttgtgctggttttcaaggggaatgcttccagcttttccccattcagtattatgttggctgtggatttgtcatagatggctctttgagatacattccttgaatacctagtttgttcagagtttttaacattatgttgaattttatcaaaggcctcttctgcaaccacagataatcatgtggtttttgtctttaattctgtttatgtgatgaatcacatttattggtttgcatatgttgaaccagccttgcattctggggatgaagccagcttgatcatggtagataagctttttggtgtgtgctggatttggtttgccagtattttattgtggatttttgcattgctgttcatcagagatattggcctgaagttttctttttttgttgtatctctgttaggttttgctatcaggatgatgctggcctcataaaataagttagggaggagtcccttcctttcaattttttagaatagtttcagtagaaatttgtacctctggtagaattcagttgtgaatgcatctgatcctgggattttttttttttttttggttggtaggctatttattactgcctcaatttcagaacatgttattggtctacttagggatttgatttcttcctagttcagtcttgggagggtgtatgtgttcaggaatgtattcatttcttctagattttttagtttatgtgcatagaggtgtttatagtattttctgatggttgtttgtatttctttggggtaagggtggtatctcccttgtcatttctgattgcgtttattccattcttctttctttccttctatattagtctagctagtggtctattttattaattttttcaaaaaataagctcctggattcattgattttttaagggttttttgtgtctctgtctccttcagttctgctctgatcttggttattttttgtcttctgctagctttggggtttgtttgctctttgaactggttttagtatcaatattgtactagcttcataaaatgagatgaggaatgtttctagtttttccattccaggaagaaaatctgagtaaaagtggaattatctgtcccttgaatgtttggtagaatttactggtaaaaccaaatgagcttgatgttttatttatgggaagattttaaattattgattcaaattatttaatagttgcaggactatgtaagttattttatttcttttttattgagttttggtaatttgtatttttgtagtaattttccacttggtctacgttttccaatttattgatataaaattattcataataattccctattatctttttaatctttgtgattttgtcccatttttcatacctaatactgcctatctatctcttttctttatcttgatcaatctgactggagatttgttagttatttcaaagaatccatttttggctttgttgaccaaactgtgttttatctttgttttcagtttcattaagttctgctcatgtcttcatttctttctctccactttcttcgttttttttctgtctttcctcctaacttctaacttattttctaatataagcgttgaaggttatacatttttctacttttttgtgtgtgggaagtacaaaaattgtcaattgggaatttcgaagtagagaaaaatatttcattctgacttttaaattgccactgtcaattgtgcctaaaattcatagtacttaccatgtcaaacaatatgattttgatatgtacctgggaaaattatgcttactaatgtggttttaatttcatcatgtttcatataggattcacctttatttgatcttattaaacaatcaaaggaccgagaaggaccaactgatcaccttgaatctgcttgtcctcttaatcttcctctccagaataatcacactgcagcagatatgtaagcaaaatatatgttatgttgaccattcaaactgcaaatagattttaagcataagtgcaatgtaacattctataaagaaactgtagggaatagaattttgaataagaatagtttctgtttttaagaaattagtaataaaaggtacatgacccaaataaagtcatataaaagagtacagagtgctactgaatcacctaggatttgcataatgagagcagttttcatggcagagttggcagtttaggtggaataggatttcaatgtggaaactggagagaatagaggagacagaggagtgtgttccaagagtcagaatggcattaactcaaaaatgtcaaaggaagcagaaaacatttttcagagtgtgcaggtcagtccatttggagtgaagcataggataagtgtagggagaagtatgggatgtggactaacacacagttgattagtgtgtgctggtgatgacgatgggaaaagaaaatgtaaacccaaatgtatctgaaacaggtctcaatcaatgtagtagtttattttgccaaagttaaggacgtgcccaggagagagatctgtgcctttctccagtgatgattttgagggctccaatatttaaatgggaaagtcagtctggaggggaaagaaaaagggtatggtaatccacatgttgcaagagaaaaagagcaggtagaggaatcgtcaattatctatccatctcatgctgagtgaatcgacattttacataagataaggtgaacatagagtcactgtctgtggaggtatttaaccttttatctgtatttatttgtgtgggaacaaaaggaaaggcagtttcttgcatgactcagatttcagcttaattttttccttttggcatagtgaattggggtcccaagtgtttattttcctttcacaaaagcaatcactaactgtgtgctgggcaatggcctaagtacttaagatttattttttcatttaatcttcataacagcccataaggtaacagatactgctgtcagcctgttaactataaaataggaattagagaaataagataacttgcctaaggtcaatagaattcaaacccaagctatctaatcccaaagtccaggctcttaatcactctaactacattgcctttcacagaaatgtgcctaatattttgtttctgtttaattctgtgtaggaactgacattacagtattctgtattagtgcaggggccattttccagagatgtcattttcatgctaacttgtacccaaagtgtttctggcatatggagaccctgccttcatgtatacatttgtttcctaagtaatgcattgtataaataagttaagccttgtttttttaaaattcaagaagcagtcatctgtaaactgccaggaagtggtgtaggcactgggaatacagaagtaagatggcctgggtccttcccctcatagagcttacattctggaggaggaacacaggcaatgaacaagtaaaccaagatgtaagatgattttagagtataataagtgctacaaaggaaataaacagagtggtgtgaaagagagaaacggagaggctgatagaatgcttagtggcactttcctttctctgataaagtgatattttgacgtcacacctgaagggcaagctgatgctagctaggcaaaaacctgcatgatgtgcattccaggcagaacaaacagcaagtgcagtggctgtagggcagatcaaacttagctggatttaggaacagaaagaaagaaatcctagtgtggctggggtattggaagaggagaatggtgcaagatgagactgaagagctaagctggggtagatcttgtagagatctccactctctagctgctatctgaagtacaggtgggtttggaggaaagggacagggcaaggcaaaaagcgaggaaaccaatttggagactatttctgtagttcagatgagggatgtaggtgacttggtctaaggtatggtattagaaatagaaatggagagatctggggtgtatttagagataaattaataggttttacattggttttatgttggatttcaggaatttggaaaatggagaaattaaaaataaccctaggtttttgacttaagacactagatgtaatgtggagctattctttgagatgggaaaataaatccagagctctgctttgttcttattaagtctgagattcgagtagttatatccggtaggtaattggagatttacacctagaacttcagagactaactttgcccaagttaggccagtttacgatactgtcagtgaactgaatgaaaatccaaagtggatactagaccagacactggtccttctaaaatcattgtgataatgggtcgcttttcttagtgtactggttaatatactacgtgttgtagaaacatccatagtaaggtacaaattctacttcctgttctctttgttcttaaagtttgtctttaaaaataagttcatttgccagctaccaaaagaaaatcagaaagtagatctagattattctgttaaataggggcagcacagaacgataatatttgtaatatctctgccttgagttatgcctgacatatttagtatggtgtaaatctgtctgaataatgttatttgaagtattaattcatagaattctgtactgtgtaatttaggtgtgtgtaaatctgtgtgtataactgaaatcttagatatgaaccatagttatcgctaaaaaaatttttagaaggagaatcacaaaaacaagataacagtatttaatatcaataaattgttttttaagctggaatcaccttatggtctcaataccactataattattaaaattgtacattatacatatatagctatttttttctaataaggcagtaatccccaggaaaagccatttattaaaatagaattagatatgatgatgacaagcagttttcctattaatatatctttcccagcttgcatttaaatagtctgctataataccaattaaatagacaagatgtatctgggtgtacaaccttgaagtgtatgtataatctgtgattcttagccaacttgaaatgaagacttttcctttaaatatatctaggtatctttctcctgtaagatctccaaagaaaaaaggttcaactacgcgtgtaaattctactgcaaatgcagagacacaagcaacctcagccttccagacccagaagccattgaaatctacctctctttcactgttttataaaaaaggttagtagatgattattttcaagagcatggactctgaaactaggctgactgggttcaaatcatgtttcttctactttctaggtacattactgggcaagtcacttaatatctctgtgtctcagtttcctcatctataaaatggaaatgataatgttgcgagatctttcttgactattcagagtcgtttttctggccggaaacctctgtgaccggtggcgcccttgatcaatttttgctcaggcccaccgggctcatttcagccccttggtctgacaggctgcactcggctcacactaccggcctgggtccatgccagccaggagcaagtcagacatggaacggagaggggtgtgtgggcaagcatgagatctggccattgcccacagtcagaaatgctggctgctgcagcggggcgggcagctccaggtgctggcacaggtgccaactctctgtgaggctgcacctggaccagacacaccacaagcggtttccacagctggcactggggaacaataaaatggctcccagaagcttggagacgccagaaaccacagggccccaaagagggagtcacagccctggctcaaggagctcccaattctgggctccccgaagggccgcagctcttctctcttctttacccacaacatggcgagcaaggggcatgtttcagccctgtttgtgttacagccctttcagcctcgccatttggtgggtcctgagttcttgtcctgcagccaggaagaatgaggtacacagacaagtggagggtgagcaagatgaagaggagatttattgagcaatagaacagcttagagaagacccatagtgggcagctcctctctgtaaccacaaagtcccgatgagtgttcagctcctagcagagaaggtagctcctctctgcaggcaggtcgtcccaacaagtgttcagttctcagcagaaagggtagctcctctctgcagctgctcgtcctgacaagtgttcagctatcagtagagagggtagttcctctctgcagctagttgtctctccatcctctgctctgctctggctgagactcgggcttctgtgggcctcagcgggaagaaagtgtgcaccgattggtacatgggcggccactagtgggcccagaaaaggtaccacaagtcctcactcctgtccgtgggactggcagcgcccacccccagccttcaggcgctccctggcctgaaggtggggcctcaacagggactcatcctctactgctcaggagcccatctgcctcctgccgccatccatgcgtcaaggggcacctgtaggccagtgccaagctgccctcagcccccgcctcggcttcccccccgtgctcgtcagcgcccaaagtctggagagggctgaggcggcagggggctggcgtgtcagcgctgccttgagcgtgcgcacatctggctgggctgcagcagcacccaggctcagccctgactttgctccgagattggagtgggcgctggcagcagggagaaaccaggcagtgggagcaggcacttctgagcctgcgagggcggtggcagttggggggtgccttccccggcccccaagtatacagagatgcctgggtccacagccacggtttgggtagctgcagctgcactggggagggtgggactcctacctgctccccagcccagagagcacagggatgcctgggtccgcagcggtggcttgggcggctgcagaagcactggggagctcctgtcccaactcggaaggggcggggttcctgcttgtccccggctcctccgggcttcctggagcgtgccgccccatccacgcctctctgctgcagcaggtgtgatgtacatacaaaagtagtgtgttgttgcctactgcagacacatttcctggatattttcaggacatttaagaaggccagtaaccaggtcatgtagcattctctgagtgtgtatatatggtggggtggggaggttgatttgagtgtctgtgcatgcgtatatacttcctagtgcatatccacttggagctctttgaaagacagtaaaaggtcatgttcctccatgataatctttttcctgattttattcaagtaagaattatgctgagctttacaggcatattgtcagatattatccttaggttagagcagtggttttcaaagtgtcgttcccaaccagcagaatccacatcacctggaaattgtagaaatgagaattctggggctccagcctagacctgctcaatcagaaactcttaagatagggccctcaaaaccttgttttaacaaccctccagctaagtctgatgtatgctaaagtttaagaccactgagataaattgttagctttaaaaatttcaaattacctcatgcaagtcgttgaaagagatatataaaaggtctttatatgatatttaaagtagatgaaggaaaattcaattttatggattcctttttgccaaatttgcattttcagtagtattttttataaactaaataaattacatattgcagtcattttacatataggtaatctacaagtttaccatttttcaacagagtatgttccattggtattttatagagaaatgtgtggtttaatttttttaggattggaaaaattcatagacactggcaattatataatttaaaaaaatgattattcctctttaatattgatagtgggaatgaccagtggtgagtgattattaatagaattgaaacaaaccctattgggtttgtctaattttacagtgtcttatgacctttcctccactacttcccacctctgccccaatttcatgccataatagttaattcagcaagtatcattctgccttatatgtacctagaaatgtgctaacacaaggaatcaattatttttaaggaaaatagtggtagaaaaatcttaaacatcaccactaaagaacttattcatgtaaccaaacaccacctgttcccccaaacacctattttttaaaaaaactcatgcctacataatgaagcctccataaaaactcaaaaggacctggttctgggagcttctggatatttgcccaactggaggttcctggagaatagcatgcctggggagggcaaggaaaatccatgccccttctcacatgccttgccctctgcatttcttcatctgtatcccttgtaatatgcctcataataaaccagtaaacatgtttctctgggggaaagaaaagagtggtagaaaagaggtttctgttaaaatgctacttaacagcattataattagagcgatttcatgatttgaaaaaaatctacttgtaattcaaaatgaacagtaaaaatgactaatttttcttattcccacagtgtatcggctagcctatctccggctaaatacactttgtgaacgccttctgtctgagcacccagaattagaacatatcatctggacccttttccagcacaccctgcagaatgagtatgaactcatgagagacaggcatttggaccaagtaagaaaatcaagcacttcaccttctctcctccctacttacttgttaactgattctttctttctttctttctttctttctttctttctttctttctttctttctttctttctttctttttctttctttctttctctctttctttcttttttttgagatagagtctcactctgttacccaggctagagtgcagtggcgcaatctcggctcactgcaacctccgcctcccaggttcaagtgattctcctgcctcagcctcccaggtagctaggattacaggcgtgtaccaccacaccttgttaatttttgtattttagtagagacaggttttcaccatgttggccaggctggtctcaaactcctgacctcaggtgatccgtctacctaaggcctcccaaagtgttgggattacaggcatgagccaccgcacccagccttgttaagtgatttctaaagaaaatattagattcaaatgagaaactagatcaatttattagacttaatatatgttcactttttggctaccatttacatttttgttgtaattcttacaaattagagctttaacactcaagagtatattttagtaactgcttatttaatgacacaaaagatcttacctgtaaaaaaaatagctgaagaaccttcttatcactggctttttctatgtagtagtgagctagatatcattttagtgtgaaaaaagcatgagacttaagaatcagttgatttaaaacaatacctattgaatgaatgaatgaagtcaattagtttacaatgagagaatcatttttcatctcctcctttttctctataaaataggttaataagaacaatatacttttggctgggtgcagtggctcacgcctgtaatcctagcactttgggaggctgaggtgggcagatcgcttgagctcaggagtttgagaccagcctgggcaacctggcaaaactctgtctctacaaaaaatttaaaaattagccaggtgtggtgacttgcacctgtggtcccagctacttcggagactgaactgggaggatttcttgagcccaggaggtggaggttgcaagtgagctgagatcacaccactgtgctccaacctgggtaacagagcaagaccttgtctcaaaaaaattttgttaattaaaaaaatatatacatatatagttaatagctttactgaaataattcacacaccataaaaaccacccatttaaaatgtacaattcagtggtttttagtatattcacagttatacaaacatcaccataatcaattttagaatttgtatcacaccagaaagaaactccataccctcaagcagtcaccccctattcccctaccccctcagcccaaggcaatactaatctattttctctctatggatttgcctcttctagacatttcatatacatggaattatataatatgtggtcttttgtgtatggcttctttcatttagcataatgttttcaaggttcatctgtattgtagcttgtatcagtacttcattccttttcattgccagacaatattccattgtatggatatacaccacattatgcttatcattcataaagtgataaacatttgggttgtttccactttttggctattatgaataatgttaccgtgaacattcatgaacatgtttcatttctcctaggtacatacctaggagtagaattgctaggtcatatgataattctatgttaactttttgaggaatgcccagatcattttccaaagtggctataccattttacatgcctaccaataatgtatgaggttctaatttctctatatcctcaccaacttttttatcttttttttttaataatagccatcctagtgggtataaaatggcatctcagtgtggtttgatttgcatttctctgatggctagtgatggtgagcaccttttcatgtgtttactggccatgtgtatatcttctttagagaaatgtctatcagaccgtttgcccattttattttttatttattttttttatttttgacacggagtcttgctctgtcgcccaggctagagtgcagtggcacgatctcggctcacggcaatcttcgccttctgggttcaagcaattcttctgcctcagcctcctgagtagctgggattacaggtgtgtgccaccacacctggctaatttctgtatttttagtagagacggggtttcattatgttggtcaggctggtctcgaactcctgaccttgtgttccacccgccttggcctcccaaagtgctgggattacaggcatgagccaccatgcccagcccattttgttttgagacatggtcttactctgtcacccaggctggagtgcagtgacatgatcacagctcactgcagcctcgaattcccgggctcaagtgttcctcccacttctgcctcctgagtagctgggactataggcacacaccaccacgccgagctaatttttgtatttttttgtacagatagggttttgccgtgttgctcaggctggtcttgaatggttgagctcaagtaagccacccaccttggcctcccaaagtgctaggattacaggcatgagccaccatgcccagactgctcattttttaatagagttatttgtcttgttattattgaactgtaaggggtcattatgtagtctacatacaagtcacttatcacatatataatttgaaaatattttctcccattctgtgagttgtttcactttcttgttagtgtcctttgaaacacaagttttttattttgatgatgtccaatttatgtagttgttttcttgttattgatgctttagtgtcatatctaagaaaccagtgccaaatctgaagttgttaagatttatccctgttttcctccaaaatgtttataattgtagttcttacatttaggttttgctccattttgagctaattttttaatatagttgaggtaggggtccagcttcattcttttgtttgtggataactagttgttccagcaccattttttgaagagtttttttctctcttcattgacagttgtcaaaaaatcagttgactgtaaatatataagtatttatttctggactctcaattctgtttcatatgagatctacataagctattcttatgtcaggactacactgtacacttggctgtaggatgccaagcaaaaatgattatttggcattcttggcaatagtaggtaagagcaagaatgttgcagaagcaatgagtacttaaattaggctataaagttcatacaaataaagaaaatctgacattttaaagtcacagggaatcattttcagatcttatttttgcatttaaaatatcttttattgaaatgtaatacacatatgtaaaaacctgtgtatcaaaagtatacattctaacaaaaattcatcaactgagcttagttatataaccagcatccagatcaagaaacaaaacattgtcagcaacacataagactctcttacatgctcttccagtcaccatagcctccttaccaccaccaccaagtgtgttcaatattattttatctaatagtttgaaacattttcacacctggctttttaaagtgctagttatacaaaattaactgattctactttcaacttttctgggaaacatttaagggacaagagccaaagttagggtaatttacaaaccaggtgatcagtcctgaataattgagccttggtgatttgcattttgttctttaaacacactttgggttaaacacttcatgtagactttcaaactgagctcagtatggaaagaaataactctgtagattaaacctttcttttttgaggctaaaagaaagaaaatggtattttttaagaacaaaaccatgtaataaaattctgactacttttacatcaatttatttactagattatgatgtgttccatgtatggcatatgcaaagtgaagaatatagaccttaaattcaaaatcattgtaacagcatacaaggatcttcctcatgctgttcaggaggtaggtaattttccatagtaagtttttttgataaatccatatccataacataacataggtaattcatttgatctcatttattcattaatgagatcatatattctgtctgaccttattatgtaaattcacaaataaaaacttttatattatttatttgtaacttaaatagaattggaaagataagggtaattatgaaattacccatattcatagttttttataaagttaataaataatattttatccctgtaataagcaggtatttgtaataaacttgacatgagtcatagaacattagatattctttgaagttatttttattactttataggaaaagccagtataaatgcagccttgcaaatcaataatacaaatgttcagtataaacacattttgtgtttccggtttaccttccctttagagaaatagtagtagtaaaatatacttggtatgacacatttcatattgttctgtggaaagtgagttgaggggtatttttcccatttattattggagttttcaaaagtaatacaaaccaagtcatttttgtttgtatgtttgaagttattttctaaattcaatcattttaattgtatatatcagaggcatctgatataacctctgtgtttttccctaaaatttgagtgaaatctaactatcactaaaatatagtgcttttactaaatgtctacttcttgcaattgcgtaatgtatactgaaacccttatagattgggggggataccgggaggtacaggccagagaatgtagtccaaatattggtggataatattattggctttcgctcagctctggccctttgattcccatcatgctttccattctaccagtctatctactcctctcttcccagtctatatactcttctcttcttggatggccagctcttccatctgctgctgcctggctatttctctcaatcattctgtgacatttcacttctagaagagcagctataatccaagcctaagaagtaattttatttatttattattttttcctttataatatgtgcttcttaccagtcaaaaagtattataaactattagaaaagaaaatctaaaggtagaaattttaaaattcatttaacaagtaaattttacttttttttttttttttttttttttactgttcttcctcagacattcaaacgtgttttgatcaaagaagaggagtatgattctattatagtattctataactcggtcttcatgcagagactgaaaacaaatattttgcagtatgcttccaccagggtaggtcaaaagtatcctttgattggaaaaatctaatgtaatgggtccaccaaaacattaaataaataatctacttttttgtttttgctctagccccctaccttgtcaccaatacctcacattcctcgaagcccttacaagtttcctagttcacccttacggattcctggagggaacatctatatttcacccctgaagagtccatataaaatttcagaaggtctgccaacaccaacaaaaatgactccaagatcaaggtgtgtgttttctctttagggaagtagtaaagaatgagagggggattattttgatccaagaataaaaaatataaagcattcttcatttcaaataagctagactcttgaaactctatttgcttatttaagtaacataataagaatatgggggcggggtgaagaaaatctatttacgacttaagcaacgcaagatggccgaataggaacagctccggtctacagctcccagcgtgagcgacgcagaagacgggtgatttctgcatttccatctgaggtaccgggttcatctcactagggagtgccagacagtgggcgcaggccagtgtgtgtgcgcaccgtgtgcgagccgaagcagggcgaggcattgcctcacctgggaagcgcaaggggtcagggagttccctttccgagtcaaagaaaggggtgacggacgcacctggaaaatcgggtcactcccacccgaatattgcacttttcagaccggcttaagaaacggcgcaccacgagactatatcccacacctggctcagagggtcctacgcccacggaatctcgctgattgctagcacagcagtctgtgatcaaactgcaaggcggcagcgaggctgggggaggggcgcctgccattgcccaggcttgcttaggtaaacaaagcagccgggaagctcgaactgggtggagcccaccacaggtcaaggaggcctgcctgcctttgtaggctccacctctgggggcagggcacagacaaacaaaaagacagcagtaacctctgcagacttaagtgtccctgtctgacagctttgaagagagcagtggttctcccagcacgcagctggagatctgagaacgggcagactgcctcctcaagtgggtccctgacccctgacccccgagcagcctaactgggaggcaccccccagcaggggcacactgacacctcacaaggcagggtattccaacagacctgcagctgagggtcctgtctgttagaaggaaaactaacaaccagaaaggacatctacaccgaaaacccatctgtacatcaccatcatcaaagaccaaaagtagataaaaccacaaagatggggaaaaaacagaacagaaaaactggaaactctaaaacgcagagcgcctctcctcctccaaaggaacacagttcctcaccagcaacggaacaaagttggacggagaatgactttgacgagctgagagaagaaggtttcagacgatcaaattactctgagctacgggaggacattcaaaccaaaggcaaagaagttgaaaactttgaaaaaaatttagaagaatatataactagaataaccaatacagagaagtgcttaaaggagctgatggagctgaaaaccaaggctcgagaactacgtgaagaatgcagaagcctcaggagccaatgcgatcaactggaagaaagggtatcagcaatggaagatgaaatgaatgaaatgaagtgagaagggaagtttagagaaaaaagaataaaaagaaatgagcaaagcctccaagaaatatgggactatgtgaaaagaccaaatctacgtctgattggtgtacctgaaagtgatgtggagaatggaaccaagttggaaaacactctgcaggatattatccaggagaacttccccaatctagcaaggcaggccaacgttcagattcaggaaatacagagaacgccacaaagatactcctcgagaagagcaactccaagacacataattgtcagattcaccaaagttgaaatgaaggaaaaaatgttaagggcagccagagagaaaggtcgggttaccctcaaaggaaagcccatcagactaacagcggatctctcggcagaaaccttacaagccagaagagagtgggggccaatattcaacattcttaaagaaaagaattttcaacccagaatttcatatccagccaaactaagcttcataagtgaaggagaaataaaatcctttacagacaagcaaatgctgagagattttgtcaccaccaggcctgccctaaaagagctcctgaaggaagcgctaaacatggaaaggaacaaccggtaccagccgctgcaaaatcatgccaaaatgtaaagaccatcgagactaggaagaaactgcatcaactaatgagcaaaatcaccagctaacatcataatgacaggatcaaattcacacataacaatattaactttaaatataaatggactaaattctgcaattaaaagacacagactggcaagttggataaagagtcaagacccatcagtgtgctgtattcaggaaacccatctcacgtgcagagacacacataggctcaaaataaaaggatggaggaagatctaccaagccaatggaaaacaaaaaaaggcaggggttgcaatcctagtctcggataaaacagactttaaaccaacaaagatcaaaagagacaaagaaggccattacataatggtaaagggatcaattcaacaagaggagctaactatcctaaatgtttatgcacccaatacaggagcacccagattcataaagcaagtcctgagtgacctacaaagagacttagactcccacacattaataatgggagactttaacaccccactgtcaacattagacagatcaacgagacagaaagtcaacaaggatacccaggaattgaactcagctctgcaccaagcagacctaatagacatctacagaactctccaccccaaatcaacagaatatacctttttttcagcaccacaccacacctattccaaaattgaccacatagttggaagtaaagctctcctcagcaaatgtaaaagaacagaaattataacaaactatctctcagaccacagtgcaatcaaactagaactcaggattaagaatctcactcaaagccgctcaactacatggaaactgaacaacctgctcctgaatgactactgggtacataacgaaatgaaggcagaaataaagatgttctttgaaaccaacgagaacaaagacaccacataccagaatctctgggacacattcaaagcagtgtgtagagggaaatttatagcactaaatgcctacaagagaaagcaggaaagatccaaaattgacaccctaacatcacaattaaaagaactagaaaagcaagagcaaacacattcaaaagctagcagaaggcaagaaataactaaaatcagagcagaactgaaggaaatagagacacaaaaaacccttcaaaaaaatcaatgaatccaggagctggttttttgaaaggatcaacaaaattgatagaccgctagcaagactaataaagaaaaaaagagagaagaatcaaatagacacaataaaaaatgataaaggggatatcaccaccgatcccacagaaatacaaactaccatcagagaatactacaaacacctctacgcaaataaactagaaaatctagaggaaatggatacattcctcgacacatacactctcccaagactaaaccaggaagaagttgaatctctgaatagaccaataacaggctctgaaattgtggcaataatcaatagtttaccaaccaaaaagagtccaggaccagatggattcacagccgaattctaccagaggtacaaggaggaactggtaccattccttctgaaactattccaatcaatagaaaaagagggaatcctccctaactcattttatgaggccagcatcattctgataccaaagccgggcagagacacagccaaaaaagagaattttagaccaatatccttgatgaacattgatgcaaaaatcctcaataaaatactggcaaaccgaatccagcagcacatcaaaaagcttatccaccatgatcaagtgggcttcatccctgggatgcaaggctggttcaatatacgcaaatcaataaatgtaatccagcatataaacagagccaaagacaaaaaccacatgattatctcaatagatgcagaaaaagcctttgacaaaattcaacaacccttcatgctaaaaactctcaataaattaggtattgatgggacatatttcaaaataataagagctatctatgacaaacccacagccaatatcatactgaatgggcaaaaactggaagcattccctttgaaaactggcacaagacagggatgccctctctcaccgctcctattcaacatagtgttggaagttctggccagggcaatcaggcaggagaaggaaataaagggtattcaattaggaaaagaggaagtcaaattgtccctgtttgcagatgacatgattgtttatctagaaaaccccatcgtctcagcccaaaatctccttaagctgataagcaacttcagcaaagtctcaggatacaaaatcaatgtacaaaaatcacaagcattcttatacaccaacaacagacaaacagagagccaaatcatgagtgaactcccattcacaattgcttcaaagagaataaaatacctaggaatccaacttacaagagatgtgaaggacctcttcaaggagaactacaaaccactgctcaaggaaataaaagaggacacaaacaaatggaagaacattccatgctcatgggtaggaagaatcaatatcgtgaaaatggccatactgcccaaggtaatttacagattcgatgccatccccatcaagctaccaatgactttcttcacagaattggaaaaaactactttaaagttcatatggaaccaaaaaagagcccgcatcgccaagtcaatcctaagccaaaagaacaaagctggaggcatcacactacctgacttcaaactatactacaaggctacagtaaccaaaacagcatggtactggtaccaaaacagagatatagatcaatggaacagaacagagccctcagaaataatgccgcatatctacaactatctgatctttgacaaacctgagaaaaacaagcaatggggaaaggattccctatttaataaatggtgctgggaaaactggctagccatatgtagaaagctgaaactggatcccttccttacaccttatacaaaaatcaattcaagatggattaaagatttaaacgttagacctaaaaccataaaaaccctagaagaaaacctaggcattaccattcaggacataggcgtgggcaaggacttcatgtccaaaacaccaaaagcaatggcaacaaaagccaaaattgacaaatgggatctaattaaactcaagagcttctgcgcagcaaaagaaactaccatcagagtgaacaggcaacctacaacatgggagaaaattttcgcaacctactcatctgacaaagggctaatatccagaatctacaatgaactcaaacaaatttacaagaaaaaaacaaccctatcaaaaagtgggcgaaggacatgaacagacacttctcaaaagaagacatttatgcagccaaaaaacacatgaagaaatgctcatcatcactggccatcagagaaatgcaaatcaaaaccactatgagatatcatctcacaccagttagaatggcaatcattaaaaagtcaggaaacaacaggtgctggagaggatgtggagaaataggaacacttttacactgttggtgggactgtaaactagttcaaccattgtggaagtcagtgtagcgattcctcagggatctagaactagaaataccatttgacccagccatcccattactgggtatatacccaaaggactataaatcatgctgctataaagacacatgcacacgtatgtttattgtggcactattcacaatagcaaagacttggaaccaacccaaatgtccaacaatgatagactggattaagaaaatgtggcacatatacaccatggaatactatgcagccataaaaaatgatgagttcatgtcctttgtagggacatggatgaaattggaaaccatcattctcagtaaactatcgcaagaacaaaaaaccaaacaccgcatattctcactcataggtgggaattgaacaatgagatcacatggacacaggaaggggaatatcacactctggggactgtggtggggtcgggggaggggggagggatagcattgggagatatacctaatgctagatgacacgttagtgggtgcagcacaccagcatggcacatgtatacatatgtaactaacctgcacaatgtgcacatgtaccctaaaacttagagtataataaaaaatataaataaaaaaaaaaaaaagaaaatctatttacttggatgggtttacagatttagttatcagctttcctgactgttaggtatcttcttttgagaacaatttgagaaccagtttggttatatgtttcaaaacacttttatattttttaaatagccaatctgctaaacaaagcaggttactttaggttgagtacttttagtttgcagtttattggatgtcctgtaagttttgcttcctgtggatttttttccttttgcttgttatattaaatgtagattactgtcaattaagtctttagaggtccatccctaatcctgctggcggcctctttaccacctcaccttgggcaggtctctatctgtacttcacaagggtgctgtggatcagggaaatgatgagtatgaagctgttttaaattctcagatgaaaggttgtatgcaactacaaatcattatattatcttccacatccaaccacaagtgctctctagctttgaagtgcttcagttgactaattatatgttatcatgggctatttgaaactgactttatttgtgtgaagtaggaggcagattagctagtatagttaatgtagtctcatctcagaaattatcagcccatatggttgtacctaatgggcaagaaaagggggcatatgttggcctttcagaaaatatttgcatggtatatttaattatttaagtagtacgtactcattataaaaatttcaaactctacagaaaaatatgaagtaagaaataattggcaatatgatacaaatgctctcatgtgtctctgtatcatcctttatttatttggtgttcttgtagttggatatctgtgtactgatatctactacttgttctaagctgctaagatgccacgtcatgtctatttaagaaaatttacattgttccatgccactatatgaaaatgtatacttaggtagttttttttaatagtgataattagtccatattatggtgataatgatggctacttgctgatccttagtgaaataaattctgtgttggtattcttcagcaaaaacgtcacattctgaacatcctaactaataaatcattgaccaggcattaggagagcatcttaacactctacccagtacatttaggtactctggttaatcaaatattatatgtagagtgatggccacttatcaaggaattggagggcaaaaaaatctctatattcactagttccatgttcatgttttcaaatctttgtcgagtcatgtcaggctaatgatgttcttcagctttattataaagaacataaattatatggttcaaataaagacagactaataaagatttctgactctatgatatatgataaatagcctttactatatcaatatagatgctaattagaattctgattattacttaatattctaagttttttccaaatataacttgaattttaaatgagaaaatatgaaagaaatttgataacttacccattgatttatgaagaactaagtaggggtaaccttgaaacttgcctttgccctccctaaatatgggcaatggcagaatatgttcttgcagacctataacttttgctttaaaactaagagactaggtgagtatatgattagacgggcactgttagaataattcccaaatgaatatagtttgtcagtggttctagggtagaggtaacctttaatttggtattcctaatagttcagaatgatgtatttatgctcatctctgcaaaattgtatatggttttttattactaattggtatttcatcttaacttgacagaatcttagtatcaattggtgaatcattcggggtgagtattttctttctatgaaatataatagtatgcattgtaagtataaaagaaattaaagctttctataatttgaatttccaaatgcagttattcaaacacctcatccaggcatattgcatagaattttatgagatatatatatctcagatttactttcaaatcaagtttaatctcaaatcatactcctaattggtgaacttcaaaacttttctaaatatccacttgagattatataatacatatatacatttgtgtatatacatacatatatacgtgagctgtttttgctcacaacatttctatcaccaaatgtgtgagatttttttctcacccaaatctattcttcaactctctggtgttctacaattcaattcaattctgacactaattacccagagtcagcatcagactccacaggttcaagggctcagtcccacaaaaatggtctcactgcagacaccagtcacaagtgtcaggtccccaggctacaccacacttccgtctgacttgaatacgaagttggggggttccgatagtgcctcttccttacagtttgatccactgccagaactactcacaaaactctggaaaatattctacttactattatcagttcatcataaaagatacaaatgaacagccagatgaagaaatattatatagggtgaggtccagaagagtccctagcacaggggcttctgtccctggggagttggggtgcaccaccttcctagcacttagacatgtttaccaactccaaagatctcccaaccttattgttgaggggtttttatgggggtttcattatataggcataattgattaactcaatttccaaccccctcccctccctggatagagggtggggctgaaagttccaagcttctactcaagacttggtctttctggcaaccagcttccatcctaaattagctaggtacccaccaagtatcacctcattagaacaaaagatggtcccatcacccttatcacacatgaaattcgaagggttttaggagctctgtcccaggaaccagggacaaagaccaaatatctttcaatgataccatgtatgtatgtacataacctcacaggaatctttataaaacaattttgaaattcactcattatgagtgtgatttgaaatgagatactccaaaatgtaagcccgatatccaaatgtcaccagcctgtccctgcctactggtctccttccatacatatgcactttttgcttgtccttcctctcagacttctaggatattctttttctggtacactgattaggaattgtttgcatgagatcctgcctcagtgaaagtggcagagcttcattctaggagatccaagggaaagctttgctttgaaacatttattctaggctgcaaatccacaaccctagttggccttccattaaagtcactaattcagcagtcccatattcaatatgcattactgttaatatgttgcaccatctccattcccctgagagcttatatttttaatttttaaatttttatttttagagacagtgtctcactctgtcacctacttattataacctcaaactcctcggcccaagcagtcctctcaccttagcctcccaagttgccaggactacaggcatgcaccaccatgtccagctaatttttaaattttttgtagagacagggttttctatgttggccagattggtattgaactcctggcttccacgataccccgtctcagcctcccaaagaactgggattacagatgtgagccactgcacctggccagagagcttatattcttataggaatgggaagactgcctatgttatgtgttgctacataatacattacccccaaacttagtgacttaaaacaaacgcttattatctccatttctgtgggtcaataatctaggcatgacttagctgggccagagtttctccaaagtctgtgatcaaggtgtcagttgggctgggcctgcagtcatctcaaggctccactagaggagcattcactggcagacttattcaaatggctgttggctgatcctcgatggctattggcccctctattggtttcttgcccttgggcccctccatagtactgcttgctattcacaacatggcagcttgctttgcccagagcagggactctgagggaggcagggaaataaagagcaagagagaggtcacagtcttattgtaatctaattctggaaatgacagcccattacttttggcatattattttggttagaagcaagacaacagtagatctagcccacacacgaggggaggaggatcacacaaggaggtgaataccaggaggtggggtcattgggagccatctgagaggctgcccaccacactgcctcaagtaactagggagaggtaaaagtttatatgccagatgaccaaatattaaaatgtgtgttacaaatagttcacgatgggctcagctgtcagactttacaaaggagctatgggaccttataaggacagttggaactggctaggtatcacatagtggtcttcaaacatttttgcttgccataacctctaaaataattgggaaaaagttgaatgtacttccatatcttaaagctgataatttaaaatattatacatttaatagcagcacgggatttagtttttgttaaattgtatatgtgctccaaatagatttaccatcaaaacctgttttgaatttaatattgggagaattcgctagtttaatttttggaaaataaagtataattggcaaagctaatcctcactgttgaatctatccgtcaaatcagatataatttctatcagaaagtctatatgacttgtcaacataatacccataaagtgaatcaaaaattattattcattgaacacatcatctcttatcaaattcttgtgaccttccttctggttgtataatagcctaaaaaacaaaaaaaggacaaaagcaagtttccagaaagctgttctgacttgcctacttctgaaaagtagtcctgtatggtgggttctgaaaatgaggaaccaggacttgcagagtaggcagttgctggaggaagaatgtgagctgcatgggaaaagacaggaggatttacaaagagtgggtgtttaattggggatggaattaggtagttattctgatttttagatttttcatatcttttatttggtccaatgaagcagaaaatttaaatgaagttattacctttgcctgatttttgacacacctcaaactataacttgaggttgctaactatgaaacactggcatttaatgatttaaagtaaagaattctgtaatttgtagacttctgagaagttccagaaaataaatcagatggtatgtaacagcgaccgtgtgctcaaaagaagtgctgaaggaagcaaccctcctaaaccactgaaaaaactacgctttgatattgaaggatcagatgaagcagatggaaggtaggaaccagttttgaatgttttccagtagccgagatggtcatctggggaatccagagtctcagcactgctcctggcttataccaatttctttcatgccaagtttatttggaagttgtgagaatggctcaaaataatagatatgagtgtagtgcaaagttaaaaacatcttacaaattgcataccaacattcagtgaagatatctaataaaccctgatcttttttacaaagctattgataaaattttgttattcttaacattaaatttaaaaatgtttactcttgaaaaatattaaccactgtattttgtgagaaccactgaaaaaatacatagcatcataaatttgtgacatttatgttttagatggttagtttttaaattttaaaattaaaagctactcactaaaataatagcataaagtaagtcatcgaaagcatcatagttactggaaatttgagttttccatttataaatacacatgaaatgttttgcatttttttaatctgcagtaaacatctcccaggagagtccaaatttcagcagaaactggcagaaatgagtaagtacttttttcaccttgtgtaaatgaaataaacaattgtttacactgcaagaagtcttttcgttatataaaagaatgtataatttcttcagttggcaggtttgtttatgcatttaaaatataattcaatcaaggttatttatctacaaacatttgtggattaaatgtatgatgtaaaatgaaggtcatttttaccctttctatgatctttcatgcaggaagactaagaagtgaaacattgcttgaccacattcaacacaaatggctacagttagaaaatactttagcagaactacaaagaggagctatttgggagtgttagatatagggaaaagttttataaacctagcatatgtaaacatcatcacccttatttaaggaataacctttgattctaccatttttaaactttccttatttgcaaatcttaaaacaatttcaaacaaaagtttccattactggaaatcagaattttaataaagaacacttatgtcattttccaagttatacagagtgatatcatgttagggtaagtggaattctattcaaaactactctgagactagacaaaaaaaataatccaaggatagtagatggaaagcacattaggaaagagataaatgttcactaactactattgggttgtcttaggtagttatggtagtgagtgtaacatttcccagtatctgctgccagatccattgataggaaaaggaactgggattttgaaagaagacaaatattcaggagataggtgttaaaacaatcattcctaggtcacaggacacactaatgagaacaataccaattaaaatgagaggctttcttttaatacatctttgtagatactaactttgaaaataagatatttaaaaggatgctttttttctatgtatttttttaaagtgtaattaaaactaaataactaaaacaaaattttctagttataaatgaatctctttttggattttatgtcaacttacatattcctattttaactcttaaatagttgcatcttttcccctcagtacatgaaaatagacaagaggctcataaccaaaatcaggccttgaagacatatggaaacattttggaacccacaaatatgcacttaaaaaggagctgaaagctgtaaaaacatgtatattttcttagagaagtgttcagttgctatagttagtacatttcccagtgacacacttagctatgatggcgagcttcctctgccaggccaaagttcaggacctttgtgcatctacaaaattgtgacaaagcaggcagaattttaacccctgaggctaaggcatttctttaggatgctcttcagcttttcttaaagaattacatttagaaaagatcatcatacaatgctggattgcccagaatggaagggcattccatttttccaaatgtgcttctttataaagaactcatgcctacctctaaaatcaagttaagaatttttaagaaatttaataagtatcccggctttgtctatattgtaattcataatatgcttttaacatggccatgccccgggtaggcatgatggcttatgtctgtaataccagcactatgggagggcaaggtgagaggattgcttgaggccaggagttcaagaccagcctgggcaacatagcaagaccccatctttacaaaaaaatccaaaaattagccaggcctggtggcatgtgcctgtagtcttggctactggagaggctgaggtgagagaattgcttgagcccagaaggtcaaagctgtagtgagccatgatcatgccactgcactccagcttgggcaacagagcaagaccttgtctcaaaaaaaaaaaatccatgcccagtttaaatgagctatgatttgatgtatttgcagtacctgcaaggcatctgcaaacataagggaacctatagctttgtaaagaataccaccactcactctggcagattcagtctgggccagccgagtattctagtctgctgaagtatatgccaagcatcaaccacctcatctctagaatagtggcctacaaaatggggcatacctgaagtatgcaaagtcatcttttggggtacataaagtagaagttctatttatctcattttaatgtttgcttggggtatgtgttttataatttgtacatacatacgtatttttgtggtacaggcttggaaaaaaatttactcacagggatatatgatttttaaagatttggagaccactgtttttttggggggtggggagggaattttttttttaattgatatatcatagttatacatattttaggggtacatgtgatgttttgatacgtgtacacaatgtgtaatgatcaaatcagggttattgggatatatatcacctcaaacatttttctttgcattgggaacattacaattctagctattttgaaatatgcagtaaattaactgtaactccctacggtactgtcaaatactagaatgaagaccactgcttttgcaaggtcctgagcgccatcagtttgacatgagcataatatatatggcagccacttgccaacttacccagtaccatcaatgctgttaacagttcttcatcctttttccagcttctactcgaacacgaatgcaaaagcagaaaatgaatgatagcatggatacctcaaacaaggaagagaaatgaggatctcaggaccttggtggacactgtgtacacctctggattcattgtctctcacagatgtgactgtataactttcccaggttctgtttatggccacatttaatatcttcagctctttttgtggatataaaatgtgcagatgcaattgtttgggtgattcctaagccacttgaaatgttagtcattgttatttatacaagattgaaaatcttgtgtaaatcctgccatttaaaaagttgtagcagattgtttcctcttccaaagtaaaattgctgtgctttatggatagtaagaatggccctagagtgggagtcctgataacccaggcctgtctgactactttgccttcttttgtagcatataggtgatgtttgctcttgtttttattaatttatatgtatatttttttaatttaacatgaacacccttagaaaatgtgtcctatctatcttccaaatgcaatttgattgactgcccattcaccaaaattatcctgaactcttctgcaaaaatggatattattagaaattagaaaaaaattactaattttacacattagattttattttactattggaatctgatatactgtgtgcttgttttataaaattttgcttttaattaaataaaagctggaagcaaagtataaccatatgatactatcatactactgaaacagatttcatacctcagaatgtaaaagaacttactgattattttcttcatccaacttatgtttttaaatgaggattattgatagtactcttggtttttataccattcagatcactgaatttataaagtacccatctagtacttgaaaaagtaaagtgttctgccagatcttaggtatagaggaccctaacacagtatatcccaagtgcactttctaatgtttctgggtcctgaagaattaagatacaaattaattttactccataaacagactgttaattataggagccttaatttttttttcatagagatttgtctaattgcatctcaaaattattctgccctccttaatttgggaaggtttgtgttttctctggaatggtacatgtcttccatgtatcttttgaactggcaattgtctatttatcttttatttttttaagtcagtatggtctaacactggcatgttcaaagccacattatttctagtccaaaattacaagtaatcaagggtcattatgggttaggcattaatgtttctatctgattttgtgcaaaagcttcaaattaaaacagctgcattagaaaaagaggcgcttctcccctcccctacacctaaaggtgtatttaaactatcttgtgtgattaacttatttagagatgctgtaacttaaaataggggatatttaaggtagcttcagctagcttttaggaaaatcactttgtctaactcagaattatttttaaaaagaaatctggtcttgttagaaaacaaaattttattttgtgctcatttaagtttcaaacttactattttgacagttattttgataacaatgacactagaaaacttgactccatttcatcattgtttctgcatgaatatcatacaaatcagttagtttttaggtcaagggcttactatttctgggtcttttgctactaagttcacattagaattagtgccagaattttaggaacttcagagatcgtgtattgagatttcttaaataatgcttcagatattattgctttattgcttttttgtattggttaaaactgtacatttaaaattgctatgttactattttctacaattaatagtttgtctattttaaaataaattagttgttaagagtcttaa

SEQ ID NO: 387 - DNA, 16036 bp, Homo sapiens
  source 1..16036: mol_type = genomic DNA; note = NC_000014.9:c105065430-105049395 GPR132 [organism=Homo sapiens] [GeneID=29933] [chromosome=14]
agctaggactgcagggaggggtgcgaggctagccacgcaggcggggccctgggtaagtcgctgggctctgcgtgctggggagtgggcctggggggccaggctctgggatggggctgggggctgggagctggaggcgggcagagggggatctgaaggcaaaggtgatttgttggtaaagatggaggctttgttgagggttcttaatctggggtccctcccgagagaacccaggacccccagtgaccacagatgtgatggggccggaggatttgggggagagggacaacagtttccattgtatctttgtcaccgccaccttcctggagactttcttctggaaaaggcttccctggctactggtccagatgggggtgagtcagggggctggactttgtccctggaatctctccttggccacttgcttccgtgattggtcggggggcactgaagggctgggcttctctctgtggggcctgtgctgcttgtggggttacacagagggaaaagcagggcagtgggggctgtgctgcggtgagtggcagttggcccagtcacgtgacaagatcctggagctgggcaggtcaccggcctttggagtggcgttcggcgcaccaggcacagcggggcggggggcccaataccttctgtcaagtgcatgacgtgggtctgtaccactgcaagggactgggactgaccactgaagactggccagttgggctgagcacaaaatgatatttcaggagattggccaggccgaggtgggagagcagaggctcctggaagaagatgaggataggggctgggcacggtggttcatgcctgtaatcccagcactttgggaggccgaggtgggcggatcacttgaggtcaggagtttgagaccagcctgaccaacatggtgataccctgtctctactaaaaatacaaaaattagccgggcgtgttggcacacgtctgtaatcccagctacttgggaggccgaggcaggagaatcgcttgaacctgagaggcggagcttgcagtgagccgagatcgcgccattgcactctagcctgggcaacactatcaaattgggaaaaataagaaagttgacaatgggctttggatgggtgtggtggagcagggaggttggagctggtgactccacatttccctccctagggtttgtctcaaacgtgacggcagaaaagaggtcataggtttgcctggtgccaaagcaggtgggagtaaaagacggaaatggctaggaatggccagcaaccgtgaaacagcttagaaattacaggcaatccagccaggtgcggtggcttacgcctgtaatcccagcactttgggaggccaaggcaggtggatcacctgaggtcaggagttcgagaccagcgtaaccaatatggtgaaaccctgtctctactaaaaatacaaaattagccgggcgtggtggcacacgcctgtaatcccatttacttgggaggctgaggcaggagactcacttgaacccaggaggtggaggttgtggtgagccgagatcgtgccattgcactccagcctgggcaacgagagcgaaactctgtctcaaaaaaaaaaagaaagaaagaaattacagatagtccacaagacagacctcagcagcctgaggagctgtttttgacaaatgggctggaatgaggaactgctccctgcacatggcaggggccagggctccttctctgtccttttgtgtctgtctgaaaagttccatcataagttacaaaacaggctgggcgtggtggctcacacctgtaatcccagcactttaggaggccgaggcgggcggatcacctgaggtcaggagttcaagaccagcctgaccaatatggcgaaaccccttctctactaaaaatacaaaaaattagccgggcatggtggcaggcgcctgctaatcccagctacttcagaggctgaggcaggagaatcacttgaacccgggaggcagaggttgcagtgagccaagatcgtgctattgcactccagcctgggcaacgagagagaaactcagcctaaaaaaaaaaaaaaagttacaaaatagattttaaaagactggaggagcacagcaacttgcaggccagagagctccagggacagtggctgggtgaggtcatgctagatcctgttattgaaatgtccatcccaggaacatgtggtgcttctctaatctggaaaatggattcattggccgggcatggtggctcacgcctgtattcccagcactttcggagaccgaggccggcggatttcttgagcccaggagctcgagaccagcctgggtaacatagggaaacctcgtctctaagaataaaagtacaaaaattaactgggcatggcagcaggtgcctgtagtcccagttactcggaagggaggatgatgtgagcctgggaggtggaggtttcagtgagcagagattttgccactgtactccagcctggatgagggagcaagaccctgtctccaaataaataaataaacaaacaaacaaacaaataaagcaagagagagagggagagggttagggagagagagagagaacaattttaatagtatttaaagaaaaaaaagctgggcgtagtggctcacaccgtaatcccagcactttgggaggctgaggcaggaggatcattggagcccaggagttcaagacctgcctaggcaacatggcaaaaccctgtttctactaaaaatacaaaaaaagtagctggacgtggtggtgtgcctgtagtcccaaccactcgggaggctgaggcaggagaattgcttgaacctgggaggtagaggttgcagtgagccaagatcgcgccactttactccagcctgggcaacagagcaagactccatctcaaaaaaaaaaaaaaaaaagaaaagaaaagaaaagaaagaaaagaaagaaaaggcaaaaaaggcaaaagaaaaaaagaaagagaaaacatgggttcatggaagaagcacggaaagtgtgaggcagagcagcctcggagctgacacgctgagtgggagaaaggcgggttggacacaggagagagaagtccagggagcagtggagggctggcctcagtgggctgccaaggtgtggcttgaagatggagctggacagggacacatttgcccagcatggaggctgggtgatgaggggcttggtcatttgctgatgtgaggtggaggcaggggcccagggccagcagggacaggagatgcagctggagctcagggatgggtggacgggggtgtcaggctgacctgggcccacacacactgtggtcttgtggctggagtcatccgagggacctcaccatggccatcatgtctggccacgctgccctgaatccagttggagttggatggtgatagcggggcctctgcctgtcatagtccctcagagcagatcaagaacagagtcccctggagtccaccaggccaggctggcattgctggtgctgtgagcatggtgggctatcccctacccaagcctccggcaggctgggagcaccttgctgctgtttcagaagtgaaagtctgcaccggggacctttcccacagggctcagtcactcccacccaccccacagctgagaggagccccactggtgggccagacagctggggcgatgagaggaagggacggtccccatgcacagcccaggagggactccccccccccaggagggtggtgcctgcttcctgagtggaacaacacaggaagcctctgcctggccttgtccttccacttgaagacccagccccaggggaagctgagagagggcccgggccccactgcaccctccccgaggaagagcagggcctgaaatgtgggtgacctgctgtaccccacgcccctttctgtggaggaaacagccctggccccgggccaggacagaccgcgacactgcagctggcgggtggggccactgggctggccggagagagggccctgagcccctatcctgagctcactcaccccgaggggaggcagaggctcccaggggcagtaggagtagcaggtgcggcaaaaggatggtgagcaggtgctggcgggaccccggaccctggtccaggaaggccctcggaagaggccggtgggctgcctgaggctgtgggcctgtccggcagggaatgccagacaaagcctggatgtgctctgataagcaaagggctggtgcagggctcccccggcgcccaagcctggttggccatgcgtggtgaggagctggacctcggtgcgagggagtcgggacgtcccagtggacccggctctccggctgccctgccttgggttgttcccaccgggcctcctgctgggcccactgactctttccaggcatcctcgccaggctgtggtgcccaaaggtcaggcacgtggcgggatctggacgtcagcagctcacgctgcatgggccgcatgggaccagctggatgggaaggtggctccggctctgcccctggctagtctctgctctcaacatacaggcctggatcccagaggggcctcgctgtgagcctctgcctgcggctggggcccgggaggggagcgtgcatttccactgcagctgccacttcctttggttttgcagaagtgcttgcagccctctgacccagggttgccggctggcattggcgtgactgggcggcacagccctggaccagcaagagttcatcctcccaggtttgggagggtttccagaacccttggtccagttaaagtgaaggaggcagactccccgggagccccttcctgggcggctcaggcgttctgatggggcccaggggcctcaggcagtggctccatgtgctcactcctgctcatttgacaggagaggtccctgcctcgtgttattcagaatttgaaaggtggggagggggcggctgcagaatcggagtagacaccagcgagcaagagtatgtgggcttctagggccactgaaggggactcggcagctgaggagggaagccaggcccagtgtgaggctggtcgggccccccacacccccggggctcagaaggaacaggactggtctcaggtggctctgacatgcccccagcccacttgggccccctgcctggctgggggtctgccttccttggccctcctggttccggctcactgcttcctcacctactgacccctctgttttgggcatggccagagagccctgcatctcttgctgggccttggagctgggcgcagcagccagacgacagggccacacggatcttggcagagcagcagctgggagggcagcgcccagcacacaggcacccgagggagagtctgaagaccctcagcgctgccccaccatctccactcagggggctggcccgagatgcagggagcagtgcatacttactccagccagtggcagggtggtggcagaatgggtagcccaggaacccctccggcccacaccacccaccgccaagggggcatcactttggagatggcttttcttgtttctttcttgactcagtgtctcactttttcatgtgttttcaaggtattgctttaaaattctccataagttaacaagcttcctgtaatctcaggagaacattgtggcttcctgtttttccagttgttaaaaaacgtcgagacaagtctcaatcattttaggaggtttatttgctaaagttgaggacacgcgtctgtgacacagcctcaggaagtcctgatgacgtgcccagggtggtcgggcgcagcctggtttcatgcattttagggagacaagagacatcaatcaatatatgtgagacgtacattggttccgtccagaaaggtggggacaactcgaagcagggagggggcttcccaaccatttgtctctcgcctacacaggtaggcgagagacaaatggttgcattgttttcagtttctgataagtctctccaaaggaggcatcagaatatgcatctgtctcagtgagcagagggatgactgaatagaacgccaggcagatcggcgctgagcagttcccagcttgaaggggcccaagatactttcctttcacagaaatatacttgaaagggcagctggggatgtcaacacacaggcagccccacctgctggcccagagcccttggtgtgggtgtccctgggttctgcctcacttttgagcagcttccagagaattcctgcaagagccacgtgggatgggcgggaagagcaagtggctccagggagtgcccctggccagcctctcaacatacaggcctcgggcccaaaggggccttgctgtgtaggggctctgcccgcagccgggccggccctgccctgggaggggagtgtgcactgggagactgactgcacctgctggcttcccatgagggtctcggctgatagagggcagcaccaggcagcatggggtgggggttgggcctggcaccagggaggcaggattggagctagtgaggcagccgccaggctcagcctctatccctgcactgcagggcccggaaacagcagagcgagaccctcaggctttgcagggctgtgggagaggcacaaacaccatctgaggatgggtttagggcgctctcctccctgcaaaccctctttggctggtcagggtggtgcctgttttagaggcacctcaggttagggaaggaagcagagggacaggcccctgggcgccttgcgccacccccctgcatgccctgagccatctgctgcccgcccatcatgcctccctcctccgggcccctcatgctgtgggtgacacagcttccaggccatgtgcacgtcacacctcgggtagccaggaaaaattcctagaaggggatcagccaggtcaaaagtagagcacatttgagatttttggaaacatattgcaaaattttgctgcgagccaattcatacttccgtcagtcccgtgtacgggcacccattgcctactctcaaacactatgagtttaaaaggtctttatttttgccaacatgataggccaaaaaaagattttaaaagactgtctttcagatattcatgtttgcatttctttgattagaagtggagttgaacatttttcagattttaggagcttttcttttttcttgagacggggtctctctctgtagccaggccggagtgcagcagctcagtcacagctcactgcaacccctacctcctgggctcaagcgatcctcccaactcagcctcctgggtagctgggactacacgtgtgcaccatcatgcctgtttatatttttgtaggtgtggggtgttactatattgcccaggctggtcttgaactcctggactccagctatcctcccacctcagcttctcaaagggctgggatttacagccatgagttaccacacctggcctttaggagctatttttatgttttctgtgaaagctcatcaactttcttttctctcccagctttataaaggtataattgacaaacaagaagagtacctaggccaggtgcggtggcttacgcctgtaatcccagcactttgggaggccgaggtgggtggatcatttgaggtcaggagtttgagaccagcctgcccaacatggtgagaccccgtctctactaaaaatacaaaatctagctggggatggtggcgcgtgtgtgtagtcccagctacttgggaggctaagacaggagaatcgcttgaacccaggaggcggaggttgcagtgagccgagatcatgccattgcactccagcctgggcaacagagtgcgactctgtctcaaaaaaaaaaaaaaaaaaattagctgggggtggtggcaggcgactgtactcccagctactcaagaggctgctgcaggagaatagtttgaacccgggaggcagaggttgcagtgagccgagattgtgctactgcactccagcctgggcgacagagcaagactccatctcaagaaaaaaaaaaaaaaaaaaaaaaaagaatcgtatgtagtcgcagtggctaatgtgacgttttgatgcctgttggcttggagccttgcttgtgtttctcatgtgggatgcaacggcagattctcaacatttaaaaaacacctacgaatcaacgggccacttagtaaattagtaaatactcactagccgtttgtcaatgggttaacttgtgactcaatctgatttccctaaaacaatttcaacctactctttttccaggtcattttaaactctcagagtgaacgtcttgataggaccgacaagacgcatgacatgtacttagaaagcttatcttagagccacactgagattggaacccgcaaaatatgccaggtgagagagccttctccgactttgaacatgtaagaggaagcccatgagaatttttccatgaagcatgttgtctcataattcaaaaattaacgcataaaaatagattatcgagataaaaactagctcagcaataataaatctagaggtgctacatggagaaatgaaggactgatttcataattctttcgtgaagttctgggaagccaggaacgggaatgagggcatagttggtggctcctgggagggcgacacagtactgagtcagggggctgtcccacaggtcccaggggagccctgcacggtctgggccatgaggagctgaccaccagccccccgcatccatgcgtctcctggtgccgttgcccctacttctgacccaccaggaaggctctcttcccaggaggtcacttgtggcaggaggcgggggagcgggggacagcctcctcaccagatgggcacagagccacagacaccacggacctggtgtccagaggtgaaggtcccaaggctgcgtgaggcctggagcagggggtgcgggactgaggggcaccgaggccctgactgagaccgcacgggcgacgatgtgtggggtgggggagccgtaggaagtcggggagggaacagaccagagcggctctgtgcaggctgaggtgggagggacccctctggccaccccgggtcttgcctgcatctccccttgtgttttggattctggctctgcctcccagggcctgtgattgtcatgaaagagacggggccgtgtagggggcccgaaacttcctctgagctcaggactcgcacagcggggctggggcactcgtttgatgggaaaagagccatctgggtgaagaacagtgagtgcaaacacaggcgttgggcctcccacccgagaactgccttcactgccccccgccgcccgccacaggcctgtgtcttgggcgaagtggtgacaactgagtgtgaggcagcccagtcacacccactctctccctctgcccagggaggaaggtgagcaagggacacgacactcacccggagaaacccagcaagcgcagcgaggctgtggggagaccggagccctgcacaccgccgggggaaggtgggccagcgccaccaccgtggagaacagcgcggaggcaccccacgagatgagacggaactgccgtgagatccagcaatgccaactgtgggtctgacccaggagaacggaaagcagggacgtgaacagccctcctcatgttcttgacaccgtcattctcagcagctcagctaaggcacagaggcagccgagcgtctgtcagcggagtcgtggctgagcagaacacgccacacgccacacgccacacgccacacgtgcaggattgctcaagatggaagggcacagtggaatatatatatatatttatatttttggcgagaccctggaggacacactgaatacaatggaataccatcccgcctttgaaaggaagggaaatcctggcacacgctgcaacaggagggagcttgaggacactgtggtgagtggagcacgtgagacacggaaggacacacgctgaagacacgcagagatgcccacccacgtggggaggtgacaggggagcccagcgcacagagacaaagtggaatggaggcctgggggctgggagcaaatgcggagcgagtgcttcctggggcagagtctccgtttgggaagatgagaaggttctgccgacggatgctggcgatggttgcagaagaatgtgaatgtgcccaatgctactgaaaaacggttacaatggtaaattccttgttatgtgtattttgccacaattttccactttttcaatttttttttcttgcgattgagtctcactctatcgcccaggctggagtgcagtggcacaatctcggctcactgcagcttctgcctcccaggttcaagggattctcctgcatcagcctcccaagtagctgggattacaggtgcccaccacgcctggctaatatttgtatttttaatagagatgggatttcaccatgttggtcaggctggtctggaactccagacctcgggtgatccacctgccttgtccttccaaagcgttgggattgaaggaatgaacggcccatggggccgaattttttttttttttttttttttgagatggagtcttgctctgttgccctggctggagtgcagtggcgcaatctctgccttccgggttcacaccattctcctgcctcagcctcccaagtagctgggactgcaggcacctgccaccacgcctgtctaatttttgtatttttagtagagacgagttttcaccaggttagccaggctggtctcgaacgcctgacctctagtgatctccccaccctggcctcccaaagtgctgggattacaggcgtgagccactgcgcccagctgaattttttaaatgcacaaaaacaagtggcctggcatggtggctcacacctgtaatcccagcactttgggaggccaaggtgggcagatcacccaaggtcaggagttcaagaccagcctggccaacctggtgaaaccttgtctctactaaaactacaaaaattagatgggcgtggtggcgagtgcctgtagtcccagctactcgggaggctgaggcaggagaatcacttgaacttgggaggcagaggttgcagtagcagagatcacgccactgcactccagcctgggcatcaacacagttttttgagactacgtctcaaaaaaaaaaaaaagaaaaaaaaagagcgacacaatggggccgcagggctgaccccgttcggggtgacttgccccatcgtgctggaggtcaacaggccctcaagtacaggagggaggtcaaggaaactacgacatttgcatgtggaaggttcctgaggccagcgggctggacagtgcccagggacccctgacctcgcgccagggcacagctgaagtttgccccgcccggggctgctgtggcccaataagtttggcaacgctctgtccgtccgtcaggtgctgaggccaggtctgtctgcggcttcctgctgacctggaggtgggactccatgatctgtaaccacagaaggcccagaagcatgaactcagccagagtgggcagccaggacactggagctggtggcgctggcagagcttggggaagtcacaccactgcacaccctgcgtgacctctagcaaccccctggctggaaaggatgagtttctgacctcggagagctgtgtttgaggcaggttgctgagatcactttgatctccttttcttttgccctctcccacatttaaggacttttgtgattccattgggcccaccagatagtccagaataatctctttattttactgtcagctagttagcaaccttcattcaacttgcaaccttagttcccctttcccgtgtaacctgccatatctacatgtcccaaggattaggattcagacatcttttgggtggggtcattagtctcctgccaccgagaggaggggtatcacatgacatagtaataagaggatcaattcaccaagaagacagaaccatctgtgactcctatgccccaattcacagtagcttcaaatacgtaaagcaagcactgggagaatacaaggagaggtggacaaatccaccactcccacaggagcttataattatcttttttagtaattgatagttcacacaggcaaatatgtggtaagactacagattagccgggcgcagtggctcacgcctgtaatcccagcactttgggaggccaaggagggcagatcacctgaggtcgggagttcaagataagcctgaccaacatggagaaaccccatctctactaaaaatacaaaattagctgggtgtggtgacgcatgcctgtaatgccagctactcaggaggctgaggcaggagaatcccttgaatccgggaggcagaggttgcagtgagctgagatcgtgccactgcactccagcctgggcaacagagcagagggagagactccatctccaaaaaaaaaaaaaaaaaaaaaaagactacaggttaggaattaggatgaggcagtgcccagctatggggccaggtgggaagtggaggcaaagtgggtcagcgctggaagggcatagtagcagcgcctaacagactgcttagaaaagcactcacacagcaattacaggatcaacattcttttcaaacacacaagcaactttttttttttttttgagaaggagtctcactcttgttgcccaggctggagtacagcggcacgatctcagctcactgcaacctccgcctcctgggttcaagtgattctcctgcctcagcctccagagtagctgggattacaggtgcgagccagcacgcccaactatttgttttaaatttttagtagagacagggtttctccatgttggccaggctggtctcaaacgcctgacctcaagtgatctgcctgcctcagcctcccaaaatgctgggattacaggtgtgagccaccatgccgggccagaagcaacatttttgaaaacctcagtgagttacaaagactcagcattgcccagacacaatggctcacgcctgtaatcccagcactttgggaagctgatgcaggcggatcacctgagatcaggaattcgagaccagcctggccaacatggtgaaaccccgtctctactaaaatacaaaaattagccaggcatggtggcacgtgcctgtaatcctggctacttgggaggctgaggcaggagaattgcctgaacccaggaggcagaggttgcagtgagccgaggttgtgccactgcactccaacctgggccacaagagcaaaactccatttcaaaaaaaagaaaaaagaaaaatgattcagtattgcccagcctgcattctttgtccatgacgctgctaggttggagatccactatctaataattgctctaaaaaatcaatttggaaatgttttaaacacctgcgtgtgtctagtctgagctaccacaaagcttctatcctttcttcccacagtagagtctctcccaggtggtttccagggactcccgtcctcactcttgtctctgtcccacaggaaacgccaccccagtgaccaccactgccccgtgggcctccctgggcctctccgccaagacctgcaacaacgtgtccttcgaagagagcaggatagtcctggtcgtggtgtacagcgcggtgtgcacgctgggggtgccggccaactgcctgactgcgtggctggcgctgctgcaggtactgcagggcaacgtgctggccgtctacctgctctgcctggcactctgcgagctgctgtacacaggcacgctgccactctgggtcatctatatccgcaaccagcaccgctggaccctaggcctgctggcctgcaaggtgaccgcctacatcttcttctgcaacatctacgtcagcatcctcttcctgtgctgcatctcctgcgaccgcttcgtggccgtggtgtacgcgctggagagtcggggccgccgccgccggaggaccgccatcctcatctccgcctgcatcttcatcctcgtcgggatcgttcactacccggtgttccagacggaagacaaggagacctgctttgacatgctgcagatggacagcaggattgccgggtactactacgccaggttcaccgttggctttgccatccctctctccatcatcgccttcaccaaccaccggattttcaggagcatcaagcagagcatgggcttaagcgctgcccagaaggccaaggtgaagcactcggccatcgcggtggttgtcatcttcctagtctgcttcgccccgtaccacctggttctcctcgtcaaagccgctgccttttcctactacagaggagacaggaacgccatgtgcggcttggaggaaaggctgtacacagcctctgtggtgtttctgtgcctgtccacggtgaacggcgtggctgaccccattatctacgtgctggccacggaccattcccgccaagaagtgtccagaatccataaggggtggaaagagtggtccatgaagacagacgtcaccaggctcacccacagcagggacaccgaggagctgcagtcgcccgtggcccttgcagaccactacaccttctccaggcccgtgcacccaccagggtcaccatgccctgcaaagaggctgattgaggagtcctgctgagcccactgtgtggcagggggatggcaggttgggggtcctggggccagcaatgtggttcctgtgcactgagcccaccagccacagtgcccatgtcccctctggaagacaaactaccaatttctcgttcctgaagccactccctccgtgaccactggccccaggctttcccacatggaaggtggctgcatgccaaggggaggagcgacacctccaggcttccgggagcccagagagcatgtggcaggcagtggggcctcttcatcagcagcctgcctggctggctcccttggctgtgggcaggtagcacgcctgctggcagaggtacctggtggctgccctgttcgcatcagtggcgatgactttatttgcggagcatttctgcaagcgttgcctggatgcggtggtgcattgtgggccctctgggctcctgcctcagaatgtcagtgagcaccatgctggaggtcacccagcactgtggcagcgcccaggagggcatagggcagcctaccacctccaagggggcaggcgccctcatctggggttgggtctgtgctgagctggagggcctctagggaaccgtggggcagggtggccagctgctggctcccagagcgcagcccaggcgtcctcaacggggagccccaaatgtccacgcccagaacaacagttggcaggacaggtgtgacacagccacagcagaggcaaggggtgccaggagtccccagcggcatcctcggggagatgctggtgaggggtccgtacagggtggggtccccacccctagccccttactgaggggggagtgcagcagttggcctgcttgtctggcggagaaagccagctccctgcaccctcggggctgagtcagatctgggtctgccgcaaaggccttgcctagaccaggtcacactgatgccctggtttccctatctgtaaaatggggccaatgacacctacctcactgggtcaccatcgagatcaatcctcctccctgccccgacacctcgggcacatcgcatgcactcagagcacagagccgggcagacgcagcacctgcatggggagcccagtgcccggcacagcacaggggcttccagggaggccgcgcagggccgtggggctgagccacgctctcgttttgtcaggcagctatgcagttgctcttccttgtttttgttttgtttttgtttttgtttttaatatttatttttttagagacagggccttgctctgttgcctgggctggagaacagtggcaccatcatagctcactgcagcctcaaactcctgggctcaagcgatcctccccgctcagcctcctgagtagctgggactacaggtgtgcaccaccacacccagccaaaacagccatcctccccttgagagtcatcagaaaaatacattaggaaaatgtgtttagaaataaaagcacaaggcagggcagtgctcacgcctgtcatcccagcactttgggaggccgagacgggaggatcagttgaggtcaggagtttgagaccagcctcggcaacatggcaaaatcttgtctcttttttttggtattaaaaaaatcataaaaataaaagaaataatgcaatttaa

SEQ ID NO: 388 - DNA, 38425 bp, Homo sapiens
  source 1..38425: mol_type = genomic DNA; note = NC_000015.10:40239063-40277487 PAK6 [organism=Homo sapiens] [GeneID=56924] [chromosome=15]
aagcaacgttggagcagctcggcgccccaaacgagcaggtcgatgcctgaggatttaatggagaaatcccaaagtgagccggggcgcgcggtggaggaggggcgcgccgcagccggggccgctgggccctgatgggcgggagcggggtggagcggcctcgcctgccaggcagccctgggcgcggggctcggcggccacactctggagacagccacggtccaggcaggtgggggagggcgctgctcccgtcctgatgtgccaggagccgccagcagccatccaggtgactaagccggcccactagcactgagtcaccgcccgcctcgagctgttcttgcttctcctttgcatctgattattttgggagctggaaacttggagctgcacctgagtcccgccccttctagctctcccctccctaccttgggctccaggaagatgggacttgctgtgagtctgctgccaccccctaaagatatggaagacgctgtgggggccagaagtgcccggggggctgtggcagcaggcagagtgcaatagcagatatggtggtcaggctgcctgtgtgtgtcctctggaggtgttgggacagaagggcagtcttgtccgagctgactggagtcctcccgggctggctctgaactcatctcccacggggatgtttcggtaaaggagtggcttctggggtcggagtggcatttggagagcgaggctggattggcttaggctggcctgggcaggtaggtggctctgtgttgggtgtggacccacgtgtgtgtgagtgcgagagtgtgtaagccagtgtgtgtgccgtccccctgctggggacagcagctgggtccagcagagagctggctgggggcttgacaggagtttatcctaactgatgctgggtgggcgcaggccctgagatgggcgtcagggagaggggacgccagacacacggcctgagcagggtgaggagcagctgccagccccggcaggcccaggccctgtctgggtgcacaggacagagacacagcaagatgcccaggtaggaagccgtccggaggggctggccagggtgagagcccatcactggggggctggacagcccatcagctgccccttcattctggcaggcctgggtaccaaggaaacagcttcctaccaagaaccatgtcactctcttatgcagggccagtcagcacccatgtgcgtctctgctgagctcacagggacacattcagtgagaagggtgctggccagggtacggcttccccatgatcaggacccagcgggtgccaccctcaagcccctggtccccacagggcatgccccagtgtgtgtcaggaggaggggggaggtcccttctcccccacacagctggcagctttgcgggcaccagtgagtaagctgccagagggagggaggctgtgtgcccacagtggcaggacaataccaaccaggagccttcaagagaagaggctgggtgagaaaagcactgaggttttcttttcctttttttttttttttttttttctattttgcctgaagggagtgccgcttcctgggctagagacaagcaccagcctgcagtggagaacgcaggaccccgctgcccagaaggagcagccacggtaaggtccccactgccgctgcgtgctccggattcctgggctagggacgggggtgccaaggtgtccaggctgcctcccacctgggacagggaggctaactccacagctgtgggttcctgggtcaaggggctccactccccacccggcctgccaccttctttccagattgattgtgaaacagtccaatcccagctggtctctggctccctagctagagggagaggtgcttgtttctactcttcctgccccagctgggccaagccagtgccaccgggacacccctatccaaggcccctctcactttaccacctctgggacatttcccttgtgtattcattccacaaatatttagggagcactgctgggtcccaggctccaagtcacaccctttggctgggtttgacctggcacagattctgactctgaaactcagcatcagggcaggttcagggagctgcctggccaagcacggtcactcctcacaggccttggtctccccacccctgctgcagggtggatgacctggtcagctttggggacatcgggcccagtgagctcgggtttataaagcactgggccccaccgggaagcaaggctaacgtcttgtggtctccagttatcctttccctggcattgtacaccaagaggtttgtgccgttctgcctggggtcttcctgaggctggttctggtgggaactgggctgcaggaggagaggatgagcttaggagccgtgtggcccccaggcctggtgggcctgggactcagccccacgggagctcatctagctggggttgaggcctttggggcaagcaaggagtcccctctgcaggcaggcttccctggcggttgtcctggcccaggcttggaggtggcacctgggagccctagtgacagagcgcctggtcagggaagggtcggcaccagaggcaagcccttctgggagcagctgatttggatggaagctctgtgcacctgagagggggagtgtggggactgcacggcctctccagtgccccgaggacaaactgatgctttgtgagtgctctgggccctcccggacttgccagacacagggagggtgcagtgggtggggtctccagccaaggaaagcccgctctgtgcacaactcctaaggatgaccaaaaagtcccctgccctggaggagcacatgtgctcagagtcaggaggaacccataagtgtctctcatgccagtgaattcccacacctggctcctggatgaggagaatgacccagctgtgggggtatctcatgctgcctcacaaaaggtgactctgtgcctaggagtcttccatgcatgcagagctgagcaggggctgctgcccagttggggtcagaggggcggaggctgtcgagcactaggtagacagcaggccagcagcgggcagcaggttgggccaggagggagcagagagtaggggccagggcaggctgagcaggaaaggaaaaggctgcctggggtcctgagggctcagggaggactccagacagctggccttcttatgccagcccgcttctgtgggagaggccctctgcgtaggtgactgggcagggaagaggctaagacactgaaagattgaattcctcacccaaatggcccagagatgcccaccgcacacagtgtcctgggtgcagaaggcaggaaggactcatgggaggctgtcctgtggactgaagcagaaagtccttcccgtaagatgcgctcgtcgccctgagcaggaaggcccaggctgcggaagcagtgcctgagacctgagcagcaggaaggacaccagtaaagctcatcaggaggcatctggccgcctgcacctaccgggcctcaaggagagagcttatttctgggagcctccttggtagaaagaggtggactagccagcaggttggggaggagcattgcaaatggaagcttctgagggcagaatgagttctgaacttgctgaagccaaggctggccctcctgcccagggcgagcagtctgcctgggcctgggaagttgtccccttctgaggaggtgccctccaccccaccagagctcagccctaggggccaggaagggctaaagcgagaagagtgagatgtgagataaaggggaccgtgtctcttcctgggagggtgtggggtccaggcagcaccttgttctggcgcacaggctgccaagcagatgacagccatggcctgactactaggtgcaagcactggtggcaggaagagggggtggacaaagcaggacagagctcttgccctggggatgctcatagccctgcagcagagcagtggaaaggaaagctgagctgagcgtggggccaaccgcgccagaaacaagcggagccacaaagccaccatcagcccccaggtggcttcgtccttttgccaactctgggtccaactcatcgctgaagttggcagccatgacccatccagcccagataatttataaatttacaccaatactgggcaacggttcttaacatagaactttataaagatggacaaaaaagataagttgagaatgacaaacaaaggaagaagcagcttctatctgcagttgcaggaggaggtgaaggctcggggagatagaccagggcgggaagaggcaggatggtggttggttaacatgaagtcagcagcatgagcctcaggcccggtgctgcctcttcctggtgactcgggcaagttacttcatgtctctgggtctcaatttcctctcctgtccaacagagataattatagtacctatgagttagggttgttgagaggattaaataagataataagtgaatgctctgaatggcatgactggcacatacgtacatgttcagcaagagataactattatcaccgtgatgataactggtgtcagaggaacaaagtgccaggagagaccataccttgttcgggggaatcaggaaaggcttcacggaggaggtgactttgaaagaaccctcctctgaggagaaacaaaagctctcagaatgcccaggaaagctgggaagaaacaataatgccaggtctatttttttcccaaatagcatattgtttgtccactgaggctttctaaggaataacttgagactcctctttctggggtctagacttggaggtcttgaggacttgaagtgggctgcccctagtgaagggatcgagagccgggctgtggccctggccctactccttttggggactggaagcttttttcacatgctggtcctaactgcatgaggaactgtgttctgctgagccccatctaaagcatacacttggtgatgtggcaggcagaggggccagacaaggccacggcaggctcctggatcactctggcaagtagcttagaaatgcctagtaatcgtgggcaaggtgcagtggctcacgcctgtaatcccagcactttgggaggctgaggtaggcagatcacaagatcaagagatccagaccatcctggccaacatggtgaaccccgtctctactaaaaaatacaaaaaattagctggacgtggtggcgcgtgcctgtagtcccagctacccgggaggctgaggcaggggaatcgcttgaacccaggaggcggaggttgtagtgagctgggatcgtgccactgcactccagcctggccacagagcaagactctgtctcaaaaaaaaaaaaaaaaggccagtaatcgtgaggttccatctcagagacttttgttttctctttttttctttttatttttttttttgagacagagtttcgctcttgttgcccaggctggagtgcagtggcacgatcttggctctctgcaacctccgcctccctggttcaagcgattctcctgcctcagcctcccaagtaggtgggattacaagcacccaccaccatgcccggctgatttttgtatttttagtagagatggggtttcactatgttggccaggctagtctcgaactcctgacctcaggtgatccgccgacctcagcctcccaaagtgctgggattacagatgtgagccaccacacccagcctgctttttctacaaaggattatctgttctatgaatttaggaaaggtaatcctaaagcttattcacctaagaaaaacaaggcaaccccagagcatgacaggctttcttgggctgggggaactcacatgtgaaaaaacaggttccctcataactacatgagaggccgcaactgcctcagccccagcaaagggacacctctgctggccagcatttcctacaaaacctcatcacgacacatcaggcagggcagagacccaagtattcacatagggccagtgatgactttttttgacacctgtggattctccgtggcaacctattccccaaaagtgctgcctcggtcagccaatcccagtgtctctctgcctaggcaacaatctcttgtgctctggtctgcccacagcctccatgcactcagctctttgggcctcttgctaaggggctggaagcagagctgtgtccttcaggctgtcaaggacctggtgagggatcctctgggtgtccagggaagcaggttcagaaagctcagttcagctggtgctgtattttgatctctgatcccagtgcagcggggaccagcctactcaactcagtgcagatagcaacaaaccagtcaccttgcccaagacctcctgctgcctgcctgcctgcctggtgaccaggactcctaaaggctgcagcagcagcagcagagttaaaactttaaaaccgggaggactggttctgtggctcagcttcctggcctggagaggctctagcctccattttctttctttcagcttatggaattgtgcaagaaagcacagagggtggagggagcgaggggaccagttatgccacagcctcctgcaccaccagagcacagtctcagatcagcaaagaggagctctgaggaggaaaaggctgccccaggaaagagctggccatctcagattgctgtagcacattcaagccaaagggagtccccggaggatgtttcgtccagcccccataattttagagcgggaaacagaggtccagagaaggaaagtgggtcctgaggccacacagctaactaatggcagagtcagtttccagcccagggatccccagctgcctgcccagcactcttgctacccaggctgaacccccacccccgtgctaccaaggggcccatgcaggagcaggcagcagccactgggtaacttgatggcttgggagaggcggcctggcctgacacattgggaggctgggcaggtccccgctttgctcctattgtgctatttgggtgcctcctgccatccccctgcattctgctagacctgaaaccacagcccagcccacgcttgtcagtcaagtgcttcccgaggataaactttgcacacagcacccaggccactcttggggaccaggccactctctgttgaagagatctaactaatttataaattgattgattgaagttctttttgtcccaggtaacttcatgtcttaggccaaagaagggagtcatgatgagtgccagagatgaaacggagattctggggcaaagggtaggggaggcacctgggaggccctgttcttcaggtgatcttctcattagtgtagacttttgaccccaggcagacatttacatgtccaatagccaccatcagaggtcagttcccagaagcaggaggcctgtcacttgccaccggtcaccaggcccaagctagacaagaagactttttctattccactagagtggatcttgctgatgatgtgtctgggatccagaaaggtggggagaagtagaggtctcagctcctggggagggatggagccagccccgggggaagaatgcaaggccgccagtgagcaggcattcagggctcctgtcgaggagagggtggtcaggacaggaggaggggctgcctcatggatgatgaggtccatcatcctagcagaggctgttgtaccagccactgacgagggtgtggcagtggtgttaccagaaccctgctatgtcagcgttcaaatacatgtcccagcaggccaaccacccctgcagcagtcaaggggttctgtccggtgtgtgccagaatgctagggaagagaggaccctgagaaggatggcagcatggcacagacacgccatgtggcagttagacaggtcatgccttctgacccagggcacatgcagaggtccacagactctgaggccagctagttagtgttcccagggggctgcacagcccagagcctgtgagttttgtgcatctggagctaaggtgttctgcccaaagtgttggaggtgggcctcaggcaacaaataccctgcttcctcacatccccttttcttccttggagcttgggcctgggccctcacctagtcaggcacaggcctccactcccccacactcacctgtccttcctgaaagtcagccactgggctccacgcaggggtgtcacagtcagagccctgctccagcctcagacctggggcagtcactggaaactcagaagagagaagacaagacaatgaaagtttcccattcaaggaggcatccagctgttagttctgccagcaaaaatgccagccagagagctaaactgccagcaaaagatatttggatggaactttggaggccattaagagcaggcactgcaaagcaattgtagcgaaaagatattaaatgaatccatcacgtctctaaaatgagtgtccttaccacagatctggctcttgctgttccccagcccttcccagggtagcccaggatgcacctgggacgggcgccgcagcctgcaatggtccctgcatctgaggagctcctcccaggtcaccaggctccttgggactgtcaggcaggtttagcccccagtgtcagcttgtgtttggggaggatggttttatatattctcgttggcacaggaagcctagtacagatgcagaacctgagggaaaggcaggcagagagagagaggctcgaggttctgctgaggcccagggtatcagcagggcacatctgtacagcagccgggcggggacccatggacttttccaaaacacctaaccaggccctagacagtgctaccccctggcgctgggctctctttccggaacccggggtgaacagacctgttgggttgatttagtagcaagtggtagccttgttttctggacgaatcctgggattctactccatggcacatcaaaccaagctccagtgtgcatgcccagggtcggggaggggagctttctccttggtcccttctgcagctgtgagggctgagggttaagaacctttcaccccgtttgggggtgctgctcctccatagccctgtaccccaatgctctagacttcattattccaccaccttccccagggcgggaggtactctttccattacatgcatcaggaaactgaggccagagacatgctgtaagtcttgcgaggcaagagggctcccgtccgcaggactccatggctctgcagctagactccgtcaacttccctcctgcctggggaccccaagggcctggcagtgtcagctccctcggctcacacttccagatgctcggaggttcagaggtttgcacctccctcttggtcccatcagcagagagagatgggtggtcccatcagggtgaggagcaggaagaagcaggtgctggacagcctggaggagagggggaggaagggattttctcccaagagtgcctctctcccaggcttcgggctccagggtgagtgggcagcgacccctctaggagccccagctccacagggctcctcctgccaagcatccagcacacgtgcccccacctccccggcaggtcctgcttgagggcctgaggcgactgggccatctgggtctgtgaagggcagatgtgggatgcaggaacttcaggcagggtgctggcttgtggccaggaaagcctagcacctgattcctagcagggaactcagtgacagagtgggggaacctgagggcccctctgcccctcacacccagtgccatgtgggggtcctcgcgtgttacacagaaataggaagggacggtcctcctacccgcaccccagccctcttgtgtctcacgtgacagcctgcctgggcagtgatttttttaaaacacaaatgccttatattaaggtctgagttggtctctccccactgcccgttcaaacattccatggcaccagcagcctctaagcagcagagttgagagaaccagctttggggtcggatacacttccgttcaaattccagctcctcccctcagtaactggcttacttagtctttctggactggataacaaaatactatggactggtggcttataaacaacagaaatttatttctcacagttctggaagctgagaagcccaagagcaaggtgctggcagatccggtgtctggtgagggcctgcttccaggttcagagctggctgtctttttgctataacctcacatgatggaaagggccagggatctctctgggggcctctttcataaaggcatgaatcccattcatgagggctctgctttcgtgacttaatcacctgccaacaaccccgcctcctaataccctcatattagtgattaggtttcaacagatgaatcttgggggacataggtttcaacagatgaatcttggggggacacaaacattcagtctatagcagtaattatgagaccttcatctgttctttaaccactccgagcctcagtttcctcatttgtaaaatgcgaataataattgtacaggacttccatcccagggttcttgtgaagactaagggaggtagcacaggtacatagctttgtacggggcctggcccacgggaagcatgccatcattggcagccattactatttctattattaggggagggctgagtcgcccagaggaaggagtctgaacggagtaaaagagcttgttagtcgccttcctcatccccagaaaacttttcaagtcatggagcagaaagatgcagggaagggataatgtgtttgtctttctaaaccacaagctgatccctatctttcctctttggccctagcccgagcactcagccctggctgttggcactcagatgttacaacaggccccgacagccacaggctgagggataaccgggaagtgcctgccccacccgatgtgcccaccttgctgccctcccagaccatactggcctgccaatgcctctgagatggcaccactccaagagccatgtccccctgtgaaatgtctgttttgggtgtctcttccagagatcctacccaatttgtagaatgggagtgcctggacaattccttcaaccagaaggtctgtgccagcagccaaggctcctcaaaggaggatgtgcctggagccccctgtgctcagcacggcaacctgggaacaaggccagagggtggcacatggatgctgcaggagacactgtccccagactgctcctgacacttcctgtgctgttgttctgccctttcctcctgggcagggctgagctgggcacggatcagaggagaatagagaagggggagagtcacacacaggaattaatcactcaggacctaccctgaatggatgattcagtgtgtatccccagctgtctcaatgtgtggggagaggggtggcaacggggcggatcgtgcaacccggtgcagctgaacctcatgtagacgagactggaagtgcagaaaactggcgttgtgatggacctgagggattccctagtctagtcttgtatccagttctctggcctacccaactgacggttattcttgaatacctccagtgatgggggactcattacctccttggtcagtctaacttgaccttctgcctctctcaaggccccaaacccactgtagctcccaaggggtgggaggaacccagggtttcctagagttattctctatagggtgaggatgggacttggctagtcgccattctagggtacctaagcctggattcaaaccaaattgaataccagttcatttctggtaataatctaacattcatactttattgtagttctgttcaaaagtactgcttggagctgtgatttgggtatataaggcatttgtagtcaaagaaaataattcacatatgcattcatgaatcagtaaaaataatttagggtgtcgattctaggttagacaatataatgctttcattctagctttggttcatggttcatttcaaatcctcagcaaccaatctctgccacctccacgcagcacattctgcttctgcagccagcattcgaccagtgtacccatgtccttgggtaacgaatctgtggggggagccattctggtatcacctggtccccctcccactgccccctcatccaaggcctagcagtcagcttcctgggtgaccacaggaggtcagagtttgtctaagcgggtcaggcctacagtattgtccactcagaggaaagagaaagaatccgcgtgggaaagacacaaagaggaggaggaggaggcgacagagtaaggggaggagaacagaaactaaatataaatatgtgttggggatgttggggatggcagcagggtatggttagctggctggctcccacaccactgtcccacagcacagagggccagcatctgcacctggcaccatgctttccctaggaaagccgagggcattgggcttgtggtgcagccacacagggtacagacctgtttgggactgtcaggttcccacgggttgcctgagctctattaggtgggcgccttagagtaaattgtgtgaaaccaatacagcctataatgcaaaagattgagccgtgagtagattgatgcgtctaaagaatcagtgaacaaaaataagtggccatagtgacctcagttaatcattgaagtctgaggtgcccaacaatgatttttaaaatccctgcactgtccttggtccccgctctgtgacactggcagtcacccagccaccacttgacggcagccatttggagtccacatgtactgagtttccaagccagaacttcctcagcactcagccagaacacagcctttctctgggggcccaagacaaggagagcaaaggtcttctcacttctttatctggggaagagatgagtgattcctgtcccttcccccagtatagaaaacaccctgtaccccaaaagaaacatggcacaggggcagccaggagtgagccccttggaatggccattctgatcttaggcagggactgctgaggacaagcagaggatgccgactctgggacaaaatcacaggcggaggggctccgaaacaggccctagccgctctgggggtgcgggtctcctgccctaggactctcaggctagaaagtcctcaggactcaggactgcgcaagggctgacaagggaactggaatcccttaaatcccgctttcctgcctgcgcaaggggctaccccagcacagtcttggggccctgtccacatgggacagatcatccaaggtgacaggttttccgactcccgcgtgggctctccaggatgtgtgggtgggcacacgcggcccgctcaggtccgggagagtcggcccgcggctctggagcgtgcatctgcgatgccagtgaacgaggtgattacacacagccggcgctcagctgattctccaggtcgggtctccgcgaggcggccactgggccgtggagccgcaggcaggtccccgcggctgtggccaggccagggcccggaggcgaagggcgggcgggaactggggccaagcaggtggagagaaagagttgagcagcacggcgcccctcgggcagaggggctcctggccaaggccccagcgacacttggcaacttctcccgcgctctgggttcgccgccgcgtcctacctgaggccacaccctgaaatcaaaatcgcggtcaggtgaagccggcgctgcaccaacgtgtaagcgcggcccctcctcggcgttcccgcgccgaggtccctcccgcggagggcgggcccggctcccacgacctcttcgagcgttcctgggcttcccgctccgcaggtgggttccccggctgccccggaggttcgcggcgagaggacgggcctcccaacacgcgcagcccccttcctgggtgcccatgccccgaagttcgggaccagccggcgccaggcgaggggccttgggcgcaggcatctggagctccgcgtccctggagcgggacctccctccgcgggcgcccgcccggcgcggggcattcgcgtccccgagagggcgcagcagtggggcctgcgagctggggccgggtggccgcgccgggtcggagtgtggctggagaggggccgccccggaagcggtgctgcgcccaacgtccccttctccccgtaagccccgcaaggagcctgccgcctcttgcacctgagccaggagttcagtcgggaggcgggcgcggagcggttcccagcgcctggacgtcagccagtcgcaacacccgcgggaacacttgctacatttgccataatgcatttctgatctgtttccgcgcaggcctgcggaggactggcccagcaaggtcccaggtcttccctctcctcagcgcctaagagagaggcccagtgcgggtgaggagtcgcgaggaagaggcggaaggcgccggaaggtgagtgagcgagcggcccccggccctagagccttctgcacccattttgaagagcaggcagggagggacagtgggcaggcaggtggccctcctgggctggctccttcctggtactgctaggcagcggaggtggtcccttccaggtgccgtctctcgatccttagtgggtgcatgttaagtcacttacaccactttgccccatggccccacggtaggctggtagacgtcaagacctcaaatggcccgccctgcccccgggcccatcttcaggtctgatgcctgtcctgggtgagggtgtcaccgcggcagagtgcagggaattcatgccggggaagaggttcccaaacaggaagggtggtggcaggcccagtggctgtgcagggcagggtgggaggcagccgtgggagactcccgcaggagttacaggtgaagctgccgctccacacatcccagcccaccgctcattccccagatctccagacctgctcaggtggcatccgatctggagtgtaggtgctgctgggagcactggaggctaagccatgaagagctcccagggtgtaggttgcgttttctgtatcttgccccattctggtggttttttgggggcttttctgacttgtttttctgggtgaagggggcagaggggctcaggtctgtgtccatgctcgtttttggtggccggtgtggcataggttgccgcattggataagaaaacgcctggttccatgcaaggtgaggttcagcctgcagtgccatgaattctcctccatagtatataggacagtggccgaagacacatttggaaccgaagagagtggggtttgaatctatccagactttgcctttgactccttagacaagttgcttcacttctctacaaacttataaatggcctcatctgtaaaatgggaatgcgaatgccttcctcctcattaggcggttgtggggagtaactgcctcatcagcctccagctgctatgttgggaagggctaagccactccaagttctcccatcctggagagctttgagggcagtctggctgtttggcaagctattgtcagagggtattagagcaaagcaataggaataaagtaaaggtaggggtccttggagggcgagtagtgagagaccctaattcagggtctctggacctcgtggtgacccagggaaggggccattcctggaagaggatctggcttgggcatcagaaacagcagcgccccctgcacatcacacatgttcatgtgttcatgggtgaccctggaacctcaactgttgcctgggatagagggagcctctggcttgagcttccagtcccatctctgttctgcatagctgtgtgatccagagcaggtcacttgacttctctgggcactgggcattgtggatgagcctggagtttggagtcggagagatctgactttgaatcccagctccacacttactgtcttggacaattacttctctctgagcctcagtttcttcatctgtaaaacagagctcgcagtagctacaattagccattagatgtactaataaaaagcacctagcacagtctatccatgtggtgggcactttataagcatacctttcttttcttgcctcctccttctctctccagctccctgctgtctttaaaatgggcccaggaaagcaggttcagcccaactcacaatggtgttgtgagtgtaaagttgtgagtgttaaggaggtgaaatagaggtctggaaagttaagagctgtagaaaaaaaggcaatcttgtgattagggatgccagaggttccttctgcttagcatagggttccaatgccagaggttccaatgcttagcatagggtcctagctaggcattgaggaccctatgctaaggactcagacctctgtgtgcagaggctgttgagaatctagggtaggccgggcgcggtggctcacgcctgttgacacaagtgactgaatgagctgtattactgtattcttttaaacagcagcccattatctctcccctggggattcactggggccagtggtatgggaatagtgacaaaggcagagagcccaaacattttggcaggttgcatgtcatgctgtctgccctggcccatgctgcatctgtctgggtccctcaagtgggacagcagagcctcagggtcctgctcatcctcccagggcctctccgcacttcagcacactgaccctgagcaggttgtttgaatcttgtgggcatccacatgagggccacaacctgcgtctaggaccctcctcccccgcaggtgacagctgagcagaaaagcagatgaaatttccttcccccgtgtattttgggagccaggatagggtgctggggtgccacctctcctgactctcaagtcacgtgaagaggagcagatggcagactcggaccccagtagaggctgaggtgagacagagttcagctccacacaaggatcagcgaggggacagaggggacagaaggcaggggctgcagggggagcttttcatcgctgaatgagttctagcagagtgcgggcagcctcctgttgggaatgccagagggactgaactttgggccaaggggaaggtcagaccccgtcaggagtgccacagatcctgcactaccatctcttctggctgcagaaggttggcctagagcaacacctgtttggaagaagcaaactaaaccacacaggagtgaggatttcctctcgtttaccatggtccccagagcctggagtagagtaggtccataatagatactttctgaataaaggaatactataatttcccagctgggcacggtggtatgctcctctagtcctgaccactcaagcgactgaggtgggagggtgggttgaggccagacgttcgaggctgcagtaagctctgatcgcgccactgcatttcagcctgggcgactgagtgagactctgtctctaaaaaaaaattttttttttgaaacaaacttctgaaagtaaagtttgagaaaaatccttctggccaatgagaatattccagtgaaaggctgtcttctgttcgcggtaattctcagccaaggggtcaggtgaggcctgtcacctgtcagaatgtgtgtgggatgacagttcccaaagggggttacaaagaggtcaagaaaccctgctgcaggtctcagcatgtcagggcccagccctggaggtgacagggtcctctggaggccactctgacaggttggtgatggtagtagagtgctttcctaagttttgtagcactcggggctcacctctgtcttggggctgtgattctaggataggcccttccccagagtgtcttggatgggcctgagaataacagagggtggtggtaggagcagatggccactgcagccaagttcacatcaggtcctgggtcagactcgtgtctgccccttctttgcctctcggcttgaatgagtcacttagtctctccttctctgcataatggagacagtactagtgctacctcacaggcttgtggcgaggagatcacatgtgtgaaatgctcagcccagagcctgctacttccgtcttatgctaggctcttcctgagtgacgaccgtgagaaatatccaaagctcctccgtgagcaggaacagatgctccccctcactgtgcctggagaagctggcagaggtgaattaatccatcccttgtcatctacaaaaatgtcgaggcctacgtaaggcgagtaggccaaggtcacaagccgggacttaggaacaccaagcccaaggtccacgctgagccagcactcgggcttgtggcccaggacttgagccctggtaagcagaccctgagcctcactgtgagaaagcctgggcctgccgcccccctctcaccccctggcaccttgagcaacccaggagctggcccactaggcagcggcctcctctcttcccagtcgcccgcaaatggcagggaattccaccagcttcatttctaacagcttcccagcaatcccagcgcttacacagccagcccaacgctgacccctccgggtggctgcaaacccctttagactcactttctggaagccagcttcccagcctcagcgcgttcttgtgaatcccttcggtgggctgtgtcctttccttgaaagggactcagtatgcgcaaacagcccaaactcactctaggccaggtctggagggtcaggtgggtgaccacgtgggataccaccacttctggtgaaaagcggggtgacgggttaggaggacagctgaggtgggctcataacgtctccaaaggcagttcccaaagaggagttctggaaatgccagagcatgtttgaaacaggcaggtacattcccaagtggtctgtctcgcacagcaatgctcatttgaatgcccatgctctggcttgaggtttaacggcaggcatcctctgtagtgccaccctgcatctgtggggccctgatggctctggtggccctggcatcccagggcctggcccatggatgtctcctctccagggaggagacgttgaggagggtggcccacccacagtgcagctgcttttctcatctgtggacactagaccagccaagcctcagtgccatgctctgggaatccccttgtctctgtggaacagtagcatccgccacaaaacttactcaccccctcctcaagccaagcctgtgggtcgcctggcttcaggctgagcccctacagaggggctgtggatgcatcctgtgctggacagaacacacgcctgctgtttctgtagcttttcctagatgccaggccctgaccatcacagcccccaccatgacctcttggaaacattttactcaccccttgctgagtggaaaaacacctggttccttgcaagataagggtcagcctgcaagttaggacagccccaggccccctggcctctgactcacaggtcagcccaggaaagaattcagcaggcttcttccctggaggggccagccctgtcctacatacctcacgcacatcttgcccgtttctgttcataaagacctccagagagggagaagaaccacagctgactcagtccggggtaagcatggtggacggagcaggggctctggaatcagatctgggttcaaacctcaactcagtcatttcctggttctgtggcctcaggcaagctattgaacctctttgagcctcatctggatttgtggataacaattccttctctcagggttgctgtgagggttaaatgagctaaccctcggaaggggcttagcacataataggtgctcaagaaaagtttcttccctttctgtgtctgagattgctgctcctccaacaccactgtcccgcccctcagtgaccccaggtacatagctccttgaactgtccaccagctccgccctcaggtttactgggggtagcagcatttcctccagaaagtgtgtgccaggaaccgtcggtccccactggccaggctccggctggaggaagccccacagcaggggagcttccttcttgaactggtttgggctggacccttccctcccaggccttgggcatcccccgatgcagtcatgcgttagccagcaggaagatgcctgcagacatccagaagagaaaagttcaaagcagtcctcacacacggcagtgcctttccagcctgaggtggaatcttcagtgtggcctccctcccctgtgttaaggcgaagtgtcagccaggaggggctggggctgtgcccgagctggccaccccgttctgcttgtttccacttcagggtcttaggctcacatcacttctttcaagctgggcaggagaaacggcagggtctggctctctgagggggagtccccttccttcctcctcctggtgtcttcttggaggaaagctcctcccctagatgaattgcgtgcagatggagatgctagaggggcgacagtaacagctggcatggcctgtttgacttaaccttggggccccatggctggtgcagcagccacctccctcagcccagtggccttggagacatggatgggaaaaggagccctggaaatggcaagcggaggccctggctgaccgggtgggagtgctctgaggacacagcctgatgctggggagaggcagggcatgttttgtcctgggtgattcactcgcgatgactggggcaacactggtcccgttcaggtggatgaacgtctcttaggcactcagcctccatggatcactcttctctgtatttaaaaatattttgtttttggccggacgcggtggctcacgcctgtaatcccagcactttgggaggctgaaggcgggtggatcacctgaggtcaggagttcaagatcagcccagccaacatggtgaaaccctatctctactaaaaatacaaaaattagccggacgtggtggtgcacacctatagtctcagctacttgggaggctgaggcaggagaatcacttgaacctggaaggcagaggttgcagtgagccaagatcgcaccactgtactccagcctgggcaacagagtgaaacgctgtctcaaaaaaaaaaaaaaaaaaaaaaaattgtttttttttagagaagcaatccgtcgtctttaaggaaaacttagaaaaagagtagaaagatagaatagaaggagatcacctgtagccccaccaggtaaatgggacaactaatatgttgatgtatttccttcaaatagccattgtattcacactgcattgacaaattaccattggcaaaatctttaaaaaccccctacccctaatctatatcatcaagaattccactttcgccaaagtaaaccttgatagtttaatttgtgtctgggacccatgactgtggacaggtttaggccccagcaggtcgtgggatccaggagagaccaccaaatcgggcccctcataatgatcacactagacctgagggaggtgagagtcaggctacgggtacccgccgtcactcccaccagctttattattttacctttcacattgaggtttgtgatctgtctgcataattttggagtatgatatgagctcattcttccgggtttattttttttccatgcagatatcaaattacttcagctacatttattaaaaacatcatccattcccccagcatgttgcagggtcacctttgtcattaatcaaatgacctcataagagtgggtctatttttggattctctcttctgttccattggtctatttgtcaattccgtactaaatttgccaatttttgcctatttgcctattgcctatttgccaattccatactaaattaattattgtagctttctaataaatcttaatatctatttagtacaatcctccaacttcgttcattaagattgtcttggctattcctggttctttatatttctgtatacattttagaatcagttcatcaatttctaccaaaggaaatatgctgggattttgtttgagatttaaattaatctgcaggttaacttgggaataattgacatctttacagtattgaaccttctcatctatgaacattctttaatatctttaataatgttttgtattttccaatataaggactttgtatttttttgttagatttattctagatattttgtatttttaatgtaaaatgatatctttttaaaaatttcatttttttttttgagacagagtctcgctctgtcgcccaggctggaatgcagtggcctgatctcagctcactgcaagctccgcctcccaggttcacgccattctcctgcctcagcctcctgagtagctgggactacaggtgcccaccaccacacccggctaatgttttgtagttttagtagagacggggtttcaccgtgttagccaggatgatctctatctcctgacctcgtgattcgcccacctcggcctcccaaagtgctgggattacaggcgtgagccaccgcgcctggccctttttaaaaatttcatgttgttactggtatgtagaaatccagttgattttttaaaatattgaccttgagcctgggcacggtggctcatgcctgtaatcccagcactttgggaggctgaggcgggtggatcatgaagtcaagagatcgagaccatcctggccaacatggtgaaaccccatctctactaaaaatacaaaaattagctgggcgtgatggcgtgcgcctgtagtcccagctactcagtaggctaaggcaggagaatcacttgaacccgggaggcagagattgcagtgagctgagatcacaccactgcactccagcccgggcaagacagcgagactccatctcaaaaaatatatatatatatattgaccttgaatcagggaccttctaaattcactcccttaatcccagttttatgtagattctcccgcattttctacttacacagttatgttgtcccacacagtgttggcctcaccacatttcagatgagtcctagctgcctccctttaggtggttgattggttgattttccagacctaagtgatggcctctggtttctaaagctctactccctagcccccaaagcctgagctcagctgattgcttctgccaactcccaccctcaccatcaccactcctggccctgggacaccctctgggctgtccttctttcttctccagcctccctgctgcctctgggaagaacttgttccggaatggctcactattagaatggactcaagagaggctcccagagtcagagaccatttgctaaagatgctctccctgtgcatccccacagcaaaagctgagcgcttgggtggggcaggggagttggggagagggctgttctggggtgggtggtggggggcggattcaccagctcttcttcagctgcagtctgtgtccctgcacctccagaagatttcacagagctagggaggagggcgaaacaggcagctcaactaatccagggatagcaggtctatccaagggactgggggaatagacctgctgaataaagactcttctgtagcaaaaggcaaaggctgtaatcccagcactttgggagaccaaggcaggtggatcatttgaagtcagaagttcgagaccagcctggccaacatggtgaaatcccgtctctactaaaaatacaaaaattagccgggtatgttggtgggtgcctgtaatctcagctattcaggaggctgaggcaagagaatcacttgaacccgggaggtggaggttgcagtgagcccagatggtgccactacactccagtctgggcgacagggcggcaagactccttctcaaaaacaacaacaacaacaacaaacaacaacaaaaaaggcaaaggccaaaaggaggaggacaaattttaccaaaccatgatgtatatatggcgaggtccccaggtcccagacccctgacatcaggcatgacccctttgactggtaagtctgagcagaaagtggtttggtgttactcccagacttgtatctgcccaagtgccagtgtctggagggcctgagcttcaagacagggattcaaagagaggtgacatcacaagagaaacaaccgtcatgtatggggactctgcttacttcacacaccctaaaccctatgagctgtctttcattaacccccctggctcagatcatttcagttatttgttcaaaatctctccaaattattagtgggagactccctacaactcatctgcaactcacacaggttgttttattccaaagggcttggtctgtaagggtcctgtacatgtggctctacctctagggggtgttcggtggatcccgaacctcaagacccagaagcatggctgacattgagatgtgacgtgggctctgattgagtcacgcatggtgaattcctagtggggaaccactggctgtccagggtccctgcctttctgccagctgcctcccagatctgcgacctccttcagaacctgccaaaatgactaggaaaatgctgtttccatagcaagagccaaaagagaacatgacggccctgcactccagatcttcgggcggatgagtaatccaagctttcagttcaagaatcatgtttcagtttcttgaagcctggaagtgaccttttcagatacataagaacccagtgagctgttctgagcctcttcagatccaaaagcattcaagaggcagccctggccctgtctgccatcaacatgtgatcccaggtccgggatcccctgaaggcgaaactagagcaaccctttggaagtgtccctccccttcccaggcccccagttccccactctcagatctacccatgctatccattgcaagcctgtgtcacttctgtgtatgcagctcagcacgaccttaggcaaagccagaatcagcaaggcacgggacacaggcttgattgcaggttaagtgttttattgtttgttttttgagacagagtctcattctgttgcccaggctggagtgcagtggggcaatctcagctcactgcagcctcagcctcctgggttcaagcgattctcctccctcaaccccatgggtatccgggactacaggcacgtgccaccaggcccggctaatttctttgtatttttagtcaagacaggttttcaccatgttggccaagctggtctcaaactcctgacctcaggtgatccacccgcctcggcctcccagagtactaggattacaggcatgaaccaccatgcccggcccaggtgatgttttacatagagctccaataccagagagaagagtgtcaaggggaggtggtgctctctgccttctctggagagctttacccctaagttagctgcccctcacccaccccaggctatcctcttggctcagggcctttctggaattgaggtaaagcacatggtaaccatgaaggccctttgggggctccctgatacataatagtcccacaccgggcagcatgtctgtgatcagctggttggctttttattaacgtatcatattaacaggttcaaccatcctgggacaaagctgagttgtaataaaaaaaaaaagccaacaaaaaaataactttaatatactgttggattcaattcgatagttttaagattttcatagttacgttcctaaatgatattgagtcaaattttccttttcttgcactctccttatctggttttaagaatcaaggtcatactcgtttcataaaacaagcttgctaactttcctccctctttccccatttttaaaattcgttgacagacagtggaatgatacttgtaatgggctttggattttataaaaacacacccccagagtctgcctgctccataggggacttggcacaggcaagaagacacctcttttccttgtttatagtctgcactggcttatttatggcacgtttgttgtttctgggactgttctgctgggagccagccatttccctgaggaagcagagatggaggtggagggaagccctaggcttctaggggagctgtgctgggggaggggagggagccctgaacctggtgccccaggccctgctgcagccacccctctttcccgggagggagctcaaccttactctgcacttacaggcaccatgttccgcaagaaaaagaagaaacgccctgagatctcagcgccacagaacttccagcaccgtgtccacacctccttcgaccccaaagaaggcaagtttgtgggcctccccccacaatggcagaacatcctggacacactgcggcgccccaagcccgtggtggacccttcgcgaatcacacgggtgcagctccagcccatgaaggtaagaggggccggcagggatgaggttcagcctctcccagtactcagacaaccatgcctggctaaacctcagaaaggcccctggaggaaccacctacttcacagctatcagttaatcagctgttttaactccctgcctgtcagcctgccattctctccctgggtaagccagggcgaaggaggctggggagaccctctctgcagggtggtggggttgccagattcagcacatgaaaatgtgagatgctcaattgcatttgtatttcagatgacaacgaatagtcttttaggacgtgtcccattcaatatttggacctgcagccccatagggactgagggctctcccagaccaggagaattttagttgtgagggtcacgactagtagacccaagagcctggtagaaggtggggtcaggggccctatcagggtttggaggctgcgaagccagtgtgtgtggaggagcccccggcctggtgtctcttcctcagagggctgggcacatctctcccagccacccgtggagctagagaatggagccccgccccctgagctccagctccctggcccagccgaccacacccctgggcatgctggatgcagccccatggcactcaccatctgctctgctgacgctgggccttctccccgcatccctgcatccagcacaggcgggacccacggtgggccctgataaattatggaaaaattaatgggtggatgacacagcagggaaggtccttaggtggtcctccccagggcccccagggacattctctgaccctgatctcccagccacccctccctgccacaattgggcagctcccacacactcttttctcttccccctacagacagtggtgcggggcagcgcgatgcctgtggatggctacatctcggggctgctcaacgacatccagaagttgtcagtcatcagctccaacaccctgcgtggccgcagccccaccagccggcggcgggcacagtccctggggctgctgggggatgagcactgggccaccgacccagacatgtacctccagagcccccagtctgagcgcactgacccccacggcctctacctcagctgcaacgggggcacaccagcaggccacaagcagatgccgtggcccgagccacagagcccacgggtcctgcccaatgggctggctgcaaaggcacagtccctgggccccgccgagtttcagggtgcctcgcagcgctgtctgcagctgggtgcctgcctgcagagctccccaccaggagcctcgccccccacgggcaccaataggcatggaatgaaggctgccaagcatggctctgaggaggcccggccacagtcctgcctggtgggctcagccacaggcaggccaggtggggaaggcagccctagccctaagacccgggagagcagcctgaagcgcaggctattccgaagcatgttcctgtccactgctgccacagcccctccaagcagcagcaagccaggccctccaccacagagcaaggtaagtcaggagcctggcctgcaggtgtccactggggagtgggtgtagggacacaggccttgcctagccttccccttggaggactggcaaagaggctccctggactgcttccgcctaaggcggcagaaatgtgcacggtaacctcttctctaaggagggtggctcgcctcctccttccctcccttcctttccttcttttctctgtggctgttgtgttgtttcccatttctgtcagtatttgttcccaagtgtgtggccataggaaaagctggatttgcctagtccaggggcagcaggaggccgacttgtggcatgtgtgactgcttcagacgcacatttttcttgtgagaaaggaaagggtgaagggagcccccgtggtgacatttcttggcaggcagagtggagcgcacctttttgcttcttccaggccctccagcatcctgttgatagtgacagtaacctcttttcccatttggcagaggaggagactgatagagagagggtgagtcacccccaggcatgatggagagtgagtcagagaaggaaggtggggagtgctctggggctgcctgtccggcccgggccctcttggctcatgactcttgcgtatgaaggctttacaagcacagcagccacttgttctttagctccttcctgggagggtcaaaggcagtcctaagaaacggctgctgacagtggcatgggtaatggagcctcccctccctcctgggagggctttaagacaagcctgggtactcccctgtcatcggtggggtgagtgtggcccagcctgcacagggtgtgggtttggggatgacccggactacaacctctctgggtcactgcctgccagctgaggtactcagagaaagttctgggcggccgcgcgtggtggctcacgtctgtagtcccagcactttgggaggccaaggtggatgggtcacgaggtcaggagatcgagaccatcctcgctaacacggtgaaaccccgtctctactaaaaatacaaaaaaaattagccgggcgcggtggcgggcgcctgtagtccaagctactcaggaggctgaggcaggagaatggcgtgaacccgggaggcagagcttgccgtgagctgagatcgcaccactgcactccagcctgggggacagacagagcgagactccgtctcaaaaaaaaaagagaaagttctgagctttgtgcactctagtcccctactaggttaaaggacagtgggttgggatccccatgggttgtggcttgatgtatctgtgagaggaacacgagcatctgtgagctgcagggtgtctggaaggctgtgcccctggggagactcagccagaaaaccaacgtaagatcaggacagtgcaccctgctgggaaggtgagattcggagcttgacctccctctgtctctcaggagtcctgctgcgaggcctcagggatttggagaaaggggttgtcaacactgggctgggcactcatttgcatctttctgggctcctgccagcaccccacagcagggggagaggcctgtccatccctgcacaatgtactgagtactcaccatgggccactgctgctgggtatgccgggatgtcccccatacttgtgggagcaggcggtagttatctcgagctcagcaacaccatacttccaaatccaggggagtggtttccttctgggcaactcagacacatctttcaagatttctactctgaagccaagcctctcaatggcaagctgagaccccccgagctgctccgggccggggcttctcagcgtcctcactgcaggcgctcaggtcagtccatcctttgtggtgggctctccttgcactgtagcagcctccctggcctctactcactagaagttggtggtaccctcggttggaataaccaaaaatgcctccagacactgccaaatgtcactcgagcacacccattaagaaccactgccttaagcaaattcaataacagatggggagcatcagccttcctcctcctcctccaccaccacctaccccaggagtccccagatcaagccagcagcccttggcactggggctgactctggacacttgcagcagcttccataacagcagttaggccacagaggccatgcagtgtgccaggcatggctgcaggagggtctgagtatagactccagggctcctgtacctagccccaggcagtgaggcctggagtcactctagctaaagagatcaggaagacagggcgtgggggcacagagaccaaagaggcaagacagttttttaggagcttgcagggattagacatgttccacttagagtcagaagggcaaacattggttaagcacctaccgtgtactccgatatatgtcaaggatacatggcaccagtgggattgcagcatgggagtcagcagccacgggcgtcctgcgggttccagtgcctacaggacaaccaaacaacccacagggttatgaggattacatgagatagtacgttgaaggcacttgtcaaagtggtaagccctcaataaatggctttattagtagtatttgagatggcgtctccctctttcgcccaggctggagtgcagtggcacaatcttggctcactgcaacctccacctcctgggttcaagtgatcctcccaccttagcctcccaagtagctgggattacaggcacgctccaccatacccaactaatttttgtatttttagaagagatggggtttcaccatgttgcccaggctggtcttgaactcctgacctcaagtgatccacctgccttggcctcccaaagtgctgggattacaggcacctgagccaccatgccaggccggctttattatttttaaaaatattatgccatggcctctcccctttaggatacttaaggtatagccccctaagcccacagctggggagccatggctcagggcgggaaatgaggcattgctgtaaatgtatgcatgactcttctagtggctttcttcccaagaggtctatcacatgagtaacttcagaattaatccagagcctgtaacaattaattaattctgttgtcgtgtccccctttccctttcttgtgtggcctcacaagtttcatctggtccttgcttgtgattacattgataaaagctccctccctgtggagacaggcagtgaagccaacgaaaggatgctagagaccagaccttgccaggctgaagaccaagccagctccccagactccccagcctatgtcccagactctgcttgtgctgggctcctggctgggccatccctcccccagcctccagacgcaggctccgccctgagcccagccagcacctgcagcagcagcagcagcacagggacctggcctgtggagacagggaagaaacccctacctcagcctgtccacgtggtacccacacatcctcagagtagagctggcccatgcagaagccctcaaggccaggaggggaatgatctcattttacagcctttcttaggagcttcaggatgagaggtcatcagagccacctcaggaggagctttaggtggtccccaagcttctgccccgacccacctggatgggtgcctggagagcatgttttctgagttaagtccacactcaggccagcaggcagcttccttagagccccgagcctttctacaggttgactgtgtgatgcagtgagccctgccccacttccctccctgtccctgcctggtgacgtctcatggaacctctgttcccaggacctggtatcacagcctcagtcatggccatgcgccctccacccccctcacagccctcccagaggctccctgaggccgtaagatcatactgcccacttatgcagagtttctcaaagtatgttccatgggcctcctaggacccagggaccttgttcaaatgcagtctctgctctaggctcccaccgaatcaggctctgaggcgggaagtctgcggtttctctagctccccagatctctgcacacgtccctgcattgtagtggagacaggctcagagaggatgacttgcctaaggctcatcacagggcagagcagcccagggctgggccccaggtcctgacagcccagtccaggggtcccactgctccactacacagtggatggtgacagtgtcacagtgtcacagtggatggtgacagtcaggtgctggcgaggacatgggagaatgtttactgtccaaatgtactcatcagggatggagtgagtccaggcagtcctgggaggattgctagcttctttcctgtgaaggtcaagcacacactcgggtgggcaggcaggtgtgggggtggcagaagtctgccccagcatggctgtcggccagcaggagtgcctattccaccctaagcaggccagggacttggctggagagtagaagccctgaagctgcggggggtcggggaaggaagggagtgagggttgccaaagacactgaaaagactctggtggggcccaaggcccagatttggggtttggggtccctgagcaagcatcccagcccaaacttactgcttgagatttcctgtaagttgtttcagctatgggatcaggaccaggacccactgggcacctaagacaatggcttacatgatgggtttggagaagttcctagaaggctttttctgcatcccctgaagcatccctctccaggtgccctttaaaaacacgtaatccctgggaggggtcatggtgcatatcaccgctccttggggagaacccaaagatgggcgggcacctttcctgtcagaaagagcagaagggcttgggctcggaaaagcaagaagcctcgcaggcttccagggctgggcctgagcagggctcactgggggcccaggctgcccctcagctccaccttcccttcctccctccctgccagagccaatgaggataggccccctaccttctcctccctcccgggggctccttagccaggagtttcatgccagggaggaagtggaaggactcctttagggggtccttaagacatctccccatccctggcctcaaggcttgggtttggctggacctaccctcctaactccagatctctctggcaccagattcccagcccaggggagacacctgagaaccccccagatggtgacacacctctgtggtcctctgtcagggacataacctcccagcacagatttgcaaactccctgctgcaggcacaggcagggctatcgggccccaggtgtggctcccctgccttggttcagggagtggagacacagttgcccactgctccccaccccactgccaggcctcttctgcccccatgggtcctggggtgggggagccttgggagtgaagaatgcctctgacccagattcttcaagcagcctctgagctcagaggaagagtctgcctcacggcagcctccctggggtctagctgtcaatcgcccaggaagaaatacccagcgcaggacccggcggggagctggccttctctgtcttcccaggtgcagcagagcgagtgtaaggagctgtcttgggcctgcccagcctggtgccctgcgggggactgctggcacaggactgtgactgggcttcagctctgtctgaaaatctttgctcagagcacctccctagtttgatctgataccccgcctgaccctgccagagtccagaggtcacggcggccagcccctgcctccgggaaggttattccaaatgctcccacagccctgacccttcctgttgctttgtccctgcagcccaactcctctttccgaccgccgcagaaagacaaccccccaagcctggtggccaaggcccagtccttgccctcggaccagccggtggggaccttcagccctctgaccacttcggataccagcagcccccagaagtccctccgcacagccccggccacaggccagcttccaggccggtcttccccagcgggatccccccgcacctggcacgcccagatcagcaccagcaacctgtacctgccccaggaccccacggttgccaagggtgccctggctggtgaggacacaggtgttgtgacacatgagcagttcaaggctgcgctcaggatggtggtggaccagggtgacccccggctgctgctggacagctacgtgaagattggcgagggctccaccggcatcgtctgcttggcccgggagaagcactcgggccgccaggtggccgtcaagatgatggacctcaggaagcagcagcgcagggagctgctcttcaacgaggtgggaggacagggtgggacacagacgggggcgttggggatgggcagtgagcagccagccaggctggacatctgtgagcaggggcagtgggtggccatgcgtctgggcactgtgcctggcactcaggcccccgcctgcccccaggtggtgatcatgcgggactaccagcacttcaacgtggtggagatgtacaagagctacctggtgggcgaggagctgtgggtgctcatggagttcctgcagggaggagccctcacagacatcgtctcccaagtcaggtgggcagctgggagggctggaccctgagtgcaggctgccctcaccatggccctgccagggcaatgtggtcttctgcctgtggcccagaagacttgggatgcctgggctcccctgcctgctggggtaactgagacccaggggtcttgggagtggagaagagaaggatagcttctagccaaagctcaggccccagttttcaccagggctatggcctgactgtgctgccaaacagattgcctgggagctgtggggcctagcaccagggactcctactctgctcagccaccccacgacctgccagagctaacgttctctttcatcgggtggccccaccttcctgtccaggctgaatgaggagcagattgccactgtgtgtgaggctgtgctgcaggccctggcctacctgcatgctcagggtgtcatccaccgggacatcaagagtgactccatcctgctgaccctcgatggcagggtaggtcccatcctgtccctggcacagccacgctcccacttcctcctgatccaccactcactcccttttcaaccgcaggtgaagctctcggacttcggattctgtgctcagatcagcaaagacgtccctaagaggaagtccctggtgggaaccccctactggatggctcctgaagtgatctccaggtctttgtatgccactgaggtaaccgttccctccaccccccagacctcccaaaagcaacttggcaactggcagctcttctgctgtggcccctccagtgagctcaccaaaagcagccctggttttcagagtcccacctagtcaacacccttccccctttcgatggggctgctcttacccagtgactttgctgccaggaacgagtcctgcaagtgctttcctcagctcaagggcagaatggggtatggccgggcctcctatgtatgatggcctttctctgagtgactgacagctgtgtccctataggcagtggtcactcatgcaggcagtaactggccacagggcaggtgaccaggggaggaaggagacagacccaccaaggagagctggggccagctgtcccccctccaccactgctgccaccagaacgcagctaccaatgggccagggtctggccatggggtcagggacattttcctcctgcaggtggatatctggtctctgggcatcatggtgattgagatggtagatggggagccaccgtacttcagtgactccccagtgcaagccatgaagaggctccgggacagccccccacccaagctgaaaaactctcacaaggtcagttggcacacaagggtgcgacctcgcagaccccattcctcctgaggcaaggggaccagaacctgggctcccagcatctcccttccactgaagccacagggtctgggctcctggaaaaggctcctctttccccacacaaaacccgcacctgggtgtggagccgcatctacgcacaagttcgcatgtgcgctccgacaagtcgcctcccacggctgtggcaggagagttgctgcttggcagaagggttgctgcttggcaggcactggtcggaagcccagtggggcccatgagcagggaaagccaggacaccagcaatccctgctgtccagggagggatccggagaagcttcactgagcacaaacccttctaacccgtgtcgggagatccataccatgattcgatgtccctgtccatcacggcgagtcggctcatgctccatcgttgcacaccccgacacagctaagccacagcgttccccttaaagccagtataagtgcatggaagtgtatacatgtaaccctttttgccaaatcggccccaaccccgcaggccttactgtggacgccccctgctggcaggtcagcacggggctgctaagtggcaccgccatctggtggccaaaacaagaaatgtctcagagggctgaagcctctcctctaaaatagcaaaaaaacaagagttctgtggccccaacacaaagctggatgggaggaccaacaggaaacatcttccaagacaactggtccttggagcccgcaccgctaaccccaaaattagcatataaagatctccagttggctaattcctcagaggatgtagccttctgcccaagactcagcctcatcccaagatactggctcaaaatgaaccaagataagcccttgctttagactcttaaggcctagagcaacaaagaaatcttccttttcaggtctcactttattttctatttttcagagtacttcctcatccttgacttgtttgtttctgttgttgttggttttttttttttttttttttttggagatggagtctctctctgttgctcaggctggaatgcagtggtgcgatctcagctcactgcaacctccgcctcctgggttcaagcaattctcctgcctcagcctcctgagtagctgggattacaggcacgtgccaccatgctcaactaatttttgtatttttagtagagacagggtttcgccatgttggtcaggctggtctacgaactcctgacctcgtaatctgcccaacttggcctcccaaagtgctgggattacaggcttgagccactgcgcccagcgacctgtttttaaaatctcaaaagccctatgtggcagacagggcaagcatactttatcactagcccattttacagatgagaaaactgaggcctagagaaaactgtgacttgcctgagatcacggatagagccagatctggatcactgatgccaatcctctgccccttccacagagctatagcatctgaatgctgagagccttgagggggtggggagggacaagggaacaggaagttaaaaaaccagcgaattcatgactttcaaacaatgataagtccaggcaatcaggtcaccccgaagtgactgcaaattgtggcttcatcttactgccctgcctctacaggtctccccagtgctgcgagacttcctggagcggatgctggtgcgggacccccaagagagagccacagcccaggagctcctagaccaccccttcctgctgcagacagggctacctgagtgcctggtgcccctgatccagctctaccgaaagcagacctccacctgctgagcccaccccaagtatgcctgccacctacgcccacaggcagggcacactgggcagccagcctgccggcaggacttgcctgcctcctcctctcagtattctctccaaagattgaaatgtgaagccccagccccaccctctgcccttcagcctactgggccaggccggacctgccccctcagtgtctctccctcccgagtccccagatggagacccctttctacaggatgaccccttgatatttgcacagggatatttctaagaaacgcagaggccagcgttcctggcctctgcagccaacacagtagaaaaggctgctgtggttttttaaaggcagttgtccactagtgtcctaggccactgcagagggcagactgctggtctccacagatacctgctgttctcagctccagcttcaaacctcgagtctcgagagggccacggggtggtttttatgaccggaatcccgcttcctccctcacgtctgatgtcctgaaggtgcagtcccacctgtacagcccctccccgcccagaactgtgaatggcctgctccaggccatggctgggggcagggagtgaggggacaatttctgagtgaaagagaaagaatggggtcggtggtgaaggtgctctcactttacagaatggagagaacatcgtgtgtgtgtgtgtgtgtgtgtgtgtgtgtgtgtgtgtgtaaggggaggaaagccaccttgacagcccaggtccctccaggtcacccacagccagtttcaggaaggctgcccctctctcccactaagttctggcctgaagggacctgctttcttggcctggcttccacctctccactcctgtgtctacctggccagtggagtggtccatgctaagtctaacactcctgggagctcaggaggcttctgagcttctcctgtactgtgcatcgtgagggccagagacaggaatgtaaggattggcaactgtgttacctttcaagtttatctcaataaccaggtcatcagggacccattgttctcttcagaaccctatctgggagagaaggcgaaccacctccgggtttccatcatgtcaaggtcacaggcatccatgtgtgcaaaccatctgccccagctgcctccacagactgctgtctccttgtcctcctcggccctgccccacttcagggctgctgtgagatggaattccaggaaagaacttcaggtgtctggaccctttctatctagataatatttttagattcttctgctccctagtgacctacctgggggcaaagaaattgcaaggacttttttttaagggtcagagttttcaaaacaaaagcatcttccctagaaatttttgtgaattgtttgcacttgtgcctgttttaaattaaattgagtgttcaaagcca

SEQ ID NO: 389 - DNA, 60749 bp, Homo sapiens
  source 1..60749: mol_type = genomic DNA; note = NC_000002.12:102473226-102533974 SLC9A4 [organism=Homo sapiens] [GeneID=389015] [chromosome=2]
attcaaaacaaatgagaggacagggggaggagagaaggaacaagcgcagatcaggtagctccttcttgggatctgatagacagggaaggtttcctttcctcattagaaggactccagtgatctgtggaatgagcactacagtatccttttaaattttcacccacaagacaaagccagtatgcagtgaaatgaggaaatgcctttaagtgaagagatttttatttctttcataaattgctcaagccatgattggatggaggtcctccaggtagctccatggactttaacaagtctattgaataactgcatttgagttggaagctgagttgcctgaacacaaacgatttaaaccagattagaaagtgtctacatacagagctcaataacacactcggaatcttcttgggaggacccacagactgtacctatattacttttgacccaggtggatgcagtcactctctagaagcctccccgacttcagatgtgtggcacacatccacacaggggtgtaggtaggagaagcccacaggaatggctctgcagatgttcgtgacttacagtccttggaattgtttgctactgctagtggctcttgagtgttctgaagcatcttctgatttgaatgaatctgcaaattccactgctcagtatgcatctaacgcttggtttgctgctgccagctcagagccagaggaagggatatctgtttttgaactggattatgactatgtgcaaattccttatgaggtcactctctggatacttctagcatcccttgcaaaaataggtaagtccttaaacacctggtttggtgagttatctttttacataagatagtgaatgtgaaaatgccttatagataacgggctaagaggattttaactgttactgctattacattaaaaattctcttcccttcagtcaagggaaagtcataactgcattttactaagctatttaatactttgagattgctctttgaaatttgagagcatacttctgggtactgggctgtgttggtttcttctcatttcagggtgacaaccatgtgacattgttgacatgcaaaactctcaaattctatgctttaaaaatatagagaataaagcacgtagacctgggcatgatgcaaggtggaaatttcaggaaacacataatgtttcttctgtaaaatattcttggctgtgtaattgtgggcttcatcaatcaccccattgtttattctttaaaagtagcgtgtgcttcttgcaaattgacagaaagcaaaaaacaagaaaaccataggcaacttgtattactcagtgatgggatgtcggggcatataagattatatctgtcagtaaaatattagtttatacctaccaagtggggccagtgaggcacctctaatttcctttgtgaaataaagtgaatccaagttaatagattaaattccaatcaagggatctttgtgtcaaaaaccaaagaggtggctatactctgtgactgtttaatccctaactgctcctccttatctctttaaaaccagcttattctaaagtggaaaattaatataattatctcaaatgctaagcacaatgcctcctttgcctcagctataaactttatgctatttgagtatgtagattgccttattgagatagaatcaatgaaacattttaattctcatttatttatatgtgtatgttttctctaggatgggtgtgtaatgtgggttgagccttgaggtctggcagttaccttctgtgtgctctggctattcacttagctccctccctgtgggtgtggggacactggtataggtgtcccctttagactctcctttatagttgctattcattttgagctagtaaagtgtgaatattaaataggaatgttagtttgaagaagtcttgtgcaatttgcttagtgaataagttacacaaaggatcttactatatttttaagaggtatacaagtaaaaatggctttccaaatggataacattctcagttcagaacagtctaacatcttttgtgaaatcatatagacactgattgtgttcaaggtgatcttacttggtacttgagttttccttttaaaacaatatgctagagattctgtgttccctgctccccattccacaacctggcttcctcttcacagaaatggctcaagtcaatctgagtaccaggaaactcgtcctgtcactgactagctagttgctctgtttatcagtaaacatctaaacgcagaaaggctgcattttgtcttggttttatatttgtgtaaaacctagcttgttttgtagaggcattgtatgcacccagattcattctgtctaggagcgaagaacactgtgaaaatacgattattcatagaactgttggtttaaatgttcttgattttcatgatgtaatttaacatactttagaaaaaaagagtaggatatcagaacacgcttattcgagtacaatttcatatttactagtcttcaagaatttagattatttttatattccatatggacatgaggagtgaggagataaaaaggccatatttattgaatatatactatgtgccaattactgggctggtagttttatgtataagggcttgtttactagggccaaaataataatgatgatgatgatttataatttcagcacttaagaaatgcatatgagtttttaaagattatgttataaaacatgaatcagaataaaattaataatcattattatgattcattcttttattcctcattccatcaaggtacattttctgagaacccatgaaatatgtggaaatgaccatggtccctgacctcaagggacttggtctaacggggaagataggttaacttagtacttattgcccatagatactctgacagaaaaacatcaaaactctcccccaatcctttttaaaacacccaactatatgcacttataaaacaaagataatgtataacaaagataatacaaagccacctcagactttgtggtttatcttctacttcagttccacatcttagaacatcacagatgaatgtttcttgaatctttgggaagaacataattgtagggcgttctttgactttcagacaggacttttaatatttgtgtccatttaagctctaaggcctgaaactgtaaattttaaatgattgactctattgtccatcatgaaagggagaagttttaaaatgtgaaaggcatgtagcatttccctttacaaggccctacttataggtgtgtggcctcttcctgctacaactgtgtagagagcaacttggcttaaggcaggtgaatgttggaaccatttcaggaaactggattcctggaagcagggccaaactggggagccacagggcctgagaaaatcacactatgggctcttccacctcctttacatattgaaaaaagttaagtttggttaaaataagcactaactgaagaaggaggagaaggaaaacggtaaggagaaagagaagaaggaggagatggataaggagaaggaggaggaggaaaaaggaagaaggaggaggaagagagtaagaaggagcagcaggagttggacaaagagaagatgaagaaggaggaggagaaataggaggagaagaagaaataagtaaaataaagaggaggaagaggaaatgcagaaataagcagtgattagaaaatgatgagttcagtgctccagaagaggtgcttacaccaaccctgaagccaaatgaaagtggggatggtattccttggtgataattataccctgttgtgttaactttcttgcttatagtgaatggagaagttcaaagccatggtcagggaagctcatatcatctatggatgggtgaatctaacaattcccaaggagatatttgctggctccccatggcctatggctggaagtccaccgccttccttaggtttgaattcaaggtcttccattatttgtttcaaaatcattttccaagtcctctcctgacacttttcccagttcaaaggttgctccagccaggtggatcccctcaatgaatgtcaaagatatctggctgggccatttcttcctctcttatttcactcttgatgttctccccacctaaaatttctcccattctgtcacccaaatatgcaaatcctcatcattctccaacaatctgttcaatctcttgtcatgaaaaagcttctctgataaacatttaactgttcattcatttatacactcagcaaataagccagctgttgtggacaagatactgtgctaagcatttggggacatatgaagatgtaaatcattctgcctgagtctggggagtttccacattagtaggagacatgaatcatgcacaaaacatagtagacagggattattgttattagacggagtgagataaaatgttttattattagtaattcagaggaagatatgaactcaggaaggagctagggaaagctaagcctcaaaggatgagcaggacttaaagggaccaaggaaaaggacaatccaagcagtgacaacggaatgagaagacaagtaataggccttcagagtgacaaggtcctttggctgaatgcaggctacataaagatagtgcagagtgtgtgggagacagacttggagagagccctgtggtggtctcctgagctctgaactctcaccatgtttgttgatatgttcaatatacccttcattatatacttacatgtcatcttcttctttgttcatgtcttgtttccaaaaccttatcaatagtgggaattgcagttgtctatctctttggtcttccacctggcggtacttaacatcgtctttgcacaactaatacccttggtttacaatccagaagatgctttgtgtgccttcagaatcttaggtgggaattgagacaatcagagacccatggtgtagaaaaatcatctggcagtagagtgtggtgagactggaggtcaagaagacaatgcaatcattaagatgagaaatggggaaatcctaaataaaggcagtggccaaagaaatggagaggaggggatagattttaggtgtagtgagtgagagtcatgacataagaaataaatacagagctgaatgcatgaagggtcactcatgagaatgcgacctgatttccctcttcagtggctgaccagatagcaatgtcattggttaaacacaggagacaaaataaaggacttttaatttttgtgtatgtgtttggtgaagaggggaatgaggtcaggtaagtttggaacaagctgaggttttggtgactatgatagattctgcatgaacttgaaagctgggcttgcacgagtgcaaaagtttcaccctcgtttctccttttccctcatgcaccctcgcaggtccctgtaagataggaaagcaggaaggaggatgggggagggggcagctggctgtgaatgattctgtgacctgcgccgagctgggcatgttacctactgatcttattggcgaccctcatgacactaccagttcctgctacagatgggacgctgaggctgagatgccagtcagcttgtccacggtcctgtctgcttgactttaaaagacctcaggtacacccagaccgtttcgtttgcaagcacctaactgctcttcgctgttctgcaggcttccacctctaccacaggctgccaggcctcatgccagaaagctgcctcctcatcctggtgggggcgctggtgggcggcatcatcttcggcaccgaccacaaatcgcctccggtcatggactccagcatctacttcctgtatctcctgccacccatcgttctggagggcggctacttcatgcccacccggcccttctttgagaacatcggctccatcctgtggtgggcagtattgggggccctgatcaacgccttgggcattggcctctccctctacctcatctgccaggtgaaggcctttggcctgggcgacgtcaacctgctgcagaacctgctgttcggcagcctgatctccgccgtggacccagtggccgtgctagccgtgtttgaggaagcgcgcgtgaacgagcagctctacatgatgatctttggggaggccctgctcaatgatggcattactgtggtgagatgtcatgtgcccgcccggcttccgggggagatgagggttcggggtggggctggggaccggaggctgtggagacggctccagtgtggctcagcgcagcaggacagggatgagcttcagcccatgcggtgtggtccgagttctggtgaatttccttgggatctgcactgcctacataacggttcactcacactgcttgtcattcacaaaccaactagtttcgttaaagagtggaaaaggagagagaacgtatcattcttgagttaaatgtactttttcacttagcaaacagaaactgttgctaatggcccttctggggtttcacgacagctaaagcagaaactgatgtttttatttcctctccatcatcagacctcactcttattccctttatatgcatttttgttttgtttttaacataccacattagattaggtgaaataaaagataagggtcagggaagagatgacaacagatttgtgaaaatgtgttagtttttgtatcacttagttgcaggacttgtatggaaaaaagtgaatgaggcgtttttgcttatgagcctttctggtgggaaactgagaagaacatacaggcttgagcaacacccagcattaaggctcaggggatgtctgtaggctgggggtgctggaatattgagaactagccagtcccgttgctcaatttcattaattactaaaaaccttcagcagttgttagacaagaagacttttatacatactttcatatacttttcttatttttaaatttctatcacagcacataagtaatactagaatacattttcactgtaagaatcaaacagtacaaaactatatagcatgaaacacaaaaacttctgcttgccctcacctcctcctctatgaaagaggcaaccacttttatcagcttgaccttttccctcctgtattttttatatgcatatacaacatttttgcaaatcttttatcatctatgtgtgtgtgatctgtattttttaatataaagtgggtgtattttatgtattgcttagatataacaagtctttccgtgtcttgtttttttttttcttttttttgagacagagtttcactcttgttgcccaggctggagtgcaatgatgcagcctcggctcactgcaaccgtgtctggccctctttctatgtgttttcagctattgcatagtattgcataaattaagtttacagtaacttatttagcagtttcctgatgaatgcgtcattcaggttgtttccaatgtttcattcttacaagcaatgttgaaatgcatattgaatattctttttttctgcatgcctctctctttgcattcgtatttttacatgatgttttcttagaagtgaaatttccagtttaaacagtatgtacatttaacaatttaaaatgtgctgctgttttaatcagctcctatctgcctccttggtaaatgagagattctcactctaaggttatagatggccaaacacagacacccaacactgggcagatgagactgacaacagtttatcagtcacctgtacttgccaaggggaggaggatgccacatgccccgcaggaccacacagaggctgcgcttgggaacggaatgaacaaccaggagctgtgggaggcaggctttgtggtaacaagagggtgaggtgctccctggttctcacaggaggagatgattgagttgttggaataattttgcaggttggcagggacctaagaccttctactcaggaagaagcaggaactgtgcctggtacccttgataaggagggtggtttggctggggcaccttatccagggatcggcgtggggagggaaacttgcatgtagaccagttgaggtcctcataattttgccaaatatcgtggcattacataatatcaaaccttaatttcaggccctggaacacagtcgtcaagattttccagaaagcctttatcagcttatacttccttagtgtattgcacccatattttcttatatctttgacaagggacattgtttccttaatgttttctaatgccatgagcaaaaaggatttctcatgtttgttttaatttgcattataatagtaagcaacttttcagcaactgcaaatcatgactctgtcacatgctgtacattgaaagctgatgtcctttctgggttgacaaacttaaaaaaatactggacaccaagttaaatttaaatttcagataaacaatgaataattttttttagtataagtatgtcatatcccaatttttatatgcaaatgttgcgtcttgctcatttttcttcacttgcttaaaaaaaagatttataggaattcattaaattatcttacctttaaacttttcaatgtcccataaagaccaaatattttcttccattctattatttaaatttttttagattatggtatattttaccctataaaagttctaaatttttatatagtgaaacctgctaatgactctttttttgctcctgggtttcatattttgcttccagagattgtgtctaaccaaaagacatgcaaacattctgtttttaatttttttcccatttacaatttactaattcatttggcaagcaagatctttttttttttaaactttatgcaacaatagtacagagaggaaaagtccccctttgaaaaataatctgtgccatacccatggatttcctaagcgaaggaggcccatacatgaagccggacgtcaaatcatttattcatagcgagaatccctaacttttgaggcaaggcactagaatcatcaggctggtgcattctacccttgcgggcaagcttcacaaaaagccacattgtcaggaagctgcccggggagtctggactccagactgtcataggattcagagatttcatttctcagagtctggtcctcaggccaagtgtttctgcatcacactggtgggactgatgagtcttcggatgtccagtcccatttcataccctctgacccagactgtctgggagttgaacctagaaacctgtgttattaaaacctcagatgaccgctgaagtttgagaactatggatttattgcctttaggttgagagaaactgatatatgttgatataaaatgatgatacgcctagaacaaggaccttatccatctccccagacgacactggactagtctctgagatcccctttccccaacccattccttctataaatactgtcatactttcagttttgttacaaatgagtaagtgtcgttgtctgggaatccattccatctcttaaggtagcccctctgacccatgatgtgtccatttcctagttcatctcccagagataaccttctttcactcagatccaagttttttggaggttatttggttactctcacccgcactactgacaatgtcctggagggtgtttatctgtgacaagaccagggacaccccttggaaatccattctgaagcaattattcaacctctccttcataaattattacagaggtcaagatactactggataaatgccatctctttaattttcacagcatattctttattcatcaaaaactcagatataatctacaaaagttcttgccaaggcagagtctttatcaattaccaaggaaagcatttgactccttcctcgagcttgagaatctgacttcctcctgagttgtctctagatttcacatggagagccaactctggcttggtttctggttggggtttgtttgttagcaacatgtgtttgacttccccaaagtttaattgctttgggggagacatttataagaatgatcatttcaggataaaatcataattttcaagctaccggagtatctgctgaggacactgctgtgacctctgctgggtagagctgctgttgcgttggctccgtggggttgtccacacttcaatcttgggccactctgtggtcacccacagcacagtgagtattaagtgtgcactggcactgctgggtccctaagtgaaaccagagaagccccagggccatatttagaacacagctgaaaaggaacgggtacttgctgccgtccagttgtattttgagctaagggccttgacctcaccctttcattgaggaaggagccttcttgggggcagcagtcacaagcatgccttttcggcaaggaggctgagtcatccagaaggtggcctgtgattgtgggttacatgcgacaatgctgcagatcttcatccacgaaagagctgccttcccaccaaagagaaggggttgctcccaacagtcgaaatattgatgaatctgattctccagatctcttgtcccacttttttctccctcttgctgaatattttaggttatgacactaatcaccagaacacacatacgcttaatggtaggcaaaaggagggagacaaaacccagatagctttagtgtcctcacccgccactatacacaaatggttacaacgtgagaagatggatacaaaaattagcttgaccttagtaactatctcaccatgtacagcatatatatatatatatatatatatatatatatatatatatatacacacacacaatatacacacacatgcacatatatacatatataatatatagaaaaatatctcatatatatttatatattaacatattagcatatataaacatcatgttgtacagcttaaatatatacaattttttattttaaaaaaagaatgtttctaaaattgcataaacaatatccctagttaaatctcatggccaaaatcacagcaggaagacaggtgcatctactatgtcacttttgcatttattagtgttttattaaaccctttgcttttactaagaggcatgaccaagtgcccttacttcatgaatgaagacaataaggcaaaggaggttaaaataaactgcacaaggacacactgcctgaacaatgacagagcagacatgggtgtgcacagctctccctcctcccaaactttttccttttttccttaccttttgaattttccactcatgcaactgggagtgacaagagagaacccacatgctaccgatgaggagactggacttaagtccagtgagtgaagccagtgttctttctgcaaaacactatggcttgaggcaacattctgatcctgttgtgcctcctcttgctgtaaaattgggataatgacattcttcagctcataggctcactggaaaatttatattcagctcttagcagagtgaatgcccaacctggagtaagcactcaatgaatgctggccatgactttgtattgaagcagctcccggacactgtttagtggtcggctcattctgaacaagcagctgattttaaatatggcaccacctcacagatgggagggcggattgttcttagatttataatctgccttcgttttcttggatcagcttgctggataagcaacaaagtgaggccaccaagctttctatcacccctagctccttatctcctctacctcatcagagaggtcaaaggcccagacaggccagggttgaagctggaacccaagcagcctgactccagggtgtctctgctcttgactgccacccggtacttccccttttcctcatccctctctcccctcctactcttgctccctcctctggtgacatcttcctggctctggatgccattctctaggaggatagtgggaggggaagtggagctaaatgttctgagcactgggccattcaccttgatgggtgcttcatgccattttccttatttaagcctcatggcaccttaatgaggtggtgatagtacacagtggttaaggacagagaccccctggacccagactgtctaggtccacatctctgtactgacccttctcggtccttcaggcctcttgggtgacttagcagatcgccatgtgcctaagtttcttcactgttatttttgttataaagacacagattctcatagaagtcatttatctattcattcactagagtttattctatgcagctcagtatcccagagacagagtgaaaagtcatactcactgctttgcccagccagcaattccctttgggtgaggcaatcagtggcaacagtttctatcagagaccattgacctttcatgcagtttgcaatttgccctctatttattgtggattcttgctgccagcattagattctatatctcctgatccctcatgctagaattcctttgccgtcttctcttctcatctgtctgtccctgtagcaacataactttgctggctagttgcctgttggctctcttaatttctctccatgccattccctcctgcagtcacaggactcagcatctagaatggagcattgcggagggggctgagtcaagggctctagtggaagaacgaatgcagcaggaagagtgaataatgatgaggcggcaagcagtggggactagaagaggtgggcaggggccatgttggccctggggctggcctgctgcccaggtctctgtttccagtgactgaagccctctttcctcaagcccccaagagggagcaaactggggtgattttcctcaaattaactgtcaccgccaaacttcagagttgcttcctgaacctaaacgctaagggtgggataaaatcaggggcaggcatgggcagagggaagagtcccagggtcctatctctctttccccacaccttgtcatgcacgtgtcctgcacccccactgtcctggacacagggcacatgagggtgaaccatgtatccagcctattcatttgagggcaaattttccttcatgattcctcctgctttatattttcctgcctcaaaagggacccttactctattacttcttattcaaaaagtagtaaagcatagccaagaacatggatgggaagccatatgcttcattgcaggtcctgcctccactccttgcaagctgagtgacttcaggtgaatcacttaccctctctgggcctcagtttcctttctgtaatatggagatatggttgatggagggttaaaatggattgatacacgtaatgcattcaaaatagcacgtggcacagagtgagcccctgtgtttggtgttattcatccaagtccacctgcatgagtacgtctgagccacagagctctcctgacaccctaatgatgccacatcttcgtgtctgtctatctgaacgttgcagtctcagcttttcctaaagaagagctgtatgtgcacttgaacagcatcttgaggggagagtaggcatcttttccttgtcttctttatattttctttcattttattctgattccaaggatgggagccaagaggagatagctttaccaagagacagtttcctctggccaagaatacagggatctcactgtgtatggggggcgtggacctacaagttgcacgatcttgggacccaatccttttgtgcctcagtttccacatatgtaagatgagaatgattaatctgacttcaaagggtgattgtgaggatgttgtgaaatgagacttcggatgcctggcacagggcaggtgatacacaaatgtcttcttgcccttcctgtgtgccagagataggtccacacaagaacaaccatctgccatctgccgggtgtctgtcaggcatagaaatggagattacgcctaaccttcaggcagaaagggccatgcagccttgattggttggctttgggtgcctagggagtgaactccacaaccctgcaaagtctcagcaagtgctttatctgtgaggctctcccctggggctgcttctgaccttctgttggggagggcaggagtctggtgcccatccagcccagacatgggtcccaaaggattcaggcatttgccttcagacatgcactttcagccaaaatatttggaggttttcacggtgaacttctcagctcacagctggtgtgtgtgtgtgtgtgtgtgtgtgtgtcacaggcagagggagaagtaaaccaagagagagagaaacagagagagagatgcagcaaccactatagcttgtgatgaagagcttggacttggctggggaggtgggaggacctgggagaagtgaggagcagatcagtgcaggtcccagtaaatgaaggagagtgttgcagggggcagaggttcaccaaatctgactcctaaccttccacaacagacaacccctttacttcctgcacttgtggagtctaagccacagacttgccctttaaggagcagcctgaggggtgtgggctaatccttgggaggcatgctagagcaggacagggctggaggggcactgtattatttcattgcaatgcctcccatttgattcatcaaacacctgtttggttcattttcttctggctaaataaacagaatggttgaagtttgaattgtacaaattggctttcaactagactacactgtgagctacctaggagtaattagaactcacttcaggtcacatgcacaagaaaaaagaaaaagcctctcgttatcaagttgtcttttctttgtcaggagatggggttgagcagctatggaaatggatttggaagagaaacagggagaaaagcaatgtcgctttagctttttagggagtaatcagaaagagggcagaaaagcgcatgggagaagttctctcccgccagccttgctgagtgcctgggatgcagaagcaaacaagcttcatctcctgcctttgaggagccacagctatgaacacatgacttatttctttttgtttgtagattattccttttaaccatggacctgcttgttctgtattttattagaatcctttctagccacagagaattcctaggaagttgcataatacattaatagaaattcctgacttgagagaaaagcgtagagcttcaagcacagcctggggactttcctagtcctgtggttttcaacagctgtcccacccccaacaacacccgttcatgcatccttaagggtctgtgggtgtgttgggctgcagtgggaaaaaaaacatgcccggtgtcacgtgaaaaaccccatgagttggctgtttgggaggtgctggctgacaaatagtttccttatagcttcctccatggttgcataaatggatgacatccagcagaacctgttacacaggcctggatgggagcactagatccaggcgatgggtgagggaggaagccattgaccctgactccaggctgaggtcatccatactttcctccttaccccacaggaccagctttgattgttggtgagtaataggctaataccactgagaaagctgagagaccatgaaatctaattccttttttttttttttttttgagacggagtctcgctctgttgcccaggctggagtgcagtggcgcgatctcagctcactgtaagctctgcctcccaggttcgcgacattctcctgcctcagcctcccgagtagctgggactaaaggtgcccaccaccacgcccggctaatttttgtatttttagtagagacagggtttcaccgtgctagccaggatggtctcgatctcctgaccttgtgatccacccacatcagcctcccaaagtgctggaattacaggcgtgagccactgcgccaggcctgaaatctaattcctttatgttaacaattaagttcagtcgtgtctggtggagccagaggtcccctgagttctaatcctccatccatccatccattcattcatcaaaaaatattactgagctactacttagggtcagacactgcttgttccactatgccagagcaatctccctctcagaaaaagcaaattacagagctagtctttagtgagtttaaatctatcagttacaactgatgcttgcttttatggttaaaagagttttgaggttaagtggcttttaaactaccttttgtatcatgcaggtgaactgacactagatggtgaaagatagtcctaaagtcatttgctccaaattgatgtggggagtgaaggaggagagggatttgcatagactgaggggtggtagactcaggtgggttcttggatggcaccatgggtgaggaacaggtgttggtggaggtggatgatagtattaggttggtttttaattgttgagtcttagaaacctacaggcaattgaaagaaattgttcggtagttatagaaatgaaaatctagagcctgggccagagctcaaacaagatgcatgtttggaagtcattggcaagtaggtgataattgcagctatgaactatggcaatcctccatctttcttcaagttcagaagagtttcaaactttttaaattgaaaaagaattccttaaagaaatgtcattgctgcaccctaggtcaataaacaggatttattgatacacatacttttttctcctcctcattacgtgttctgccatccattcagttcaccagcttggcctctgttcgctgaacttagaaaggataaatgtccagagatctcaaccccatgaacatggatgaacaccttgtttaacttccctatcctgggcttcaggtctttttttcccctcatttaggagtgaggtgaaagagcttcctctcttctgcttttcacattgttatgcaagcttgctaggtaattgctggtcttcttagttggtttccttttgtggttggaaagtcagagaaggtggttgccaataaactgcccatgacagagtttactatgccagagctccttaatacaagctagaaaatgaactgggttcatcatttaattttttgagtcaggttgtttactacaggtctttatgatattctttgcatttttccattatttggcatgcaggaaagatcattcttattgtattatgttgtgactcttaacttccaacgttttttttttttaacttgacagtaaaacaaataaagggtcagtaattagttaggctttttgttttaagaaactgagttatggcaagctcaagcagtgaagattaattgtaaagatatgcaaggcgatgaggaagacatagccctctgtattagccctctagggctgttgtaataaaatagcagagattggggggctgaaacaatctctgaaatatgaaagacttttattctttcacattatggaggttggaagtccaagaacaagatgtgggcagggttggtttctgttgaggcctcattccttgccttgcaggcagctaccttcttgctttgtccttatgtggcctttcttctgtgtgaccctccctagtatctcttcattttcttataaggacaccaatcatattggattaaggccccacccttatgatctcattttaacttaatgacctcttgaaagatgctgtctctatatgcagtcacattatcaggtactggcagttaaaccccaacatataaatttggagaggggggcatgattcaacccgtagctgacccctcaggaacccaggaataataagtgctttatgatgaggtgtcacaaaggttcatctagaaccaagctgcttttaggaatttcagaagcaaaagttcatagatcttttaccatcaggatgaacttgattatgctgtgtaataagcatctctccaaacctaaatagccaaaaacaacaaaggtttatttcttacttgtactacttgccttttgctagccaacaggtctctcccttcataatgtttactcaaggtctttagcttatagagcagttaccatattgaacattgctggtcactgtgctggaggaaagagagatttctggagggtctcacctcagcaagcaaatgccccattctggaaatgacatatatctcttctatttgaaactctctcttgtaattctttcttgagaaaaaaacaaacaaaaactctcaaactcaaaagttggccaggcataatcacatggtgacaaccaacctcaaagagactagaagtgcaatcctacaagattcctagaagggaaagaaatattggataagcagtactaatagctattacattgtcatttcggagcctcatcagggatgcatttggtcgcttgctcacactctgctgctttttcaactgaatttttttatttctcttcccatttgtactaatgctttttttttttttttttttttttttttttttttttactgttaatgaagaaatacccgagactgggtaatttataaagaaaaagaggtttcatggactcaagcaccacatagttggggaggcttcacaatcatggtggaaggcgaaggaggagcaaagccacgttttacatggtagcaggcaagagagcatgtacaggggaactgccatttataaaaccaccagatctcatgagacttattcattatcacgagaacagcatgagaaaaacccaccctatgattcaattacctcccactgggtccctcccatgacaagtagggattatgcgagctacaattcaagatgagatttgggtgggaacacagccaaatcatattgttttaccgctgtcccctcccaaatctcatgtcctcacatttcaaaaccaatcatgccttcccaatagttccccaaagtcttaactcatttcagcattaactcagaagtccacagtccaaagtctcatctcagacaaggcaagtccctcccacctatgaccctgtaaaatcaaaagcaagttagttccttcctagatacagtgggggtaaaggcactgggtaaatacacctcttccaaatgggagaaattgaccaaaatgaaggggctacaggccccatgcaagtccaaaatccagaagggcagtcaaatcttaaagctccaaaatgatctcctttgattccatgtctcacatccaggtcatgctaatgcaagtaggttcccatggtcttgggcagctctgcccctgtggctttgcagggtacagcccccacctcccccaccaccccagctgctttcatgggctggtgttgagggtctgtggcttttcaaggtacaagctgtcagtggatctgccattctggggtctggaggcctgtggccttcttctcacagccccactaggcagcacccaaatggggagtctgtgtgggggctccaactccacattttccttctgcactgtcctagctgaagttctccataagggccctgcccctgcagaaaacttcagcctggacatccaggcattaccatacattctatgaaatctaggcagaggttcccaaacctcaattcttgacttctgtgcacccacaggcccaacaccatgtgtaagctgccaaagcttggagcttacaccctctgaagcaatgacctgagcagtattttggccccttttagccacagctggagctgaagcagctgagacacaccgtaccatgtcctaaggctgcatagagcaggggggccctggcctcagtccaggaaaccatttttttccctcctaggcctccagccatgtgatgggagggactgctgtgaaggtctctgatatgtcctggagaccctggagacattttccctattgtcttggtgattaacattcagctcctcattacttgtgcaaatttctgctgcaggcttgaatttctccccagaaaatgttttttttcttttttagctcatagtcaggctgcaaattttccaaacttgtatgctctgcttcctcttggatactttgcctattagaaatttcttctgccaggtactgtaaatcatctctctcaagttcaaagttccacagatttctaaagcaggggcaaaatgctgccagtctctttgttaaaacataaagagaattacctttattccagttcccaataagttgttcatctccatctgagaccacctcagactggactttgttgtccatatcactatcagcattttggccaaagccattcaacaagtctttaggaagtttcaaactttcacacaccttcctgtcttctgagccttccaagtctcttggaagttccaatctttcttgtcttcttctgagcccttcaaattgttccaaattctgcctgttacccagttccaaagtcactttcacatttttgggtatccttatagtagtaccccactctacctgtaccaatttactgcattagtccattttcatgctactatgaagaaatacccaagactgggtaatttataaagggaaagaggtttaattgactcacagttccacatgactggggaggcctcacaattatggcagaaggcaaaggaggaacaaagtcacgtcttacatggtggcaggcaagagagcatgtacagggaaactgccctttataaaaccatcagatcttgtgagaactcactcactatcatgaagacagcatggaggtaaccatccccatgattcaattacctcccaccatgtcactcccctaacacatagggattatgggaactacaattcaagaagagatttgggtggggacacagccaaaccatatcaccactccagttagcttccatatcatccactcaattatcctttccctactcttagtttctatttttcagtttttctgtcccacaactcatagttgttcatggtccctcattgtcccttaatctatctcattgtatttatctagtcatctattccaaatcaattatgtttgtgacagaaaaaacagttaccataactgcaagctgggcagagtgtttcacctcagactacttcccagaccccagtctatagacagacttcttgagggtctgtctactctcacccctgagtagaaagtcccctgttaaaagtaatgtagtcaaacaagactaaacccttcctcagatgctatgtcatagaatttacccttacagggatccatgtgcatggtggggaccataactatcatgactaggagggttggtggtcacaaagaaaggcaattaattatgattatggcctcagctatcagtgtcatatgaatccataagatttaatattatgactacaaagagccttcttactttggttcttaaggacagttaaaaatcagtacatttaatgaactgacatggctataaggtttctttattttatatgaactggtataatgttagccaaaagtatactgtaaaaagttaaggatgttactgtagagcaccactaaacatgatgcaaaaaatctggtcaatagataaaattaaaatagaattctaacaagtattcaataaataaaaatgaatgcaggaagagacaataaaccaggagtgaaggaagggaaaataaaaaaatatatagtaatatggtagatctaaaactaaccataacaatattacattaactgttaatggactaaacgctccaattaaaagtcagagattaacagaactgattataaagcggggctcaaatatattctatttataagaaatgcaatttaattataaaggcataaataaggtgaaagtaaatggatgcaaaaagataaaccaagcaaacaataagcataagaatgttgatttggctacgttaatatcagttaaaagacataaagatagaaagtattacaaagataaagaaggatctatcataatgataaaaaagctgactaatcaagaatacctaaaaattgtacatgtatatccacctaatattagtgcaacaaaatacatgaattaaaaattgacaaattgaaaggcagaaaatgacaattctataattttagtaggagattctaatacctttctcttaggaaatgatactaaaattaagtaaaatattagcaaggcatggagaatctgaatattatcaaccaccttgccctaattcctattcatagaatattaggcccaactaccgcaaactcaacattattttcaagggcttatggtatgcttaataaaaatggccatacatttgacaactaaagaagcctcaataactttagaagacttgttaccatacagagtatattttttttacacaacagaattaaaaatatatttaaaatatctaggaaagtcttaatatttggaaattaaaaaacaaacttctagatgtttcatggttcaagaaagaaaataacattttagatatcttttaaataacattaaaaagtactcccaaaacagaaatacttcgaagtgaatttaacaaagatatgctagatcctttcattgaatattatagaacattgctggcaggaattagaagacctaaataatgtcatattcattaatggaagagtaaacatttttaaggaatcagttttctcctatttgatctatagattcaataagagcccatcaaaatcccagaaaacattttagtagaaactgacaaagctgattctaaaaatctgtttggaaatgtgaatgacctagattacatgaagcaatgtctaaaactaaagaacaaagctgaaagacttatttgatgacttactataatgccacgataattataataattctacacaaatgacaatattaattaaagaatagagatatagactatgaaagagactggagagtttagaaatagacttacatatacatggccaattaatttttggcaaaagaactaaggcaattcaatggaaggcaaagtctgttcaacaaatggtactgaaaaactctggtatccatgtggaaaacatgaaaatcacccctaacctcaagccatatttaaaaattaacacaacatgtatcatagatgaaatggaaaaggtataattataaatctcctggaagaaaacatggaagtaaaatctttatgactatagaaacaaagactttttgaccttggagtagtcaaaagacaggaaaagcacaaatcaaaacacacacaaaaaagaaaaagcaatgaattggattttatcaaaagaaaaaaaatgctcttcaaaatgcacagtcaaaaaagcaagctacatatgaaagaaaaccttcactatacatgcatttcacaaaagacatagagaatatggaaataattttaaataattttagttctcaataagggtataaacagctcaattgaaaataagaaaaagatttgaacagatacaccataaaagatgatatactcatggtcagtaagcacatgaaaatatgcgcaacatagtaatcagggaaatgcaaattaaatcacagtgaaatgccacccatccattcaaatgactagaatttaaaaaactgacaatatcaagtgctgacaaggatatggagcaactgggaatctcatacatttctggtggtgttctgcagtagatagggtttgtccaaatctacactgaaagtccaaggaagctgagaggcagaaaaaagggagggatatacctagttttttagaaataaacatttagcagagacttaggaacagaagctatgcttttgtctttagcagtgatgagacaatatggtggagcactatgccattagctcccagacccagggcttatataccatagagaaggaatgtgtaggacaattgtagggaaaggcaagaatgttgtataaatctgtctatgggcagaatttatgggcaaagttgtttgggcttactgtacttacttcacttactgtaaatcaagggcacaatttatagtatgtgcttttacaaaaagaacagtagataaaacagaaatcttagaggcattcccagaactgggattaatcagaaatcatcatggtggattagcatccaagatgaggttgcttcagtctccacaggtgggtgtgtaaaatgatatgatgactttgttttgtttttaatctatttttgagagagagtctcactgtgttgcccaggctggagtgcagtggcatatctctgctcacctgctcactgcaatctccatctcccagattcaagggattgtcatgtctcagcctcctgagtagctggaattacaggcacatgccatcacacccagctaatttttgtatttttagtagagacagggtttcaccatgtaagccaggctgatcttgaactcctggcctcaagtgatgcatctgcctcggcctcccaaagtgctgggactacaggcatgagccaccgtgcctggcctgacatgatgactttgaaaaacaatttggcagtttcttaaaactttcacgtgtctaccatactacctagccattgtactcctaggtatatacgcaagagaaatgacaacataggtctacaaaaaaggcttgtacatgaatgttcacagcagcaacattcaaacagccaaaaactggggagttgggagtggacaaatattcattaacaggtaaacaggtaaataaatgaagaaaatatgccataaccagatagtggaatactactcaggtataaaaaggaagggaccactaacacctgcaacaacttgggcaactcaaaaacatcatgctgagttaaataagcccgaaaaaaggagttcataatttattattcaaactgtataaaatgcaaattaatctattgtgacaataataaattagagatttcctggggccagggtcggagagaaggatggacttcaaatgaatgaggaacctttcagggttcttgggatttttctatatcttgactatggcgatggctttatgagtatctacaatgcccagaattcattcattttagatgcagtttaccatatgtaagtctttcctcaataaagttaacaagaaaaaaaatgtcagcacatttggaattgactcttcatctctgctgagccctggtcgaaggactaatgtttttagtcattgtgtgagtctctgtgtgttaaaagggctttgcaaacttttacagtggcatcagctaaaggatcataattattataatgttggaaggcttggaaaatctgttaaaggtaacaaaaaggaccgtttgctgagacaatgagtgaagaggaaaaatctaaccttgttctccatggggctgtggacatgtttgagatttagcattggctgagcttttcccttcagtgtataaaagacacacacacattattgtgacttgaaatgaacccaaagaaaatcttttgcaactataatgttacccagagcctggtaatttgaaaggtaagaactgtttttcgtgcagtagtaaggattgtgattgtaaatgcagtcttcttaattatatgtactactttagcttctgaaactgccatggcatcttcctggcagggcacactggtgtccagagacaaggctggcccagttgactttcccaggccattgggacagtctgggtagctactaataatctaacaagctatgtgaaagagttttagtttgtggcaacaatattcaaatctttgagtctcggtcatattctctgagtttcctttggatttgagagtcaaataaacaggttccacttaacctcattcagactttccttttctgggattgtggggagtgtgtgactcctcactgtggcttcactcctttcagtgtgagctcaactccaacagtgcaatactcaggccttctaagacccatatgtggcagaaagtgaaattggacaaacaaactcaccgagtcaagacacaaccactgagattcttttggattcattcaaaatcatatgtcacattttttttcaaatactcagcccaggttttcttaaagcatggcttcagtttgtttaaataaaatagaccaggattttagcagttttgtaaagtgtgattgatacacaaacagaccaatagatgttgtccaggtccttcatggatcagacactcagagtgcattaaatgtacaagagttttactaaagaaactcctgtgagggaaaatggggaagaagcccagggggatgggagagccctcaggtcgcagtgcagagtgattccaggggaaggagagagggaaggacagaagctggatgggactgtctttgctgcacttcttagagagtttattaagctcatcaggaacccacaggctgaaacacgtatccaaggagtcctttgccttccaggaaggggcctatctcagtgtccctgccaagctcaggccttagctgagaatggcagatgggcatccctgcagttagagatctgaggggctctgatggccccagatagagagatggatgatagacagcagatggatagatgatatatagatggatagatagatagatagatagatagaattagaaaatacatatctgtagtagttttctctaggagggattgtgggacttttgtgggggtttccctttgctcttttgtttctggacaatttctacactttttcatgtatattcttaaccaaattcagtttaagatctctgcaagtctttctctttttaagtaattcttttcctaatacgagaaattcacaatgttcatggtatgtgtgtgtgtctgtgtgtctgttgcatgtgtctgttgcttgtgtgtctgttgtgtgtgtctattgcatgtgtctgtatgttgtgtgtgtacttgcttggacccattggcaccaagctttctgattcttcttcatcttccccagcttcctctcctcccagaaaatacactagaaacttatctttgagggaagaaggcaagcctattataaccttctgcccacattcccttatctaaacatgcttattggctactggttacttattacattgaacagtgagcactaatttatacactcaaaacctgcatcctaggctctcttaagaaacatgattgaaccatttggggaataagccagagtttaagaccttgtaaaattcaaaataaaattatttgtgctctgagagatttataacgaaaacttctagtctgtaacacaagttaatttcacagtatggtcattttgtttataaaagctgtactggctggaatagtgtcccctcaaaaatccatgctcacctggaactgcaggataggatcgtaactggaaacagtgtctttacagttatccttattgaaggcgagctcgcactggactatggtgggccctaatccaatgcctgatgtccttataagaaggtgatatgacacagaggagacacacagagaagaccaggtgaagacgcaggcagggactggagtgatgcactcacaaacctaggaacggtgaggactgccggcagtcaccagaagaagctcataagaggcaaggaagggccctcccctaacgccttcagggggcgcgtagcactgccgacatctcgagtccagactcttagtctccacaacagtgagaggatacatttttgttaatttgagccacctagcttgtggtactttgtcacagcatccctaggagagtcatataggagtcaaggtgacagagccttattgtagaggtgcttgtggacaaaaaactcattagcagagggccactgtgcaacctcctcgtgtggcctcccccgtcaacaaagtgtattgtcaatgaaacttcctagatgaggactgatgacacctgagctacttcaagccatgcccctcactgccagctcacattcccaagcccagggccactctgtatgatgtttgatatctgcacataagggagtaacaaaaagtgtacagttacatggtgactgcagcataaatatgtccatcccataacctcctgctgcttttgcttgtatctgtccctagaggacagcctccctcaaacaaacgtgaggcattctttagaagggagagcaaggagaaggcctttgtcatcaatgcactctgactgttcatgattatgaacaaaacaggacagcagcttagggacaactttgcacatgagcaatcatttactgccaacctctctgtggaaaagcaacaatctttttttttttttttagtaagatagagtttcgctcttgtcacccaggttggagtgcaatggtgcaatctcagctcacggcaacctcgcctctcgggttcaagtgattctcctgcctcagtctcccgagtagctgggattacaggcatgcgccaccatgcctggctaatttttttttttcaagagatggagtctcgctctggcacccaggctggagtacactggtgtggtctcagcttactgcaacctccacttcccgggttcgagcaattctcctgcctcagtctcctaagtagctgggactacaagcacatgccaccatggctggctaaattttgtattttagtagagatacggtttcaccacgttgccctggctggtctcgaactcctgagctcaggcaatctgcccacctcggcctccaaaagtgctaggattacaggcatgagcctaattttttgaatttttagtagagatggggtttcaccacgttggcaaggctggtctcgaacttctgaccttaggtgacccacccacctcggcctcccaaagtgctgggattacaggcatgagccaccacgcccagccaaaaacaacaatcttttataatggaggtgatgttatagggaatcagcagaggtcgggcttacagaggacctggaggggccagaactagctaggaaaggggctgggggaggaatggcttcctgcaggctgcagaccacagcaaggggttggtgtgcacacaaagcagtgtgtggttctggtgagtcctgaggatgaagccaaacccagaacccaagggctgtcagaccacacccaagatcagtggtgatactgattgtcactcagtggagacactaagtgtctccataaggaagatgattcccatcttggagagatcagagtcaagcagaaggcgtgggtgagcctggcagggtgcagcatgaggggccacagccagaggggcaatgagagccaactgtgaaggtgagggggcatcatcagttctagaaggtccacacagtccatctatgcttctgcagcacgcagaataccatcacggccacgatttccttgagttttagcttccgtcctctgctctgattttttgcatttttcctggtgtagatagatgctaagaggcaagtactgtgatttcgcaggactcttcaggggctgatattcccaaaggtcttcattttctgcagagatcttcgttcagctcttctctatgtctcattacctgtacacctgctgctgcttttcaggacctagatcatagttctgggctatggagtggcataaaatagtgataagtagatccctgcagcttcaaaataaatgttgaaataaatagggaaataacatgaaaattcagagtgtgtgtcacataggctagaatcgtttgggggattcgatgaaatgatgtgtatggagggtataacggtctaggtgcaatcaggtaagatacaccacatgataggttaaataaaaaatgtgaatgcattataaaatgtattaactataataaaggcataactataagatataaggaaactctctatgtaccctagggctgagggagggcccccaaggaaggacacgcttgggaggggttcaccttttactggagaaggtgtggactggccactgggtagcagagaagttggctgctttatccagactggagttggtctggagttggtgggcaaacaatcgaccaccctccggaaggcaggcagggccagacatcagtcagcaatccctgtgccagggctgcagtgggagcctgcacttgggagatggcagagaatcttcagaggagcaggctgcatgggaggacggggagaaggctctcagagcgtgggctgctcgggtggagccctgggccacagacatgtggcacgtgggtcatgctggggctttttgcagacaggttatcaccaggccaaagccgcagggttgcagagggatcactttcagagcctgtggctcaggcaggatccgctggagttcctcacacccacgtggctgactctccccacaggccccagaaaaactgcaggaaggcccttctgcctgcacctgaatgtcctttctaggccctctacggacagagcttaactaggtgctcactttaaggaaaaattgcttaaaggaattccattgtctattatagaacacaaatggaagggttcatttggagtctagaggcaataaattaactgccactgaaagctttgcaaagagacaggcacgtagtaggtgctcagtgattggaagttgtgagtattacactttttattcagtgaaactgtgtacatctaaattattgggaatacagttaaaaggcagtcatcttagtattttttgttgtgtaatttatttttgtgtattacttaactagacacaaagctgagaatgtgcatgcaaagtgttcctagtttctattcataattcatatttgtttactctcttttttgcctaggtcttatacaatatgttaattgcctttacaaagatgcataaatttgaagacatagaaactgtcgacattttggctggatgtgcccgattcatcgttgtggggcttggaggggtattgtttggcatcgtttttggatttatttctgcatttatcacacgtttcactcagaatatctctgcaattgagccactcatcgtcttcatgttcagctatttgtcttacttagctgctgaaaccctctatctctccggcatcctggcgtgagtacaaaccaaggatcaagtcacatagtaatagaaagaaagtttagaaccacatcacatgagccaggcatctgggaaagacataaccaatgacgctaaccctccaacatgttgcagatttaggatcttctaaacttttatgaaacctgattcgggttctttgtcaaaccaacgttctctccaatgcctgccttcatcttcttgtgatttgcctgaggaggaaagcatagcaattatcacgtcaatttagaaggctcaggaaagctggtacagagaaaatctggggaaacttcaaggttaagttctcatctcagtagtgtgtttttttccttgaaaagtgtttttttgtttgtttgttttgagacagagtctcgctctgtcgcccaggctggagtgcagtggcacgatctcggctcactgcaagctccgcctcccgggttcactccattctcctgcctcagcctcctgagtagctgggactacaggtactggccaccacgcccggctaattttttgtatttttagtggcgacggggtttcaccatgttagccaagatggtctcgatctcctgacctcgtgatctgcccgccttggcctcccaaagtggaaaagttaattttaaagttgaagagaggcatgcacgagggactgacattcctgggctctgccttctgctgtgcccctcaaaccacatcacacagccatggctcttcagtgtgtgatgaaactagacagatgggataagactagaaatctacatttccttgctctaatgaaaatatttttgaaatgcttatccttatgtccttgtatccttgagatgtttatctttgaatgaggcttctcagcttggcttattatatctgatgatgttgttttctgtacggcattatctttctttccagctattcaggcagatacatttaattttattgtagagaaatacctctttcaattaaatgtgatagtgtaaactctaggcatctgtcactttcccacctggaaaatgatcaaaacttctaagacaaggcaagtttctttctctttcccatacttgcttaatggctctagaacagaaatatttgaaataaagccaataaaaaagaaccttgcattgtcttagaagttttgatcatttatggttggattggaggaaatgagaaccttgaagaattattctgttattttggtttaaggcagagtaacgcagagagtgtgagttgggactgacaaactcttcatgaagagggcaagagggaagcattctgcattgggtgtgcccatgcgaattacgtgtccttttatttcaccgtgccacgcccaccttcccaccacattcacctttaccttgtaaagatctcttagggagggaaaagagggagaaagaaaatctgcggaaaatctgcagccacagaagggaataagggagatattcctgcatcaacacgggcttcatgcatctgtggcattgcctgtggggagggcgttttgtggagggggaaaacctcatggattttctctgagactctgctccttttatagaatcacagcctgcgcagtaacaatgaaaaagtacgtggaagaaaacgtgtcccagacatcatacacgaccatcaagtacttcatgaagatgctgagcagcgtcagcgagaccttgatcttcatcttcatgggtgtgtccactgtgggcaagaatcacgagtggaactgggccttcatctgcttcaccctggccttctgccaaatctggagagccatcagtaagagacggcagggctccagagtctccggtcctgctgcattttcagttctcttattcccttccgcaatgttaaaactggaggactgagtagatgctaactggttttaccggttagggtagactaggaacctggtcgtgagcaggaatcttttctgtttgttccctcagtcagctcaaagtaattagtggttgataaggttctgcattgaagcaaggctggggcaaggagtacttttttttaattgaagaaagaagtttcacatctacctatttaaatataattcagtcaatggaaaaatacatgtttgttactttttatttggagttgcaccaatgtttttggttcctaagaccaacatatcccttgctcttcacttctttgcagatttgtatcctcttgcaccttaaatcagatatggattataaactgtgggcatttatttacactttcactataggataagtgagatctcacaaattgtattctatggaagacaaatactgatagaaaacatccccctaaatagtataggtggtttcatttgagggttgagtgcatgaatgtgtgatgtatagcaaacaaacaaatcagaaagtgaatatttttaaaagagcttcgtattaattagtaagaacaactttagagtgtaactggcatcacacctgtaaaatgtaactaatcttttaaaatgagaactagtggctgatgatttatcttgtacatttatgtttcaggagctagaaaagaacattaagcactgaactacaatatatgtgttgccttttgattaaaagcaaatctatttttaagtgacttgactaatatttgaagcgttatgttaaatgactttgaccaatattttcaagccaattactcaaagagaaattaggtgaaatggctgataacctatcttgaacatattaattccaaattcatttaggatgggttttaggctctagaggagattaacaggaatacagaaatattaaaatatctataagtaactctgaatatatatgtttgttgggctccttgggggagaatagaggaagctgtgatacaagtttattatcttaaatcattatcaccggccttattacaaactagctgtttgatcttggacagacatgtaactactcaaaatcgtctccctcaaccacagaatgatggatttgaacaaatttcttagttccctttcagttctaatactctgggactctgggaatctacaggggagtagagctaatgccaagagaagtaaaattacagagctttagccgagccaaaaagaaaagaaactacctaggagaggatttatattgcaggaacctcaacattgttaatccttcatgatccagctcaaccccatactcttacagttgaggaaactgatggaaaaaccaccaaaacagtgacaaaattggccacatcacagcaattgacagagccaggtgttggaatccggttctcccgctcatagcctgttctcttcccaccctgactcatcacaactaatagtagttcacactcgcgaaggcttgctacataaaaggctgcatcttatgttatttatggatgttaaatttatttaacccttacattcacattctgagagaaaagctatggctaccccatcaagcagatgaggagtctgaggacaggaaatggttaagaacctcgctcaaggtcacatgactggcatggagaggaaccaggacaaacacaacaatattttaaaaagtaaattcacttatcttttgcactatccatgtgcctattatcaaagaatgcttgctggcaagtctgtgtgacgagacgcacatgaggatgtggagagttttattctacgaagtgaaactcttctttgattcatcagagctttagtgaggacctttcctagcaggcaccactgcattggtggtacctaggttatgtgagccgcttggggatgaaaaccaatgtggtagaaaactcctctatgtttcaagcaagctcttccaccctaaaccttctgtttgagaagctcactgagagtaagaagcgcccactcaccccccaacccttgccaacttccttctttgcttgcattgaacctcaagagggacaagccaacagtaagggatttgattgtagagaccacggtctctaagaggacccctctcatttttaaattacagacctcctttggatacccaatgagaatatgagatgataagaatgcatttatccccccacccactcaacaatatccttgctttgactagttttgaaaggtgggacaaaaattatgaatatagattagaaaatatataccttacattaacaaaatcaagattttattaatttaaacacataaatgcaggcacatacacacaacacatgccaataaactgtagcgaagattcccacttgaagtgctactgtctcacaactatcaaagtgagaagccataaaagatactctacctgggatagacaatcatgggtgtatgatggaattaggctgcattgtttgcagggcacgcgcacacaacctcagttcactagctctgtatctctgctcgttcatgatcctctgctctaatacacgtttccccctttctaggcgtatttgctctcttctatatcagtaaccagtttcggactttccccttctccatcaaggaccagtgcatcattttctacagtggtgttcgaggagctggaagtttttcacttgcatttttgcttcctctgtctctttttcctaggaagaaaatgtttgtcactgctactctagtagttatatactttactgtatttattcaggtaagtagatttcccttatatttaaataaataggttatttcaggacaatgtagtaaattagtaaaatacaaataaaggcattttatctgattttcagatctgtgctcaatacccaaactaaatttccggagatttctagatcatgtttgtgaccatcctttaacttctaaaatgtattgccttttaatcaatacagcatatttatcaaaagattcctgagtaacaggtgactaatagtcactccatatttctgaaaatgagattccaattagtactacgtagcacaagtttttgttttagttggagttagctcttaatgaactaatgaaagattattttaatgggtgaaaccaaattcctatattaacatacaggcatgatatctatttttattgcagtacttaaaggaatggaaaactgaaatgaacattgcagcatttactctgtaatagctagtacaaaaacatatagattggacattctaatagttttgttaataaatttgctctctctagtgacagtcttcattacaacaaaaccctttgttttgttatttctgatctagggaatcacagttggccctctggtcaggtacctggatgttaaaaaaaccaataaaaaagaatccatcaatgaagagcttcatattcgtgtaagttatctcatagtcacaattaataaattaacaagacatttcccctttgtcaccatgagacatgtgcacgtgtcactagacttcctctttccttccccactctgccaagagtgactgtataagtttcctatggctgctgtaggaaattgccacaaacttagtgcttaaaacaatgcagatctattgtcttatagttctggaggtcggaagttcaaaatccagttgttgcagggctgcgctcctttctggaggccctggggagaatctgtttcctcacctcccacagcttccagaggctgcctgtgttccttggcccatggccccttccatcttcagagcctgcaaaggctgcatccctccaacaatgatccttctgcctccctcttccacactgaaggagctttatgatcccactgcagccacgtggatagttcaggagactgtctccagcttaaggtcagctgattagcaaccttaagtccatctgccacttaatcctcctttaaactaaactaccatattcacaagttctggggattaagacatggatatctttgcaaggtcattgttctccctaccacagtctgccgtctgtctcccaaagattcatatctgttccacatgcaaaatatcttccttctatcccaataccccaaaagtctcaatacactgcatcatcaattcaaaatccaaaatatcatctgaatcttatcagttcaaaaatcccaaatctcaatatctccatcatctagagcagggctcagtgaggctctgggtataatctattctgaggctcagtttctcttcatctatgaatttgcaaaactcaggaaacaagttatctgctcttaaaatatatggtaggacactcattgaataacagttgtaactgttgcctttcaaaaaactatggagataatggaagaaaaaaaggagtcatcgatactaagcaaacttcaatgtttcctgggcaagctctatttggttccaagggctgggaatcccctaatctcttgcaactctttgttccaccctctgggttctcaatttcaccctctgaatcatacttcctttttttttttttataaaggtagcataaatttgcagctgagtaattttatcagtctatttcttgcttatagaattgtgagggtccgacatctttctttcattttgtcctccttttttgtccaagctggtgatgtttccatcagggttcaacagagaagcagagccagtaggatggatggatatagatatagatagatatagatatagatacagatacggatacggatacagatacagatacagatacagatacagatacagatacagatatagatatagatatagatatagatatagatataggaagagatttgttgtaaggaattgtttttcactagtgttagggctggctaggaaagcccaaaatccaggggacaggccatccagaagagcaggctggaaccctcaggcatgagccaaagctgctgtctacaagtaggattttttcttcatcagggaagcctcaggcctgttcttaagacatttcaactgaatcagtcccacccagattatctggggtcatctcccttaagacaactgattatggactttaatcagatctataaaatacatttacagcaacatctagagtactgtttgattgaataaccggggacttgcctgtctaaattgatacctcaaaatactatcacagtgactaacattcaaaattgtcctgtttgtttctaaaatcaccgttccaatgaaatatggggtcctctgccctttttgaatataggaggggcaaagggtattacttcttttgcaaacatggccgagtggcagattttagtgaaaacatcccagtcaggcaaagatgaatatgacactgggcatggtttctatttgtttgttcaagttcagcacaacattgaagggataccactgtgtacagctccaaggaatagaaatgagaactaatgtctgaagggttataggtggagacttcaactcagttaatgaaagagcattctgacaatcatttcctgattggcacacccgaagctgaagtggatgtgtctaaccagtgattgggaacatgtggcatagttgctgcacatgagattcaagctttgaggagatagttgaacttgaaaaattttaggtttcctctatccctgagaattcaccattttaatactagagaaactgatgaatgatgaagtcttccaaaatctaccctaaagttcatggtcaaagtgacctaggaaatttggttatttaaattccaggaaatcctaatgaaaaattttcaaggccatttgaaaataattaacagataaggataagtagtgactgttttaaaacatgtaacaacttaacatctatctttatctcctatgatttattatttcgacatattgcataatccacctaagtccatggaacttggatatttcactcttctctcatttatttttcttttcctcaaaaaagttataatttttggtagaaggtagtgaattaattatttaataattaatttaatatttcaaactatttttcaaaacaaaattcagaagccagtatagacttcaataatttcaaatttaaaatatttggagactaatttcataattattttgaagattgcactttttcctaaatttccataaacaatttgggttaaaacaaatgcaatataatttgcttaagtggtcatatgtaattactcagatcaaacgagcatattaaaatgagagatactttgttattctatgttatagtagaatattaacagaattatattttcagaaattatatgattggataacagtgtgttcttttcttctgcaatgaaattaaaagtaagttattacaattatttaataatatcttaaatatgatatattttattattattaattatcctccgagtgatttcagtaatgagaaatttcctagatcattctagaaaagtattatccaaagcaaatgccaggtgccctgttttcattacgtattatgtgaattatgaagaaacttatctacagagtctttaaaccaaagttgaaattactatgaaattactatgaaaggcaccaaatattttattacatgaacacagtgatagaaagtcagataggctccagaaaattaaaggctcctttgttttttaaagtgtcttagttgtcctgtgtgtctttcagagttcgcgtttctccagcaatcattttcttgtgtttgtttggcagctgatggatcacttaaaggctggaatcgaagatgtgtgtgggcactggagtcactaccaagtgagagacaagtaaggaggctgagggtttcactccctgacaaacttctaaaggttccattggaagctgggcataaaatcagagagaattcagggaatggagaccaagaagataaagtgctcctgagccatcccctacaggaagtggttgaaattccagggcatgctaagcctggaaaatgaagaattgtcaggtggaagacgcagttgacttggtgtaggttgtttcagagagaactggtacagctagtgggtagaaattagaaaagtaatatttaagttaaaaacaaggacaaggttcccaatgataagatcagctctaccacggaatggccagcttagaaaaggagtttagaaagggagcttggtgcctccttaggaatcctggcaagggattcctccattgttggggaggccatggtggaagatctttaagattctcaaatatagtaattcttttttaaaatgcccaaatccctcttcttcaccatatctcacctttcagaatgtattgttttactggacttagtttccagttcaggagggaggttgcggctagagttgtcagtgagtagctggaagctcactgaggatggggctctgagaagctctcactctcgtggcgcaggcaaggaaaagaaagtgcggaaggagattgagaagaagtggtcagagaggctggcagcgaagcacgagcgagtcagggtgtggagggcgcagaggggaggacccagcacgtcaggagacacaaagcatccagtatgggaagaatgagggcagcctctggagttgaacagggcaaggtcaaggcgagctcagtgagaagaaagtcagggagggtgttatggttggggaggtgattaccgtgggctgagaatacacaggaaccgcggcttctcatgagggcagaaaactagaagacagaagatcgacccagttggaataagaggaggcctggtctgagccgagctgggacagcaaagctcaggaagccagcccctaaccctggaggggcttagcacctcacagaccaggaaaccaattgccagataataaaccagcagcccggaaagctatgtgcccctctggaaaataaagcaggcgggcaaactactctttgaatgtaaaatgattgaaagtgttgaaaattccaactccaaacaaatggctgactctgaaggcaccatatgcatagcgcagctcagtcgaatgggctggccagaggttccttacaatagtcagcggccatcagtctcgcctattcagaatctccatcattcaggctattgggacatacgtagggtttttttcttccccttaattggtaggattcaaaatgatctgcagcataatggggcaaaactactgtaactaccgggccatttaaacttattgggttctggttgaataggccagtattactgtaagtgcagctgccgctgttatgcgctattagaatggaacacttattcaaaagcttcagccccctcatttcttctcttacaattggagctgagctgggctgggcctcccccgcgcctcacttatgcacactttttgccctgattgcagcttgtcccttccttttgtttagctgattttcaatgtattcaggccagtaggccattctttttttttattttaaaaaatgcataaatgctatgaatttttttaaaaaatgtgttcaaatgctatgaattccaggcactgtcctgatgtttcttcagaataaagttaagtagtaagtagtttgtttcaagagaaatgcatacttaatgtaacacatacagacgttcaagatttccaaaatgttggttttcatttttaggtttaagaagtttgatcatagatacttacggaaaatcctcatcagaaagaacctacccaaatcaagcattgtttctttgtacaagaagctggaaatgaagcaagccatcgagatggtggagactgggatactgagctctacagctttctccataccccatcagtgagtcatatctgttctttgttctaaactttcactgtcagaattccaaggggcgctgactcattgcctcatttaaaggtatacgaggagtaaagaggcagaaatataaagaagaaattatttttaaaatatgtaatctaagtcttggcatttttatggcttggcccaagctcacatattttacctagtttctgaaaattactttctagcaaatgttgcttccttagagttgtatgacatctttctttgggagggaagggcaagcgaatgtgtagaattgcagcatattttacaagactgtctcattttcctcttgacatgacccccgtgcatgtgattctgtccttcctaccattatgtttcttcccataagccatttctcttcctcttttacatgagagatgagttaactttctgagatgataacttggatttgggaaggagtgatgagagcaagaggtgtggtcattggtggtctatgtaaagagaaagttgtgtttgtaattgcatctaaggcgaaggtctacatgagattgtgaaatttgtcttgagtctatgtgagaccagcttggagtagaagcagggagttgcctggattcctggggaacagggagttgtggaagcaggacatagggaggggtgatactggaatataaacccatcattacaagacgattttctatgcaacgtggtagagcctctggtagccacttgtcccaagagctggctaaatacttcttaaagctgttttaactctgacatttaatgagagccccttcaatgtcaaaagaactcattaatttcccaaagatgcccagtttttctccaacaactgatttattgggaaaattaatcacaacatatatttaggataaggaacatgggccccctccatcctgttgtcttcagcaggtaaaaacacttgatcatatgcttcaattatgtcttcacatttaaaaaggaagttggaagaagagctaagaataggtagcaataaatttgtctctattgcctgagtgttatttctgagataacaccttcatcccttgcctgctaataaatcagaaacacccttgcatttcttacatggcctgagaagaatcctaactaaaagtcactaagaaataaggcagaaagctttgtattatactgagataatccctgaggatatctcagtataatacaaagctttctgccttatttcttagtgacttttctttgagggtggtggaggggttgtcggtttgttttgatgctgctcatcacatggctttaaggaaacttctgatattaaaatggaaaagtgttgacagatatatactggcagtgctctgctgcatcatggtggagccccaggcaaaggaaacatcaggcatatcgatcctctattatttaaaatgttgatattatattcatcagtaattttttgcattgacctttatatctataaatattgcatttaaatctgacttaccttagttactgagttttttgcaacccccttgcatttgacacctttgatccaatcctgtctgttaagacacctcctatgtgccagccaccttgaagcagacacaggccttgccctcatggacaccatactctggtagggtcatgacgttaacaaaaaaggccacacaaacataatcataaagaatagagagctacgcaagtctatgagaggtgcacctcacctgggctccttgcctttgacctgctcactgaaggatgaatgctgattaatgcagtttagaccatttcacttatgtgagcccttggtttcggaaggtatgggtgcttatctaaatgagaatcagtctgccgggtggcaaagcatattttgaatttttgtattacattgcatcagtcataagcatttgccttaatttctgatctcaaggcaatctttaaaccagttttatttggagtgggggcctgccggttaagtcaattatttctttagaaatgaatttaagattagtgagacagccttataggtacgagataatttttttttcctcgtacaccccaagcagttagttaactggggtgggagagattttttaaagttgatatttaatacatatttagtatttaaattgcctttatttgatctcatcagaaatctgtaggacgtcaagcaaaaaggaattcctctcctgagatcaaagcagctaatttcttaccaaacaaaccttcatacaataataggaaaaagaagtgtgtactcagctcgctttttattattctgtatgagatgataacaacaaaatgcacaggtatttttttctttagaagttcaagcaattgttctacaaaaggtttagattttcaaattctatgaccttcaggagaacactgccactatggttgtctatttgcacagtttggatgatgttgattttttggaatcccattgcttttacatacattatcttatttgaaactcaaagcaatcctgtgaataagtagaatatgcactttgattactatctcaaatatgaagcagctcatctcaccagtgagtggtaagctgttagaaattatcagagatagagacccaagctgattaaaagtgttgaagccttacacattttttaattaaagtgatattaaaatataaaatatttatatatttataggcataacaaacgtaacaaccatgcaacttcaaaatgcattttaaaactcccagataattttaatgtgtcattttttcaaaagaggcctaaagtaacttcattgtagtctaagaattttctaatggattgcacattgacaggtataaattcacatttccacattctcacacagaagactaggatgcaggttctgatgccatttttcacttccacaatggaacactgtattttgaggagcagcatcatctcagccactcatcactcattccaaatgttgttcatcttggtgacctctgtaaaaacatgctaagcagctgcacacagggctgctggtgggttccactgtgtgcaccgcaggcaagtcttcttgtcttctgagcccacttttcctacagacttcacatcttagctgcttaaaaaaagatgtgttcttctaaataaattcccaagtcatatttgatatcttggaacttcatcctatgatatgtgtattctactagatgttatagtagaattgaagcttctttttacattattatagcaactgaccaaaagagaaaaagaatgagggcagactgaagagaggttgattgatgagaacaaatatacacttggagagaagaaataagctctggtggttgataggactgtagggtaactatagttaacactaattgtacatttcaaaatagctagaagagaatgatttgaatgtttctaacataaagaaaagacaaaaatgtaaggtgatggatatcccaattaccctaatttaattatatgaatgtatcaaattatcacatacaccccaaaactatgtacaactactatgtatcaatataaaagataagtaagaagagttatgggaaagatgaacgttatattcaatatacgtaggttcagatttttccagtttgattgaaattattgcagaacttttatttaaggtgatgaagatctcctttatggataatgaatgaatggtccagtgacaagagtcttttggtttataagttgacttgatatagaaatgatcactcattcagtttttctaaagctgtatctcctgtgtttgtgctgtgagtatttcagggacgattttgctaatgaagtggcatgaagaaaactccaggtatcaccttgcccaagggaatcaattctgtagctgtagaatgatagctgatataattccatagctgcggcttctcagtgtggctccatgaagggaaatgcctttgggatacctggagcacccattccagccagagcttgaatggattttaactaagttcgtcccccccaaagtggtcagttataaactgggaagagtgccaagttacagctactgctatatcaagtgtaactttaccatttcctttatcaatggttttccctattaggttgtttcataatgaacacataaatggaactatttgactagctgttgtttctgcttagcagtacatcacattcaccacattaaaggaatgtgttcagattgtggaagtgtgtgggcatatctaaatcagaataaatgttatgtgaaggacatttaaacagttaggtttaaatgccctgataataatgtttagatcaccaagggtggtaactgtatatcaatagaggtggcatttgcagctttacgatatggaaactgatttcgatcagtttatagagaggacattagtcagtctacagatagcattgctaaacaaaatccaggcttgctgtgatattcagtatccaagtcctttaatatcttttatcaaatgtacattacttttaaaatgtcttcactatttatggctgtattgctactaatgttttgaaaaatacttaaaaggtggcctgtattaaaactaataaatactcatgtctgtggccaattatcttaagagcatatgcaagcagatatcaaaggcttcagtgcccttatgcgttcaaaattcaaaagagctgaggctagaaacaaacaaacaaacaaacaaacccattaaggtttatatcaagatgttaaggaaggtgatagtattaaaaagggagttaattatttttagttctctcctttttgttcttatgttccacatggaatatatattattcatgtaatacaaagttttttaaaattactgccactagattgtaatcaaatacatttgtcacatgatcattcttcccccagcaatgtcaggactttataatccccagaggacaattgtgcattgactactaacctgggcacaggcataacccgttttttaatccctttcagaggtgggaaggggtcacagtgtataatatcttagagctgggctggctttcatggtataaatggtctaattgcccttgtaaaatgtgattctggtttcttcaattatttcttaaccaaagataaaatccctacagatacaattccaatataaatgtactcatgaaactaatattctattagataaatgctaatcaaaatgtggtgtgtagatggtattaatctgtgaattgcttgtcacctgtcctcaatgagataggtaagtacaaaactagcaaagagtttgtctttgaatgaatcattttttttctgttgcatttaacggtaaaatatttggattgcatggtatggtatcattttctaacaattgatttttattgtgttgtacaaacatttcagtctataacagatttggaggaaaaaaataacttgttaccactttagacctttttaaaaaaatgggttggaataattaccatatataagctatagccaagggaacagtattttcaaaacctgaagtcaagacatgtgttttgacatcaaaccaacttactagaacaataggaaaaattatatgtaggattctggaacttaggattcccctcagtacagagcaaggcccactgatagttttgtggcacctcttgccaaatgaaagaataatgtttgtctcttctccaataatgattccagggcccagaggatacaaggaatcaaaagactttcccctgaagatgtggagtccataagggacattctgacatccaacatgtaccaagttcggcaaagggtgtgtatgagccacctgtgttgtccccattttctgtccttgaaaacagtctctgaagggggagtctgttgatgttcaagtctcctgatgttcacgtcaccctctgtaaggtggtaacttgctgaatattttctctctgcttagtttggagaatagaaagttaattgtcatgtttctgctgcaaaattggtacctgtgacataaaaagaaatgcaaatctagttaccgtctctagggggcaggctgccctagccctgcagcctggtgctgtccagaactagcaggtctctgtagagaagcacacacaccacaccacagaacaaagatggcaccaggatgctgatcacagtgcagttgtcccaattgtattgactatagtaaagatgagaaagttgagatagtttaggttacaatattgaaactctaatttataatgaataaatgcctgaataaaaggagacatcttatttctcaattttggaactaggtatgaaatctctactagtccttgggacctggtccaaagtgcatactaagaagatttctgaggacactggatgaatctttctgaaactttgacttagttaaataatattccatttaattagtcatctaacgaagtcatataatgacaagttttttcaagtttgaggatttgatcatccattttaatcctaatacttgggtgtgattggaaatgaattcattttgagggcctttggttttgtgactgtgtcgttgatcatagtcttaatgaaactaaaacaaaatcacctaggcaaagctccccattttcaaagagaagatgctgaggtcagtggagttggttatctgacttgttcaaggttacaaaacaaatccaggttaagaacacaggttttctacccacccacccagtgctcttttcatgactctggacttatataatccaatgaaagtgattgttttctggtctcctgtttcaactcaaaggtcaatgattaagaggaatgtgtcagtgaaaggctctgcaccagctggaggaatacaggtcagcactaatggtagtgcgcttagagtaaattccatggctttcaaatcattccaagtgaaactgtttcagtaagactatcacatcctgccttagataaataatagataacaacttcctggtttgaaaaatgtggctagcttagtgagagccagaacccatagggtacctggtactcagccttttccctatgtggatgaaggccaagtttagggaaaggtctagaaacggagatggagatcctaggactctaatccagtctcaaataaggtcaactgctcatcctttcttttcttccttggatgcagtttccaagatagcatcctttggtcttttttagtaagtatcctactcattctgctttccagtgttctactttctaagccatacagcacctcccttcctcattgccctcgaattaaagcacaaaggcctctttccatttaataagtttattgctgatgaccttgggagccaaatggggagaacacaattgataaacagagggcagttacaagcctatgaggtggctttttgactctgctttgcttactccgtaagtcaaactcaccagtcctaccccttcccgtcttcctttccttactcagctttacaaaggtcataagaattctctcttccaccatggtcctcttgatctcttgaaggaaaagtctacctgaaaatgcaactcaggacaattatacatttactctgtttctagcagacaatctacatttttgaggaatgtcacaaagggtgtacattagccatcctgcactctctagcctgggtgatagatgcaggcctggtagccagggcatttctcattgttcacatcttgaaagaggccatcttgggcgtcgggatttacctcagagcaggaccaggatgaatgcagagtttgactctgggcgaccctaatgcacagttgatccgaaactgagctggccctgctgggtctgttgctcctaggaggactccagccaattctgtttgaagtccttcgactcagtacacccaggacagaatcttcatgggtggaaaacttaagggactcacctctggaggttcccggtaggacaaccacagaagaagctctctgaaacacagtggggatggagattgagaaacactgttactaatcttacaagagaagaaactggcttcagcccagacctccaggataggtcacagattgatgggtgattcccgagtagcctggataatcagatcactctcagaatttctacatactttcaaaggaaaagagcaatttcagtttcctttagcaaatagttaatacacatctagaatgcaccgggcatcaggaacactgcactgaaaaagacaaagttcattctcctttaaggctcaaggtccagtgggaaatgcaagctccactataacacagaaatggagggagaggagcgaagacacttgcatggacattatatgcatagagccttctatgctccctgcagataggcaaaatagagaagcacgtgggtcatgggaggttatgggaggtgaaatggaagccaaatgtccaagtgttccttataaagtgcagcctcctcccaagtctaggtgtaggaaatcctactagcaatacattgtatgtatacaaacatgcacacacacacacacactgaattcagttttgcatgattttaaaactgataaacaattgtaaaagtttgtctctatattcttaattcttgtgttatttttcacgacagtgtcatgttaccattttttaatatttcaatgtataaaatgcacataggttgaggtgtatcattactaatgatagacaagaattcatatttcaaaatgtcttcaaaattcaacttcttggggcaaattcttgtcagatctgttaatttgccaaaagtggatgataaagagcttccattgggagaaggagaaagttggatttacccctccctcactgttcccttggccttcagtttatgccttcttttcttttcccttggagacagttgtcagtctcactctgtcacccaggctagagtgcggtggcatgatcatggctcactggggctttgacctcctagactcaagcgactctcccacctcagcttcctgagtagctaggaccgcaggttcacaccaccacacccagcatttttttttttttgtattttttgtagagatagggtttagtcatattactcaggttggtctcaaactcctgggctcagtgatccacttgtcttggcctcctgaagtgctaggattaccagtgtgagccaccttggcagtccagtttacaccttctttacaacactatttttatacaattatctattttgtgagggttactttagttaatagctaatggaaaccataaatctacttaactggatgcacatatactgaaacacaaacaatgaactgcaagccgatgaaaccgatgaggatgccattgtcaatcccttgttgacttgaccgtctcatgtatggactcagtgagggcccattataaattcatacattaagtactaatagagcttaatctgttttgtatttgtttggataaaaatcaatagaaatagaagtatcagtattttctttctcaccctgtggggcatcttgtggcactttttggagtgtgtgcaccctcctaaaaagcacatgacctggaaaatggagcctctactccttggcaggctgcctgtggcctggccgcagcccctccatgcccctccagtctcacctctcacacactttgaatgaagcaccccattcttttatggtaacagactcattcctggctcttttccagcacatcctctgactgttctctcacctctaaggtggttaccagctgatgtcttagctcatgtgttttctcttcctggaatttattcccaggataacactcactcatctttcaagactcatctcagtacactgaacctttcccatccaagactggatgaagtgccttttgcctgtactctatgacccccgatgatcccagaatcttatcacttagctgcacgcatagcatcttatccctattgatttgacttctccaggaaactgtaagccttttgaagactgtaattctaatttactcacttatgtaatcctgtgccttccacagcacctggcacatagaacattttctctattgaagtgaaactgactatccctattacagcatccgtcacttgggagggagagcccctgctgtcccaatcctatcatcctccaggactttgtggtttatcagtgcatacagtgtgtcacctactgacccctggcaaactgagcatttgctggtggacctttagtgagcaccaggagggagaagaaatttcagttaagcattttgcaaacatctgtctgaggactgactaatgttggcctagggtccatgacaagtttccactggtctggggtaaaggacaaggaagacattctcataaagctaaattgattcagtttgaaggactgttttttttaaatctcaaattatgttcttcctgtgactttggttaagagactttcttcctgaattgatgataatggtgataggaattgtgtgtgtgtgtgtgtgtgtgtgtgtgtttgtgtgcttgcgtgtgtaggtatccttaattggcaaaattaaaaaccaagagccttatggaaattcccaaagtagtttagatattttcctttcttattaaattcactggcctggcatcaaaaacatgacctggaaaggaaagtgtatgtaaggggcaggccaagtctgtgggtaactaagagaaagacctctgtaagggttagagcagaaggcagaggctctagccacagctccgccctgaaagcagtgacctggggtcatagacttttcttcttggcgctgaggcttgttcattcgtaatcaaggcaaatgcttagctgacctccaaggtgctcacctgttctcctggtcttaggttcctgatgtttccatggcttccttggctgaaagttgtatggaggagtccttacgtatttgacattccattttctctgcagaccctgtcctacaacaaatacaacctcaaaccccaaacaagtgagaagcaggctaaagagattctgatccgccgccagaacaccttaagggagagcatgaggaaaggtcacagcctgccctggggaaagccggtacattggggctggggactgggacattccttcagtgtgcaagtgtttgtcatctgctgagcctgttcctgtacaggatctcacatgcatgaccatcgatgcttaaacaaacaaaaccccaccttgttacctgagagatactaaagcaagagtgcaggacaccagagcaacctttttctctgggttcagggccccaaggcatctgcccatagggtgcttccctccacagtgggtcagggactgccacacacttggtgtgctatgagtccagacacagaccttatggtgaccaggtactgaccatgcccttcagtcctcatggtcagtacctggtcaccatggggtctgggtctggaccagaccctctgatcccaggatgcttacttctctcccaagaaggtataggaagggattggttgttaccaagactcctgggtcaccttcacatcagccactgtgttcctgcactcttcccattggaggccataacaaaccagtcttactggcaatttgaatggaggctgggtgagaagcagaccttaatctcaagcctaacctcagtggggatacgagagtaactttgaaaggttgctaatggtctattttatcatgagaggggaaggaaatacatgttggagactggcgtgttctgctttctcaaaacaaaaaaactaaaagccagtaatccaaacaagatgccacagaacaggtctgtgttcttccccttattttattatattagttttgagacagagtctcgctctgtcacccagactggagtgcagtgagtggcgcgatctcagctcactgaaacctctgtctcccgggttcatgcgattctcctgcctcagcctcctgagtagctgggattacaggtgcccgtctccacgccctgctaatttttgtatttttagtagagacggggtttcaccatgttggccaggctggtcttgaacccctgacctcaggtgatccgccctcttctgcctcccaaagtgctgggattacaggcgtgagccacagtgtctggccctttatttgccatgtgaagctcttaattgagacagcttattctgctttttctttctacttgctacccacaggctggcaccaagaatatccgctacctctcctacccctacgggaatcctcagtctgcaggaagagacacaagggctgctgggttctcaggtaagctgcccacctggctgctctgctgcttttctgtagagtcaggtggtaaatatctgggggtgtgggccaagaggcaacattaagaacattatgtaggttacttacatgataagaaaaagaagaaaacaacttcttttatagttgaaactcggaactttgtttatgaacactgaaatttgaatttcgtataatttttacttttcatgaaatattatcttcttttaatttttttcagccccttaaaaatgtactaaccatttgtagttgacatgccatacacaaagaggaagtaggccagatagagaccaagggtcataatttgatctcatcttgaagaaatgtgaaaggagtgtttcattgaagttctaatattcacccactatttaaatatgagcagagttctccaaagctggtttaatttcactaaaatgatttcaccagatttactgattaaatgttttccatttaatatttaattattaagtggaattcttagaattattgaaactttattattctaataaaagcagttactatttttatatgtgtataaaatgatttgctattagcaaaaggtgacataatatatgtaatatgccgtgttatctatttttattttcctaatttttaagtgttaaaatcatgttggaaattcacgtaaactaaacataaaggattttagtatttaacctttaaggagtatatgtaattacctcaaaatgaaactttttttctgatttaaaaacatacttgatacaaagtcaaaatcattcagtagagaaaagcataaaaaaagttaaaagcatttgcaaccctaatgccaaggtatgatcaccatagaatgttttggtgagcacccttctagaattcttcctatacctgcctgatcccacactacccatactgacacctccctccacaaaaaaatcacaaaaacattgcatcatatgatacataaaagcaaagtatagtcattgttttgcaatctttataaattgcctagttcactgaacaaatgttgtacctaggtttccatgtcaatagatgtggatctaatactcatttttaatgagttaataataattatatgcatgtaccaaagcttattaagctaattcctaattaataaatacttaaggtattatcaacttttaataaatataaacaatgatacatattaagggctctggaccacttgtgattggtattttaacaaataagcaattactcccttagtatattttcctagaagtaaaattttgaggtcaaattcatatagatttaaatttttacatatattgtcaaaacaccatcacaaaagattatatcactaatttgccctcacaacaacagtctgtaagaatgatcttttcctaataccactgggatgttgtcaaacttttgagtaatctgtgatatcgtagcataaaatttatatgtcagatttaattttcatatgaatctctttgatttttagtgaagttgaacatctttcacattttggaaacaatgatatttcttggggtgaagttttctgttcctgcctttgctcgttttttgttttgtttttttctatttggttgttgattttcttgagatgaatttgaagaaccctatataacaaggatatcatccattttatctcctatatgttgccaacgatttttttatttttttgagatgagtctctctctgtcaccccggctggaatgcagtggagcgatcttggctcactgtaacctctgcctcttgagttcaagcgattctcctggctcagcctcccgagtagctggaattacaggcatgtgccaccacacccggccaatttttgtattttcagtggagacggggtttcaccatgttggccaggctagtcttgaactcctgacctcaggtgatccccctgactcagcctcccaaagtgctgggattacaggcgtgagccaccgagtctggtcgatagtttaatttttttaaaccatcttcctggtacaaataacctggcactatttttgttatttgagtgagaaaacaagaaagtgtcacagttctttcttttttttttttaatttaaatttttttagaaaaaaatcttaaaaagggacagggtctccctatgttgcccaggctgatctctaactcccgggcacaagggatcctcctgcctcgcctcctaacatgctaggattataggtgtgagccaccatgcctggacgacagttatttcttaagagatgagcatcaatactgcatgcctatggtagcaggagatgaccacggagcagattcatttgaacaaatcttaaataagcattataaacaaaatacagcaaaacactaaagtacaatacaccttgcaaagtggggtttattccagaatttgagagttgtttaacatttggaaacatacatatattattcactagactgataaataggtcacaggatcctaaccttttaatggatgtcctcactaaaggatatctcagtcacactttcagtcaaagccataaaatgccaggaagaaatagacaggatatatatgaaggaaaaataaaattctacttctccacactgtcatttccggtctataaagaggatgatattggttccctccatatgcaattgtattgtcctgatgtgaagccagtctcatacatgcaggatacgcatatgaacaggtacataaagctgctagagcagagtctggaaccaagtagatgtgcaagaaatattagtcattattactattactacttagggacttaaagaagccttgacatgggtaaatacagatgttcttggaaagaaagacaacacttcaccatgtcagttctacatgaattacttcagacttggaatgaactgttagtcccaatgatttcttttctttcaaatatactcgactggttctaagtttcatccaggtgaacaaagacagtggttaaactagaaatctgagggaaaagtaatgaaatagcacttatgttagcagttttctttaataagttttaaagatgggaaatcagtgctctgcaatatgttatgggtcatatgtctgcaggattttaaatacttgttcttatttgtcatggaaacttatgcctatttatgcagactcatttctggcttgcttggaattaactctactgtgaataatttgtcatttctgtggttacgatttatgaaaaataataaaccatgatacatttaaaaaggattataatagtgatcaggataaggctgagatagtcctcaatgtgtaatcaagcacaattgatcattggaatccttctctccaaacccaaagtctttctgcaccaggagaatggctggaggggatctaggggagacagtggagagtcatgttctgcaggcaagcagtccctggctaacccacctgaaacttggagaatgcttcccttcctagctctccccttgccctccagggtcaggacttttcttgttctggatgtcttggagctccatgctggtttgggggacttcacatgcttttccagggctcttttgcctttagggctcacttggtgttataactagagaggtcttgactggaaacctcttatatgacctgaggctgcttagaatccatgtgcatcaaggcagatgaaaaagctctggagatgaatggtggcaatggtaacacgacaatgtgaatgcacttcatgcaatgaactgtacacttatttatagttagatgaaaaaaatggttaaaatggtcaattttatgttacgtatattttaccacaagtttaaaaaatgtggaggtggggagtgttgcactccgagtctgggtgtctgaacagtgtatcctgcatcaggtagttcatcctctgtgtgttggggcccgccctgcgctgagcagaagcaccttccttatttctcctttcatgccagggtgcccatgtccagaagttaaggcttttggtcaggtgggaggtaaaagaacacatactcagattttgttgccaaagtatccactgctctgcctggaactgcactacctgggtgcccatgtggaggagagttatgcgaaaaggacaaaacacagtcctcactcttcctttttctgccttctgctttccagccaacttattccttcaattttgggcagctctcagccgagtgaaactttgcaagtcacatacccatgcctcttcctagagcttggagtccactgtaaaataacccagagggtgatcaggaaaccaaaacagtgaccagggtctgtccactgatggagcactcaacaggaaaggttggagtgaaagaacagggtttgggggcagaagcctccaggccattgtttccttagctagtgcttcaagcaccaaggatccagaggaactggtcccaggccttgttgtagagaacatgttaaaggagagtcagggaaaaaaaatggacagatatatagatatattaattaatgttttctttattgaaagaagttggtctcctttggccaatttccaagttagcttcttagtataatttggtcacattttagaaaaacattattgaacaggatattttaagattttcaggtgtcccacattctaaatacattttttcaagtgtaaatctttgggcatattcattctagatatggagtttttgttttgtttttttaggagggagaatgagagaaagaacatggctttcagatttaaatataaaatacctaaattcttttttttttttttttttgagacggagtcttgctctgtcgccaaatctggagtgcagtggcgtgatctcggctcactgcaagctctgcctcccaggttcacgtcattctcctgcctcagcctcccgagtagctgggactacaggtgcccaccaccacgcccagctaattttttctagaaaatacctaaattcttaggagaatttttaaagggaaaataaatttataaggctaagactttgaagaagtgagagtaaatgatatatgtgagaaatattcctttgaagatgtgtgcacattgaagtggggacaagacaatgtcccaggcatcggttaggggtctggaagagaatccaagaggggacattgcatagacagctgctggctcccctctcatgaggtagccctccctcttacacgtggatacaccaaggagacagcaaggagacctgatggtaagaagtggatttgaagctggataggctctgctcaaactctggtcccatattcaccagcttatgatattgagtattgcttaagttcgtgaaacctcagccactttacctgtgagattcataactttactcacccgaaagggccgctatgaggattcaatggcatgatatatttaaaaggattagcacagtgacaggcatatagtaaattatcaggaaagggaagttcccatcaagtgccattcacagtctgtcacctgcttagtcctctgaaaggagggcatccggtcacgccctggtctctgctgtggctcccttctatccccctttctccaggattgactttttctatatcaaagattggaactcagatgtaatgctttctggtaaccactgattaaaaagcaaaccaagataaaagcaaccactttcagatggctgcaccacataacctgtgtgtagcattggctttggacaagaccaagcatctttgtgtcccatggtttatgtctatggccaactgatctgattctgtaaaaagacactaccttacttacctggggagactggcttgatacagcattttgcatgcatttctatttatttatgacactgcacttatagcttctgtcctcccatctgcttggggcagtgtccttgagaaggaaaaattgtgctgataagaaagttgagtgtagagctgaaacctcaggaagagctttgcttcactctgagttcctgccatgtggatattaagtcttaactctgatcttaagtcttgttctttccccttcttgccatgatgttttcctagatgatgacagcagtgatccaggatccccatccatcacgttcagcgcatgctctcggatagggtcacttcagaagcaagaggcacaagaaataataccaatgaagagcctacacagaggaaggaaggcattcagctttggttatcaaagaaacacaagccaagaagagtacttgggtggagtaaggagggtggccttaagacccaaacctctgtttcatgcagtggatgaggagggtgagtctggaggggagagtgagggcaaggcctctttggttgaggttcggtcgaggtggacagctgaccatggacacggcagggaccatcacaggtcccatagtcctttgctccaaaaaaaatagtgttattgtccacaagattgttttggtgtttctcaagagtctgtcttcctataactgtgaaaggaggatttctggaattcagaagagagctattgagtttgctgtgttgaagctattaaacatggatctataagcagcaggaagattttttccaaggactgggagcaaacttgcaggctctgccatgtacttattgtggggtacctttagatgaattccctgtgagtgagagaagttgatcaccccaggaattagtcactaagaattcctaagaactttctatcaaaagcattggatccaagccatatattgaaatacaagcgtgattaatcagtaattcacattgccgatatgcatatgcaacttataatcaaatagaactagaagagactttgaagtcacctgactcagccccttgtgtttacagacaaggacatgtagtccaaggttgcatggtgagttcacagtcggattgtcctccctccaaactgaaactaatttgattttgatttcatattcaatatgcaataattatgttctatcagagataaaatttgttatgaatttgctttatttaatcagtagcaatgatagatgtgatgcatactataggattaatctgtgaacaatgggtttacggtctatttcataattgaaatatttattttaaaaatgaatattagaaacaaaacagccataaacagagtttaatagcaatgatgttaacaacaagtatttataaggggtgcatttgtagggtgtgacattttaccctagggtataaaactatttttcttttattattattattattattattatactttaagttttagggtacatgtgcacattgtgcaggttagttacatatgtatacatgtgccatgctggtgtgctgcacccgctaactcgtcatctagcattaggtgtatctcccaatgctatccctcccccctccccccaccccacaacagtccccagagtgtgatgttccccttcctgtgtccatgtgatctcattgttcaattcccacctatgagtgagaatatgcggtgtttggttttttgttcttgggatagtttactgagaatgatgatttccaatttcatccatgtccctacaaaggacatgaactcatcattttttatggctgcatggtattccatggtgtatatgtgccacattttcttaatccagtctatcattgttggacatttgggttggttccaagtctttgctattgtgaataatgccgcaataaacatacgtgtgcatgtgtctttata

SEQ ID NO: 390 - DNA, 195348 bp, Homo sapiens
  source 1..195348: mol_type = genomic DNA; note = NC_000001.11:86914635-87109982 HS2ST1 [organism=Homo sapiens] [GeneID=9653] [chromosome=1]
gcagccgcagcgccggtggaggggcgcgcggccgcgagcaaaggagggagggaaggaaggaagagagggaggcgggcaagcaggcgggcgcgggggtcggggactgaggcagtagagggaggcgagagcccggcagccgcttcgcgctgtttgctgcgcgggcttttggagggggcggccgtttagtcggctgaggagaagcggacaccagcggcgttggtgatagcgcctgggggagggggactggagaggcgagaaggggggtcgctgcggtggttctctcgctgtcgctctctctttgcctcgctcccggctcggcgggctcctcccggcgtctctctcgcctccggggtcccgctccccgccccccgcggtatgtcttgatcccgagcagcgggtttcatggggctcctcaggattatgatgccgcccaagttgcagctgctggcggtggtggccttcgcggtggcgatgctcttcttggaaaaccagatccagaaactggaggagtcccgctcgaagctaggtgaggaactgaactgccccgggctgagtgctgtggaaggggccgaggaggcgctgccgccggagcaagtgggcgttcatctaacctggggtctggctcgggggctgaaagcggtttcaaagagaaccgggaacaaggggcagcgagagcacgagctccaagaatgggttgaattaagcttgagcggcgtgctgggctcgcgaggtcacggggcagaggttgcaaggttgggcttccctagccaaagggtagccccgaagtaggcattccgcggagagagagcgagagagaagaccgaactcagtggggagcgtgtgttgctggtctccggagacagaagcgcttagcatcgcgtgttctcttggaagtcgtacaggaagccctggcaatgtcagatgaggggtattctaatttgagctatgggcatctggatacgaattcttttgggggctcatgaagggataggtgcgcagaaatgggaggagatgctgggatgacggagagcaacatgtgaacactgtagcgagttgcactcttgtgctccgggcagcaaaggaccttgtaattgccagctgagggaggctggccgggtagtgcgggaacgcgagtgcaaagcttcatcggagtacggaaatgagggtccggagatttaaattcttctttagtggcgctaaactgatgaattggggcttgagaatagggatgcctatgtatgttgcttcacggcagtgttgatgtgaatttcgaagaggagggaacgctgaaggggaattatgtagtgaagtttgtgtttgttaaaggaaaagtaggattatgcggaaagctaaccatatggttaaataccttaaagggttaacaggtgctttaatggatgagggggtctaaagtacaaaaagttggtgtgaagttgtgaaagacaggccagaaaaaagcacagataataggtactttcggattaatagggcactttggcatttggaagagctcagcatggagagcgagagttaaaagaatgacagtgataaattttgatttaaaaatgtacatggcacttaaaaatcagctcaagaggatgtaatttgaatatggaaaagtaatgtgaagtgttttttgcatactctcacctcaaaatcattttaaataccttttgagaagccagcaaaaacaaaaacaaaaaaccctcagcagtgtaatttagactaagaaatagatgttactgtgagtggatgattaatttttaggaaaaatgtaccagaaaataattgtaatattatgtatagtagctattttggtacaaggctttgcaaaagccttgacattttaaagagccttgaaagaaaaaccatcaagtaaatctgagtgaagtgcaactaaagttggaggaaaactagagttacttccagccctcaattctagagtaaaatttgaagagatactcagtttatttacgaattcctttattaatatgtatcttgtgtggtggaaaaaaatgtccactttaaatattgaaggttatccagtctggtttttcttttcttttggatccatttagcgacattcagggtcatattctggcgttattaatgatccagctctacagaaaaaaagactcctcttgaagtggaaagttatattaaaattaaaatttgtacttattttttgttttgttactatttggaattgtctggagttgatttcttagacacgttacagtgggttagaatgacttaaatttttgattttcctcctttcctaacatttctttccccatatacttgaaaattgcttccatagacacaatctgaatgatttttaaaagaaagttatctgaagatgtataatgccacagttaaaatataaagtgctttcttgtgatacaagaaagaaaatttcataaaaagtagtaaatatgcatcaaaatcctcctgggactacagatgggtatacctgggagtacaggtgggtgttaccatgcctagcagaggaaaccatattttgacaaccatattctgtactaggcacttttcatcgtagatactcgtgtttaaagtaagaacaccatttaaagccatttttgaccagacacggtggctcacgcctgtaatcccagcactttgggaggccgaggccggcggatcatttgaggtcaggagttcgagaccagcctcgccaacatggtgaaaccctatctctactaaaaatacaaaaattagtcgggcggggtggcgggcgcctgtaatcccacctactcaggaggctaaggcatgagaaccgcttgaacctgggaggcagagattgcagtaagccaagatcacaccactgcactccagcctgggcaatagagtgagactcagtctcaaaaaaaaaaaaaccaaagaacaacagaaagccatttttgcagatgcaggaacaggcttagagaggttatataacttgcccaagaccacatcgcatttaagtggcagagccaggattgcaacccaggtatgtatgattccaaatcaagtgctcctttaattatgtccggctgcttaagactttatattgacattacgctgagatttaggtatttgaatagagttttaaaattgtaatatcagtgtttaattgcatttattgctaagaatgaatatcattcagagaaaattgaatttctgatacaaaggaattggtttaatgtaacgtctgccccttgtttagattcatgtaatgaacataattatgttacccaatgaaacaactgaattagatagcttatttttactataggaaagaaaaatctagctgttttccatacgtgcaaaatcacaatgttaaaaaagcatttttattttggcataaaaaacctattaaacattttgtccttaaaagtagttattatcattttcattgtagaagattccaaaggatagtattgtctgatagtggctttaatataccttgatttgagagtacagtattttgatggtgagacttctaatagagcaatagatgtattcaaaactgaggtgtactcattgactacttgggaaattcactaattaggaattcctaaaaaaaaaaattcagtaatacagctttttatttttattttttaaaaaacaaatatggcattgtagtccacatattacaatgcggcttgctttttttgccttgaatgttatacacatctttccaggtcagtacatatagatgtgacttactcattctattaataatagctgtataatattccaaagtatgcatgtatcataaattattaagccattattctagtaacggacattcagtttgtcccccatctgtcgtgtgtgtgcgtgtgtatatatacatatatatataatttttttgagtgtttcttttctttcttggtattataaacaattataggaaacatccttatgtgtccgtttaactcatgttgatgtcattttgtgctaggatgaattctgtatgtgagattgctgggacaaagaatatacatattttataatttaacagatttaaaaatctacttttcaacatttttttgtttttcaaaagatgtagtaatctacactgccagcacacattcattagcactagaagataatcagcttttaatttttgccagtgtgaagctgtgaaatgatatattcaattaatttaccttctaatttctaggtaggttgaacatctttacatgtttattgcccttttatttgttacttttttctatttttctattgggtggtttacttttttttttaaatattagaattagtaatcctttatctatcctatgtcttttttaaattttttttatttttatttatttatttatttatttatttttttgagatgagccttgctgtcacccaggctggagtgcagtggcacgatttcggctcactcctgcctcagcctcccaagtagcggggattgcaggtacgtgccaccacgcccaggtaatttttgtatttttagtagagacagggtttcaccatgttggccaggctggtcttgaactcctgacctcaagtgatctgcccccctctgccttccaaaatgctgggattacaggcatgagccactgcacccggcctcttatttgtttttgtccaagtttgccatttgtttcttgactttatggtgtgttttgctcatatagaagttttaaaatacacacagttaaatctatcaatttagggaagtcgttttcatattttgcttaggaagacttacccagagccaggattgtgtacattttctgtattttattatagtattttatagtttattacatttggctctttaaaccatttgtatgtttacagagatttatcatgattttctcagtaaatcattttttccaactgtatgttaacattccttcttttaatcacatactaagttttcatatgttcttggatcaattttggatgctattttccattaatcagagattctttaaacctcggggacccataaataggcttcaaggtatcagtgaattccctgaaattatatacataactttcatcagatttgcaaaggagtatgtgattcctttaatggcaaggatcacagatttatagtagatgtttcatatttagtggacttttttttgtttttagtaacataacgtgcagattgtgagttaaatttaggagataagcttattacctgtgaaaaagagaagtttttcaacttcaaatgaagttaatacttcattgtattaaaatgtagacttaattttctagtgagaaatggaaaaggacagggaatccaaatgaaaactatttaactgtgactcgttactataaaatgtcagaatttgtggctggtaaaaagtagttcttcccgaatttcaagagcgcacttgttgctaatattgactggtcgaacagtgcagtgaaatattttctcacataagtgatagaactatgtgcttggtaactttattttctatagggttttagcattgtaaataatatttgttgactgtattcttacatctctatatggatttatgagcacattaggaataatcttttacatggggaaaataattgagaatggattatgtaatcatccattggtgagaattaatgttagtcattatgttcttaaaactctactagactaaacaactaattccagggccaaggttgagactgctttttggaatttggtagtttttacaagtaagttcctgaaaccatgcagcaatacctgtaagatgttccagagaatgctagatttcctcacttctgaaatcatttggaaaacctcatagtagctactgttttgaggactttgggttaataggaatacagttattctagaattggtaattggtgcctcacttagtcttgaataggatgtctagtgccatggagtagtcacctgaaatagttgatctcaattaagataattccaggatgtctgtccaccactctggtaggccttctaatagctttttggcacttagagaaattgaaataataatgaatgttcaaagattgctctccagaagaccatttttgaaggatgtacttatagatgaacttcataatcatggttcactatagcctagttatttttaagatctacccacctaccagtacctgtacttacgtattctgcctttctgcctgttaacaatagatggtaactgtcagtgctcctgttcggtcatttgtgcacctgattctgttgcctcacttacctaaagacatggttcccgaagctttccctcattctcctgtcacaatgtattcttgaaaattgctaagagagtggattttaagtgttttcaccataccaaaaaaaaaagtatgtgaggtaatgcatgttgtcttaattagcttgatttagccatccatgatatatacatgttttaaaacatgttgtacatgataaatatatacagttttgtcaattacaaataaaaaaaaactatcttggtaaatgttccaggtgaacgtgaaaaatatgtattctgttgttattggctgaagtatgctgtagatgtcggttggtagtattgttatggtgttttgtattcttgatttttttctgcctcttcatcagttatggagaggggttttgaaatctttgataattgtggatttgtctgtttttcttgtagttatgtcactttttgcttcatgtattttgaagtgctgtgattaagtatatgcacatttaggctgtcatgtcttcttgatggaccaacccttttttttatacaagataccatctttatccttggtaatattctttgctctgaaacctactgctgtggtgttaatgtctcccccaaaattcacatgttggaaacttaatctccgatgcaacagtattggggcgggaggtggagggtgtttaggtgatgagggctctcccctcataactgtattaatactgttataaaagagcttgtggcagtgtgttctcttttttctacgtaagaagacagcatttgtcccccttttgccatttctacccccaaccatgtgaggatgccacaagaagtccctcaacagatgctggtgtcttgattttggacttctcagtttccagaactgtgaagaaatacatttctgttttctataaattacccagtctcaggtattttgttatagtaccacacaatggactatgatacttactttgtctaatactaatacagacacttcagttttcttttgattagtgtcaggtggtatatcttttcccatcctgttaatattaacctacttgtgtatttatatttaaagtggatttttggtagacagcatctaatctttcatctaatttcacaatctcttttgttaatggaatgtttagaacacttaatgtgattattgatgtggttgggtttaaattcgtgagttgctatttgttttctgtttatcttaactgttctgtgattcctttttttctgttgtctttaggattaaaggggtatttttaaattccattttttaatttgatgacttactagcagtgctctttgttgttgttttttttttaagtggttgcttaagggtttatggtatacatgatagaatttcatgtgtagtataagaaccttaatatattaccacttttttctgggttcttgctatcgtcattatacattttacttctatacatgagtcctacaatacattattatttttgctttaacttatattttaaaaatatataaaatgtttaaaaattttttaaaaatttgctgacatatttaccattcccagtgttcttcattttgtgtgtgtgtgtgtgtgtgtgtgtgtatgcagattttcatgtggtaccatttttttcactctgaagaatttcttttaacattacttacacttaaaaatatactggtgatgaattcttttcattttgtgtgtctgaaaaagtctttatttgctatagtgtttgaaggatatttttgttgggtatagaattctaagctgacatttttgttgtttcagtactttaaagatattgcttcattgtcttctggcttgcattgtttctgatgagaaggttgccatcattctttgttcaactatatgtagcgtgtcttttatttttcctcttttgcctacttttaagagtttcactaggtttttaattatttaattattaaattatgtttcttgtgcccttgtattatgtttcttgtgcctggggtttgttgagcttcttggatctgtgagtttacagtttttattacatttaaacatttttggctattatttcttcacgttagtttttctatgctgcttctcctctcaggaactcaaaatacacttacattagaccacatgaaattgttctacagttcagtgatgttctattcatcattctcagtctttttgtgtgtgtgtgtgttgttttagatagtttttactgctaggtctttaattcaccaatccttctgcagtatgtaatccacttttaatattacccagtttattttttatctcaggcgttgcctcccactcctccccctgcccttctagaagtttaatataggtctttaaaaaattatgtatcatttctttccttaacatcctgtattagcccgttttgacgccctgagactgagtaacttacaaaagaaagaggcttaattggacttacagttcacatggctggggaagcctcacaactgtggcagaaggcaaggagaagcaagtcacatcttatggtggcaggcaaaaaatgagaaagcttatgcaggggaacgccttttttttttttttttgagacagagtcttactctgtcacccaggctggagtgcagtggcgcaatctcggctcactgcaagctccgcctcttgggttcacgccattctcctgcctcagcctcccgagtagctgggactacaggtgcctgccaccacgcctggccaatattttgtatttttagtagagatggggtttcactgtgttagccaggctggtcttgatctcctgacctcatgatccacccaccttggcctcccaaagtgctgggattacaggtgtgagccacttcgcctggcgggaatgcctctttttaaaaccatcagatattttgagacttattcactatcatgggaacagcatgggaaagacttgcccccatgattcagttacctcccaccaggtccctcccacaacacaggggaattcaagatgggatttgtgtggggacacagccaatccatatcattccacccctggcccctcccaaatctcatgtcctcacatttcaaaaccaatcatgccttcccacagtcccccaaagtcttaactcatttcaacattaactcaaaagtccacagtccaaagtctcatctgagacaaggcaagtcccttctgcctatgagcctgtaaaatcaaaagcaagttagttacttcctagatacattgggtaaatacagccattccaagtgggagaaattggccaaaacaaaggtgttacaggccccatgcaagtctgaaatccagcggggcagtgaaatcttaaaccttcaaaatgatatcctttgactccatgtctcacatccaggtcacactgatgcaagagttgggctcccatggccttgggcagctccacccctttggctttgcatgatatagccccccactcctggctactttcacaggctggcattgagtgtctgtggcttttccaggtgcacggtgcaaactgtcagtggatctaccattctgaggtctagagaacagtggccctcttctcacagcgccactaggtggtgccccagtagggaatctgtgtgggggctgcaaccccacatttcccttccacactgccctagcagaggttctccatgagggccccgccccacagcaaacttctgcttgggtatccaggtgtttccatacatcttctgaaatctaggctgaggttctcaaacctcagttcttgacttctgtgcactcgcaggctcaacaccatgtggaagctgccaaggcttggggattgcaccctctgaaggcatggcccgagctctacgttggcccttttcagccatggcaggaggtctgggacaaagggtgccaagtccctaggttgcacatagcacggggaccctgggcctggcccacgaaaccattttttccttctaaacctctgggcctgtgatgggggggcactgacatggagacctctgacatgccttggagacattttccccattgtctaggggattaacattcagctccttgttacttatgcaatttcttcagtgggcttggatttctcctgagaaaatgaaattttcttttctattgcattgtcagtcttaaaattttcctaactttgatgctctgtttcccttttaaaattgaatgcctttaatggcacccaagtcatctcttgaatgctttgctgcttagaaatttctttcaccagaaaccctaaatcatctctctcaagttcaaagttccacagatctctagggcaggggcaaaatgctgccagtctcttttctaaaacataacaagagccacctttgctccagttcccaacaaattccttgtctccatctgagaccaccttagactggaccttattgttcatatcactatcagcaattcagcaagtctctaggaagttcccaaactttcccacattttcctgtcttgttctgagccctcaaaactgttctaacctctgcctattacccagtcccaaagtagcttccacatttttgggtatcttttcagcaatgccccactctatgataccagtttactgttttagtccgttttcatgctgctgataaagacatgcccaagacaacaattaactaaaagacgtttaatagttctacatggctggggaaacctcacaatcatggtggaaagcaaggaggggtaagtcacatcttatgtgatggtggcaggcaaaaaatgagaaagcttgttcaggggaacgcctctttttaaaaccatcagatctcatgagacttattcactatcatgagaacagaatgggaaagacttgcccccatgattcaattacctcctaccagttccctcctgcaacacatgtgaattcaacatgagatttgggtggggacacagccaaaccatatcacatgcttttcctaattttttttgaacaagtggaatattgttataataactctttctggtgctgttgtctactaattctatcatctgggtcatttcttggttgctttctattgatttgcttttctctacattatgggccatattttcttctttacgtgtctggtaatttttaactggatggcagacattattttaccttgctaggtcctggatatttccatattcctataaatactttcaaactttgttttgggacatacttaagttatccagagacagttttgtctttttgaggcttgcttttaagtttgtttgatggcaccacaaagcctttagcctaggactaattttgctccattactggcagtcccttgtagtgcccttcagagtattccacccagtgccctgtgtattacaaggttttgccactttggctgaagggaacactggttgagtgaattcccaaaattgttccacctgcccattttgaatggttcttttttggcctcagtttcttaacacatatacactgagaggtactctgctgaaaattctgtttttagctctgtcctcttcagtgcactgcccggcaaacttcagccgccttgtctttcctaaaaccttgattctcgctccttaattcaaggagaatgttggatccctgaattagactgagttctctctccctgtgctatagcctagaaactctctcaggcagtcataagactcacttcatttcctttttctcaggaatcctcatactatgctgatttcctgtttaatgtccaaagtctgaaaattgctgttctctattttatcattttgttttgttgtttcaggtaagagggtaaattcagtctcttttacttcatcttggctaggggtagaaactgggtgaatctttgattgtgtgtccccaagttgactgaggggaaagtagtgaagttggatcatttgaattatacttagtaattaaaactaatattgtaaattcagggaaagaatcatggttttattatgtctcttgatttcttcataatctctagcatggtattgagcacaggccttagcaagttgttaactgaaagttaggcgagacttatccatgatagtcccaccttcctccttccttatagaagtttcaagcgtatgttagttaattctttgaagtgttatcaattttattctgattttaagaaaccaggccttttgtatccctttagatacagctgagtctaagaggaagactctttcagactggctgatgaaccatctggctccagaagaggtttttgcttttcctgttagtatggttcttgagctaactggtcacattcttgctgggtgtggctggataaatagttctgttcagaggcttctttcctgtattccttccagaatacctttataccaagctaagtaatggggaagagaatcagagggatggtagtgctaatagtagttatattcaatatgttgcatgtatagaaaatgcatatagtttgccctatggtgaatattatcattatagtcctcagatcttcaacgtggcatggcacaattcttgctaaaggtagttaggttgtgctgaacctgtgagtactctaaagtgtcaaggagaagtcttttaaattgtaactcttggcttctcctgtgggaaggtagtgatttgaaaatggtgaattgatttgctgcttatatagcaacttaaaactggatttagagggaaagtaatgtccactttcctaaattccagcacaagttaggaataatccattagtatcaccttatgtttttccattatttatttttaaattcgtgacatagctagaaataagtgatttgtacaggtaagcactcagaaatgactataaagagtgatcagatgatgtcagttgggaaaggagagttgtgttgaaaacccttcgatttttgcttggtatggttaaggatttgaggttaagtggctatgcaagtgcagactaactcttggcatatttatttctaattacaaactacttttgagttgggcttaatgaatgtaatttagagatgttattggttcattgataagcttctgctatgtagtccctgtatgctgtgaagcaaaacactataggaaatgggctaatcaaactagttttatttttttctgctgcttaagttggtagtctgagtctccatagcttgtcttcagacaatgaattgtacatcaaatactctgttactatcatgctttcaaaataatgctttattacagtatgtctttgttaatagtaacttaaaaattgaaatctttagaagaaactaactgcgcagcataaacattcaaactaaaatcttgctgcaaacctgaatttttatagtgtattcagtagagttgtaaattctgccctatttttgttctaagactttgatgattagggctatctgcgtctttcagtttctaaggtgtgatgtaaaaggacattatcgtaagttttcagtgataaaaaatatactattttaaatataggcaggaatattagagctttgagtgaaattgaattactggattaaaatcaataaaatccttcttcaaccttgcatttgattaacttgttcaaattttgtccatgacaaactgaaactggctcaggagtgaggtttgacactaagattcttgaactatatttagatttgatctgtatttaagattcttgatttatattctgtatttgggtgttaagaaagtgcctccaattgccagtatttttatttcaacacagtcttattgcttttcaacacacccacctcttattaactgttggatgttcccagaatgttatacacctctggcagaaaaactcagttgtttcctctatagaaaggctgattagaaagactggcttaacatgattttaatgtattttaatagatagtttctgcatttttaaaaataaaatagaagaaaacattcatcattgtcttctaggacataaatttcttattttccttcctactttgaaggttaaaacaaaaaagcaaacaaagttgtgtgatgatattttagtgtcttgaaatggatttctcagccattaaaataagggatatgtatgacttttgcacctcacctgggatttgtcagtgatactctctgacttgatatgtaccttttcaggtttgtcttatagataagatgccatcgtgtgccctttttcttttaccctaggttggaactttgtgtttaattagtaagccatcatgacctctgaaccttcatttagacaataactaacagttatggagtacttactgtgtgtttataagtgttttatgtgtatagtttcatttaatgtaaatgatacttgtttttgctttcttcagagaattgctgtgaagttaaatgatgttcaaatgagataatgaatgtttgtacaaacactgtagttataaattgttattaataatgacaataatatctaactactttctctttgccattgttgtctttaaggtttaatatagtctacagcctacattttttggtgctgtagtttttcccagtgcctcatctcataggatgacacttgtctgataagtcctcagataaatcacatgatgttacatgagttatagatttgacattcagattagctttttattctttccttccctaggaagaagtaataatcactggcaattcatattgttatttgcctccttaaagtagaaatctatttgttttcatataaattctagaaaagctatggctttttgatgttactggactctcttcactctttcctattaatacctgtgaaattgacaatttaaagatagatttataaaatgcaaattaaatttaaattgtgatggagtttttgcatgtgtatatgtatgtgtttatgtgcgtatacatatataaaataactctttggcctctaaatttttaaaggattaatgatagtcaaattaatgaaagaagaaagaacctaagcctatttctccattttagaaaaagttttgtgtgatagttgctttattatattgtcagttttcccatggtgattcattgtcatatctcaaatagaggaatatgttctgtatcctttatttaaattaggaaagttcagtttttcttacctttttcactcaaatacagaacagtataggctgtacattaatatttattgccaagattttgaggatgactttagaaaagacaaaattcttgaatcttacacagcttcaaacactattaactcaggtaaatagttacttgccattctacaatcagaaattttggtagactgaaatggtggactatgagaggtaaactgtgttgtgatcacctcttttatcatatatattgctgctactttttttcaggaattatagcattattcttaagtacaggtcagccttactgttgaatttaacatgtagctgttgtgtacaatttgaagagtagagcagtgatttcatttgcgtattataatgttttatgtttatggatatctttaaaatttttcctaattagcagtgaaaacattttgaaagaaatgctggatttgttggaagctcagcttgcattttagctatacctttaaaactttaaaaaattcatttcttaatgactttaccaatctagaattgagaaagacagaatggagaaacaacatgaaccttttacatttcacctaaccttcctctatccccacatgaagcgtaataccccataggtggaaactgtcttaaattttattttgtttccaaaaacttaagcatacgttagtctgggcttttgggagttatcttgtagaataagattattaaaggaccttaccattttctaagtagattttatcctaaatttataattgcattggaaaagtgggctttttaaaaaaatttaaccaatgtcatatgacaccatcctcccctattcctcccaccctgagttaccagtttaatttgaaaactttgaatttcccacatatccaagtatgcaagattttgcattgtcctcacataaatgaacaaatcttcaaagcacgaaaagttgagtatttgttttatgtgctcttcatctaggtgcttgtagtaatgttggcacttacaggagaaattaagagatgaggcagagaggtgaagaaaggagtctttaaaataagtgattaaattttgggcatttatagtatgttgtgtgagtactttttgaaaatgactagttagtgggggaaagtaacatttctacctttaaaaagaatgttctttgaaatgagaagtagttttaaaagttacttaaataagaatggtaggttattttagttacaatctcacaaaaatgatgttgtagtatgtgacgtgaaatatagtaggttttgagagttttgactatgtacatgacgttgaatgtagtcaaaagttggcaatgtaatttttaaattgaattgtattatacattatttcacatttattattcagtttaattctaccttgtcctgaaaaagagttgaagagatacacagatgtgtttgtgtaatgcggaatgggtaaaaaggcaaatgaggtaggaaaataagtcaaagtaaagtatttgtatggatattaaataacttattttaattttgtagcccattttttttgttttgtttttgtgggtagtgaggtattaaagtaccaaaaagatctctatatgtaacccttacttcagattctgaggtaatttggagtgatagcatttttgcagccttttatttaaggagccaggaaagcagatttcatacttgcattttggtcacagaataaaagtgaaagttttattaaataataacaaggatagtttgggaagatgaggcatctagtgataagaattgagttaggattttgtgccgtacatgatttatgataaagcttttcttactatgatactaaaggctttgattgtaagttcaagtagttttcaatgcagaatccatcagtgtggaaccttatataatgattgttgagcacattttgacataatttaacatcatgttattgcttatttagaaaaaaatgcttaataccagtaatctttttatttcttctatcaagtatattttgtttctgagaggattaaaaataacacggtgcattgaagtgatatttcttggtggtttttaatttaagaaaatctgataaagtagtttataacttttctttcttctttttgtagagacaaggtcttgctttcttgcctaagctggtcttgaactcctgccctttaatgatcctcccatcttagcctcccaaagtgttgggattacaagcatgagccactgtgcacagctagatagctaagagaaatatggattaagttgagtattataagttatggttttcaaatatgatttaaaataaatattgttagactaacattaagggctaaagtgaaattaccaaagcacgtattaaagacaaatttggggcgatatcacatgttctcacatatgtgagagctaaaaaaatttgatcacatgagagtagagagtaaaaagataagagactgggaaaggtgagtgttggggagaatgaagagaagtgggttaaagggtacaaacatgcagacagacggaataaatttaatgttataattctcctggttgttcatgatataccatgtaccatttcatataattcatgtaatataccctcttattttataggcaaagcaacagcagcctaagtcttgctgggggataaaaatatttctgaataaataaagtgatacataaatcatataactttgattttaggctagggtcatgatcaaatacattgatttgttatttgtaaaattaaaattactgatttaataaatagtggtacctgtctttttctctgtctgtattagaacagcattagtaataggaagcaagcaggatagtcactaaaagcacatgcagtgtcagaaataagaagtgggatctcttttcaaggggaggagacagaagaaggcaggagaagtacagcaatccaggttaggttattgtggtaaacctgtctttctcagaagcttctgagcacaattctgaagaaggtaacataattataatgtgctcgtaaaataatggggcaaaaaaatattcttcaaagtagttaccttgaggaagttatacattagaaaatataattgctaaaatattttgaaattctttatgaaattggtttcagaaccttttaaaactgcaagatcatttttgtagccatagattaaaattataattaaaatttttaaattgtaaaagtaattatagaatatttagagaacatgaaaagtaacgcttttttcacatactaataaaaccattgttctttgcaaagttttttcatatggattctttagataaaacttattttaatctactcaggtgtagattttttggtgtttatccctcttgagttctttgagcttcatggatctgtagtttggtgtctgtcagttttggagaattaaccaccattattcacatatttcttctgtttcttttctcctgatattctcattatccatagttacaccttttgtaattgtccaacagttcttaaatattctgttactttttaaaaaaattctttttgcctttcagtttgggaagtttctatcaacgtatcttcaagttcactgattgttttctctgctgtgtctagtctgctgttgaatccgtcaaagcattcttcatttctgttactgatttttgttatttccatttcagtttgtcttagagtttccatgtctctgcctacagtgggcatcagtttttgaatgtcgtgtagttttttccattaaagcccttagcacattaattatagttactaaattctcacagtgatgattccaaaatctctgccatatatgagtctggttttgatgcccgcgttgtcttttcagactctgttttttgcctttagcatgccttgtaatttttttttttttttttgataagctggatgtgacataaggggtaaaaagaactgagataaacaggcctttagtgtggcctagaggcctatctggctaggagttaggctgtgtttactgtttgatgtagctttggtgtcagagattaaaatttcctctcgtgtaactgcttttgtctcctttgttgtctttgggtttccctaataactccttcataagtaggttccgaggcttgtagttatttaagctgtaagtccctgttattacacaggagccctattgatgtggtgtgtgtgtgtgtaaaagtgttctataatcttatgattagctcttagtgagcctgtgtctttggactgtgaccttcatgagtgctttttagctcctgcaacctttacctcccaatacttaagtgagaaagtaggaaggctgggaggcggctggagttttgtatttctcttcccacaagttggttagttggtggataacaaactggaatgtgaaacctcggatgaggggaggctactgtagtttcttttgaggacaggtctttgttattgagaacagagatcgctgggcaatttcagaatggttattttttctctcctattggaagctagagggaatttttctttgatcttcacttgtgaatctctgatggggcacctggaggtaaaactcaggaaagtttcctctgtctctcccccagccagactgcccatcccctgagcttttaattctcaagctagtccacgttgaacctccagcaatttacattacagtgttcctatggatactggctccagctgtttgtttctcttgctggggtttgtgatacccgtagctgtggttttctgtagtcacatctctctccagttttgggagcagcagtttgccctgaacctcaattctctattgggtctaagaagagttaactgattttcggccgggcacggtggctcacgccagtaatcccagcactttgggaggccgaggtgggcggatcaccaggtcaggagatccagaatatcctggctaacatggtgaaacactgtctctactaaaaatacaaaaaaattagctgggcgtggtggcgggcacctgtattcccagctacttgggagacagagccaggagaatggcgtgaacctgggaggcggagcttgcagtgagccgagatcctgccactgcattcctgcctgggcgacaaagccagactccatcccaaaaaaaaaaaaaaaaaaaaaaaaagagttactgattttcagtttgttcggctttctggttgtgaggatgggagtgatgacttccaagctctgtccacatcagaccagaaatccttaatgatatttccttttctgtacctttttgactgtttcgttctttagtctatctggaatttagctgtgtagggatgcagggaataggatatgtgtctagaccttctgattatgctactttgtctaatagttcttgtgttaggattatactattttaaatttttatagcattaaattctttagtatctggtagggctaatcttgctttactttcctatttattgttgcatatgaacctcagaattgttaagtcattaaaaaaaagaagtagaattataaatagaactgcttaaaattagtaatataattagaatgatagtgttatgatgtttggacttctctggaaatttatttctctttgttgactcagatcttcttttatgttttggaggttttgtaattttctttttctcctttttttttttttttttttttttttgagatagaggcttgctctgttgcccaggctagtgtgcagtggcacaatctcggctcactgcaaccactgtctccagggtgtaagtgattctcgtgtctcagcctcttgagtagctgagattccaggcgtgcaccaccactcccagcttattttttatatgtttagtagagatggggttttgccgtgttgaccaggctagtctcaaactcctggcctcaagtgatctgcgcacctcggcctcctaaagtgctggaattacaggcgtgagccaccacacatggcctcataattttctttgtctcatttacagaagtttcttgtgaggtgtattttctgcatttttaaagcctttttattttgaaataatctttaattcacatgaaagttgcgcagatagtacagaattcatgtgtatccttcacccagttttccccatcatgacagcttatgaaaccgtaatacaattatcaaacacaggaaatcgatggtggtatgatactattaattaaactatagaccttatttagattttaccagtttttacctgtactttttttgtcatatgtatagttttgctattattattgcaatggctttctactacatttctctctgtctctttgcctccttccctgccttctgaagagtaaaaatggtgttaattttcagaagctgctttgctaatagattttaaattctgagtttttagttgctttcattgaatgttttttaaatttttaaattatttttaaattttttctcttcttttcaaaggtactgatcattgaatttttagggatgtaattttctcatttgctaaaaatgttatttttgtttctataacatgtcattgcattggctaggctagatttccaaattatactttttgtgcctaatttttgtataatagtcctcgagtttccctttaagagaaaaattagctactgtgtacattattagttgatttctctaatatctgacattaaaattaatcattgatatgcaatgaatgctttaccaagtttcaggagttataatcatttcaaataaatcatgtaatttaacccttacaacctcctaagataggtgtcaatattattcctgtttacaggtgagtaaattcagttgggttaaatgatttatttgttcaaggtcacatagtttaggtaagaagctcaaacctgagttttaggtttcttactcattttgcatttaaccgttcttttatattctcttctattgcaatagaaaagatcaattgtaaactattcagatgaatttcattctacagcatacgtttattccatggaactggcattccagaatggagtgaattagggcatggtggctcaggcctgtaatcccagcactttgggaggctgaggtgggcggatcacgtgaggtcaggagcttgagaccagcctggccaacatggtgaaaccccgtctctactaaaaaaaaaaaaaaaaaaaaaattagccgggcatggtgttgcatgcctgtagtcccagctacttggtaggctgaggcaggacaatcgcttgaacccgggaggtggaggttgcagtaagctgagatcacgctactgcactccagcctgggcaacagagcaagactctgtctccaaaaaaaaacaaaaagaatggagtgaattaatttcataaagaaaattcaggttaaacactatttgcaaactgatattcccgaatttaaatagacttatcaaaattgtatgtttatattttaaaggatcaaaatactgagcctgcaccttcctccctccttccttccagaggtattaattaagtatagcccctattgagaacctaaatatgtcaaaatttacctaggtggatatggaattaagtgtgggaatacaaggaaattaatattttatatttaaatatgaaggacaatgtatagttagctttttgaagaacatcaaatattaacttttctatcatgcaagttgtatgcattctttcttatttgtgataactttaagatgatgtcaaagtttcactgtgacttaagagtgagtaaattataaaacagtagaatcatttatttgaaagaggccttggttttactcagcttccttcccattgtgggaatgccttcctctcctacattttttcagcatcttatttgggagaaaaggtttaattttttattcctagctgcagtctttaacagttttcttaaaatatttattcttttcagattgcctttccttctaccttatatatatataaaatccctttctaatctgagctaatcagtctttttttttcttttttttctggtagctatattgatttctttaggtacctttatcttctgcattggcattcgttggtaccttctcttccacctgtcctactcttatttcagtaatttagatgaggtaaaatttgtaaaaatcacacttgcgcttacagatcttaactatataataaaactttaaaaatgcattatatttttgtcattgccctttattacatgtgtactcagacaataatcattgtctgatatttaactagagcatgtgtttagcatgaatacctagcactgttctattactgtaacattcatattctgaaatcctctggaaggaaacagtaagattatatgttgatttcttcttatttaaggaaagattcattggttgaacatggttttatgttttgtgtttggagatggactgtatttagagacatctctttttcccccagaagttctgttttaaattaatgagaaattgggtgaacttattttcttgctgaggtacacagcttgaagttttggaagtaaagtatacatagtcttttctatatgggaatggtggaattttctagacttgattaaagtactgttgtttaattttttaatgagaaccttctttcccaatacttacaatgtcagtactttcaattaagttgctgtgaataattcctcctgcccattttttcttcagctttttaatttttccaagttgagttttgaatttttgatctcttttgacagcctttttttctttttggctaggactctctacataacttttttgatagttatggaaaacagtgggatagatgttcagatgttataacttctcttttttggctgggatggggtggatgagtaaaaagaaaaaatcaataagtcagtgaatgttggcaggtgttcagagattttttctgtgtgtcattcaccgtggcacagttaagtaactgcttatgattaagtttttcacagtctcagaaaataaggagtttcaaataataatgtgggtaactgattagtatccaactagtagtggtgttggatggattaattgattcttagagagtctaggaaatgtcagaacagtatacattcaaactgctattacgacaaagtaaaagttaccttgaaaaataagtaattcaactggtagaagaaactttaagggacagactagatttggttttctatatggtctttcattctgaatactaattagtacttgaacatatataaagctcaagtgttgttttttttagaaatacagttgtgaagtggttatgcaaataaattcaatttaaatttcttgtcatgtaaaatgtgtagaaggacttactgaggttactttcagtcttgtttttttctcagatagcgatgaaccattttcatcattattgtttggacttttattatatttaaggacaggagttaaatataagtcctgaagaaaaacaaatgtttcatatcacacttactttagagtaaagcttagttgtagctgtgtacaataatcagttgtaaaaaggtgtttccattcttccattgtccttttggcttatttctcttgtcttattcaatttgctgtggatttgtttttgtagtgggaaaattaatttgagctgaagtgtgtcaggattacttagcaaaaaattactgtttgttgtcccacaaaaaaagtagatactacttaaccttttttactccatgtcatggatgtacttatgttttcaccttgtggaatactgaatcaagtttacactcttaggatcttagaatagtggttttcgctcttggctacatgtaggaatcatgttggaagatttaaaaaatgctggtgcatgtgtcccacccttggaagattgattgattgccttagggtgtggcctgcgcctcagttcctatgtgcactaaggttaagagcctctagagactcatgcacaataacacgtgttaaaattggctcctaaaaattgtcatatagtcataagattaatatatcatgaatgtgtaaaatgatattcttgagtttgccatggtcttctaaaatgagcagtgttaataatactacacatattttgagaggagtttaccacatttggccaaaagaccaaaaagctcagcaattaactgcctaaagtaacaaagcaggtagagaaataatgttttcttagttagcctaataatgtatctttcaaggggatggataagattccagttaaactatttactgttagcaatatttttttgtaagctatttttgtaaatccacagtgtgccttctaggttttttttctcttactctcaaaactgaaataggcttggtacagtggctcatgcctataatgccagcattttgggaggccaaggtgggaggactgtgtgaggtcaggagttcaaaagttcaagaccagcctggacaacaaagtgagattccccgtctctacaaaaaattaaaaaattagccaggcatggtggtgtgtgcctatagacccagttactcaggagactgaggtgagaagataatttgagtccaggaggtaaagtctgcagtgagctatggtctcgccactgcattccagcctgggcaacagagcaagtccctattaaaaaagaaaaacagaaacctgaaacagatgatcaaagttgcatgtataaacgttattaaaaaagattcatcatttgaatatttagttactatttactaaagctgcatgtttaagagtttctttaggtgacttcacatatattattgtcatattcattaggctatggtaggaagtccagttagatttaaactgatacttgttctactcagaataatttatgtcacctgaagagaggctgatggctatattcttatttcagcatatttggatatgggaaaattaattaaactaaaattctcatatgactttggaaatgactattgaaaacacactggcgactgggcacagtggcttacacctgtaatcctagctagccctttgggaggctggggcagtaggattgcttaggcaaggagttcaagaccagcctgggcaacatagcaagaccccatctctacaaaatatacaaaaatttaccatgtgtggtggcatgtgcttgtggtcccagctacttgaggggctgaggtgtcaggatcacttgagcctgggaggtgcagtcgggtgagatggtgccactgcactccagcatgggtgacagaacaagaccctgtctcaaaaaaagaaaaaacacattgggaagtagaaaagctactcatgagccatctaagtgacatgtagtccaaacatctgtaatatgctgtagaactggaacaaaatgatattaaggataattttagaagcatcttcgtgaatagttactgatgtaggccagttcttggcaaaattatgtcattggtttgtatttggtccttgcctgttttctggagaccctcctactctgtccctagtgctgtgacactttccctttcattcttctctgaagtatctggatttgtcttcctataaattatataatattcctcattttttctcctcctttgaccaaaatcttttcttagccatggagtttttattcttggggaggggctgccaggttgagagacaaagcaattataccattttctccccaattatttacttaaccataaatctgtgtacctactacttggctttattaaatattaatgtacatctacatttataaaaaaaaaattacagccgggcaccgtggctcacacctgtaatcccagcactttgggaggctgaggcgggtggatcagttgaggtcaggagttgaagaccagcctggccaacatggtgaaaccctgtctctactgaaaatacaaaaaaattagccgggcattgtggcgggtgtctgtaatcccagctactcaggaggctaaggcaggagagtgggcttgaacccgggagacggaggttgcagtgagccgagattgcaccactgcactccagcctgggcaacagagcaagaatccatctcaaaaaaacaaaacaaaaaaactacagctatatcaaagcccctggtacctgctactgaacctgttttcctctgttctgctcacaggtaactgccaagtagagtttatctttttcagaaacattttcagaaaccaagtcaatcttttaagtaataaatcaaaatgagtgaaatttaggagggaaatgtttatgagcagaagcttaatactgtacttagaggttataaatagttgataaaaccagttctgcatctggattgttttcatccttctgtgtttgactattcagagctaattgtttaaagactttcctaataaaaatttgaaaatgcttgcaaacctaggctataaggagacacaaaggattaattctactttgttaaaatctactaatgtgtgttgaaatgtgattatggcttgtcgacaaggaaccattggatgaacagaattcagtgtttatagaactagattgttggcaggcacacttaactactgccagcatcactcaaaccagccaactctttcatctttagtaaatactttgtcaaataagttatcagtctctttaaaatttagataatgaatagaattcatttagatgttagttaacagtgcagttaaaataggctatcttagattatctttgttcttctgttctatttggtttagattaaaagtgctaaaggaatgctgaagagggtggaacaacagcataaacatttttgagagggtggaatagagaacataaacatttttggagttctaaatctaaataaaattatttcagaaataatgaaaatattttgtattatttctgaggaaaatcagctttttggggggtactttttctgcagcactgtttagctatttttggcaaatgaaaaaggtattggggtagagacagagatttcctatttgaagttgaggcaatgaataactcctttcccctactccaatctccttaagaagaaataagcttttcttcattgataaggtaaagttagttttatactgtttatttaaaacaccaccaccaccagcatctcaactcttcccccaaattagctttgtgtctgaactctactttagtcaatgattcctttatatttttatatctcttaggcttgaaaactaggagtcatccttgattttttttccccccttatctacaatcatcagactttctggctctgtctccttggggcttgctttaagctttacccttcataacaaacatgatatgttagtagtttctttcagctttaaaatattatgacctttaagatctaaaattaaatgttgaaatgtaaaatttaaaggcttattgaaagaatgttaataacttttaaaaaaagtattggtttaagattagattctcctaactaaaaggatcctaaaaattaagagtaagatatttagaactttgtactaagtgtaaagtcttagtattacaaataaatcattgggtatttattattatttaaatgtctgatactgagctttgcatcttattatggagaaaaactttggattccaattgaaacgagaagaaattattgttatatcttaaccagcgtctaggcaacttggacccttcagatactgacactgagagaacttaatcccaaaataaataaaaattttgaattaacattctttttagtccgggtgcagtgccccacgcctttaatcccagcactttggaggctgaggttgaggctggtggatcacttgagcctagaagtttgagaccagcctgggcaacatggcaaaacgttgtctctacaaaaagtacaaaaattagccaggtatggtggcaggcacctgtggttccagctatttgtgaagctgaagtgggaggatctgagccctgggagattgagagtacagtgagcactgattacaccactgcactccagcctaggcagaactagaccctatctcagaaaaaaaaaagaaaaaaaaaattctggccaggcagggtagctcacacctgtaatcccagcactttgggtggctgaggcaggtggattacctgagatcaggagtttgagaccagcctggccaacatggtgaaaccccatctctactaaaaatgcaaaaattagctgggcatggtggcgggtgcctgtaatctcagctacttgggaggctgaggcaggagaatcgcttgaacccaggaggtggaggtttgcagtgagccaagactgcgccattgcactctccctgggtaacgagtgaaactctgtctcaaaaaaaaaaaattcttttagaagtcaccttgaaacatttaatgttgtttatttccttcatggtgggtagggggtgataaattgcaaaaagagataatgtataggttggtcttatgcaaataccctaaaattaagaaaaaaattattcgatagtggaagttgtccaggagaattaataggaagcataaacagttttgaagacagggaacttctgagggtataacttttgaggtagagtgggtgataaatttgagtagataacttagaaaatgttaaatgccagaatgacataaacgttttttggcctagtgatttttaaaaattgacatgtttttcttttttatttttttgagacagtctcatactgttgcccaggctggagtgcagtggcgtgatcttgacttactgcaacctcccccttctgggttctaggagttctcatacctcagcctcccgagtagctggaattataggtgtgcaccaccatgcccggctcatttttgtatttttagtagagatggggtttcaccatgttgaccaggctggtctcgaactcctgacctcaagtgatccaccaccttggtctcccatagtgctgggattacaggcgtgagccactgtgccctgccaaaattgacatgcttttctgaatggtgtcttgctatttaggaaattttatttttaatggtaaaagcatatttgcttgaagaaaatgctgtggtgtgcctttttctctactaaactatccccgttcctaaatctgcatagaaccatgaaaaatattatttttaacttcctaggcctttttgcttatgttcattaagtcaactcaaattgtcatgaagcaactcctgggtatactagatactccgctgtttttaccccacttccattgtacgtttagcttcaaacataagattcattcctttggcctatttctaatttgcaacctgctgtattctactttctatgaaactagtgtgtattatctcttatatccctctaaattttcttgacggttaatagtatgtttccctttgatcaccaccagcaagcttcgggggtcagactgactctgaaagtagcagatatttgaagttctcttgaaggaacatgggattttattaaggattttaagaatggataggaatttgatgaggaaaattcatgcagagaggatggcatgatctaaggtgtgaaaatggagtgctcaacataagagatgtgatatggtagaaatatagaatattattgggatatagtaggggatatcattgggaagatggagaaaagatcatcgaaatgagtttctggtcgtttagtaatgtctgtcatttattgaatgcttactgcatatccaactgtgttaggctctttatgaaaaatctaatttaattatgacaacagttttgtgtggcagatattattctctgaagaaattgggatttagacagactaaataggttataagactcatggagctaataaattagatttgattccgcatctcttttaaaatatgctgccatcataagcctctttaattaatctgctttgcagtgatctctagattctattcaagaagaaatttgcgacaatcttgaacttgtacttatagactaggtgattactttaacagggaagaaccatgattatgaatatgccaggcatcggaagaacttcaaatataaatctactacaggaatatgaactgatggcctgaaaaagactgcatttattttggataacaaaataatttcttggccaggtgcagtggctcatgcctgtaatctcagcactttggaagggcgaggcaggtggatggattgagcccaggagtttgagaccaccctgggcagcatggcaaaacctggtctctataaaaataaaaataaaataacctttatccgaggctctttaaaacaaaattcaagtctccaaaacaaatactgaaagctgtatgttcaaagaggttttcatcgctctttctaagtcttaagtatttgacagtttaggtctgggcgaaataaacattgggttttactaataatatggttgcctattttggcaccttaaatttagaagttgatttttatgtgttaaaattttttttaatccaaacgtagcattgtttataccttaaaagaatgccagactgacgtatttttgttattattgtttagtttggtaggacaataatgttttccattgaactgcaacatttactgcaactggtagcatgtaaattaaagaattttagagttgaaaggatcttagtgattgtccagtgaagtcttcttgctgtacagataaggcaaatgaagcacttttgaattagatgaatgtggctccagttactcaattaatgctattctaggattagaactctttttaccaaactacactacttccagtgtttataagagggtatatgtagatcaccaccataacagtacatgattatgttactggttatgaggctggcttgcctgaagtaatggtcttagctgggtaagatatagatggtcgcataacagaatctcttaggattctttttacaaaatacatataccaacccctctttgaaatccgcttggctgaagagactgtcagtttaagagcatctttaatcagtaagcataggcccccctggcaacaaaaataggcaaaatattcttgtgctttggaaataggtgtctagaaaatatgtagcttagtaacctaattaatgcacatagcattgcagatgtgtaccataaagctatcctttccactgttcactaacaaaagacatttgactcagttaccatatatgttctgaaaaactattagtaaaaaacttagacttgtgagacctcttattttttcatattattatttttatggatgtacaaattctccttgtcaagaattgtgaagggtctgagattttattgcaggctaataaattagcctactacaggatagtaattatggataactgaaggtaaaaagacatgagtatcagcatgttttgcaccagtttcctgagctctagctaccatagaatgacatgaagtgggctggatgatatctgcacatgcatgggatgcagacaggaaccttaagttgagggagcccacatttttgctccagagggagacatactttctttatcttccaaggtttttgctaagtgaccacccttgaaaagatagtctgaagcaaagagcatgtttgcagcttgcaggacaggcagaaatgtgagagagcaatggagaattgtctcctaataggcattatattatattagaccaatgagaccattatttattctcaatgtaaatgaaatatgttcagaaattcttagtgtgttaggaatgtgacctctgtgcactttgtttttaattccagaaaaatatctgttgtttgcgtattacttgcccttgtttagtatagtaacatgaaagttaacttgctttagttttgatgaagggtgttctggttaattggattttatttttaaatatttaaattcctttatgccaaatggacataccctgttcctttgtcccttctcctttttttttttttttaaagtgaaaacatttatcctccatgttttaatttcagcaaatacttaacagtgtgcctatcataggccaaattctgaatgctagccaggtgtatagataagaaagattgtgcattcatttattcagagttattatatgctgggtgtgtttatatttatttaatcctctcaccaaatgtgtgccgtttgagggaaggagacacaaggtaggctaaatattagaatgatgttcctgggagagcaaatagtatgtgcaaagggtttggagaagatggtataggcagaaaagcacatcccaagaagaagagcaatatatatggaacattcagaagagagaaacaatgtaggttgtgagtacttcatgatactgatattaacctatttttaaaactgaacttccaaatttaaactgttggggttcttgcaaagtatactgtatcagggagtgaagtttggatttcatggatctctggttgtgcttaccatatatgaagctttccatgaagacttctcaaagctccagaaacaaaaaaaaaacaaaaaagacttctcaactcttctttgggagtgcagggggagaaacatctcactatatatcttttaggtttagaatgctacagtataagaagtatattttttgaggagactgcatatgagtttgctggggcttttttcattagttacgtttatttgtatagagactaggtcttgctatgttgctgaagcaggactgcagtggctgttcatgggcataatcatagtgtacagcaggctggaatttctgggctctagtaaacctcccacttcggcctgagtctagctgggcctacacgcctgtaccactgcgcctgccaagtttgctgtttaaagcatagcgttcattcatgtgtagttgttagtaatgaaattttcaaagtagatttatttaaccaggcctcttttacttaatgaccagaattgtggtttgtttttcacctgaaaaattgatcacttcttccagtcacaatatggtctatattcttaagctgtccagtgacattagaaattaatgtgccatttatttttaattagaatagtaaaggtgttgctacattcaaaaaatagtctaacaattagaagtttccattaactattggttccctctaacttaacggttttaggatctgttattaaaatttttagcacataaaaatgtagattacattaacattttaagtggcccttgtttttctaaatgtactttgttcaagagagctctgctataattaattacaagggtgatttcattatgaaaaatttcttaaaaaggtttgtttagagtcatagcaaggcttaaatgagagtctgtgtaaggtacctgttataaaatttggcctacagaaagttctcaaagtaatagttactacttcttttaccgtattattattttaaaaagctgattaagtttctgttacatgtatttgcatttaggtaggaaactttccttaaaaaatgataaaaaatttattttattttgtttatttattttaagatggagtcttgctctttcgctcaggccggagtgcaatgctgtgatctcagctcactacaacctctgcctcctgggttcaagtgattctctcacctcagcctcccgaatagatgggattacaggcacataccaccatgtccgtctaatttttgtatttttagtagaggcagggtttcgccatgttggccaggctggtctcaaactcctgacctcaagtgatctgccggccttggcgtcccaaagtgctgagattacaggtgtgagccaccatgctcacccaagaatcttcactttaaattttttatattttttggccatacatctctacagaaatagaggcttaagcaggagaatcacttgagcccaaaaggcagaggttgcagtgagctgagatagagccactgcactccaccctgggtgacagagcgagactgcatctcagaaaagagaaaaaaagattctctaagcttaccctgtccgatacagtagctactagctgtatgtggttgtttaaagtaaattaaaaattctgctctttggttctattaaccacgtttcaagtgctcaaatagccatgtgtggctagtggttcctgtcgatggtgcagaacattttcatctttccagaaacttacattggacactgttgttctaagctatgttttcagttttacccccaataattagactcctattatcataacattttaaatagaataccatataaaaaggtagtgagatgcagttgtgcttttcaggagatgcaaaatctacttcatttaacctccccatggccttcagaacacagggcttttaggaccctagttggccatttgttctttgttttaaacaactaataaatgtagaaggaattatagaaaatccataaatagaaaaagcactatagaaacatttgattaagataagatgctgaaaccatttggtgaaagattgttgggattggattcggagaaatctgaccagtttaacttaatgctctaacttaacatcaacattatgggacaaactgacgttacgtattccttgatatggtgcgctgagaagagtacaacttcacctgtttggtacttaatgccatttttttctttttgccagaacttgttgaagaaataataaggcagttctaaataggaaatcttcatgtcttggacccttcaaaaatgctagtagttggtatcatgaaagactagatagatacatgggtagatagataggtaggtaggtaggtaggtagatagacagacagacagacagaaagttaaaggcgagacatggaaattaactgtgttgtgcagtggatcctgcattgggtcttggactggaggacaaaacagatctaaaggacattattagggtgactggagaaattgtagaatggatttgaatggtgtaatatgaatattaaattttctgagtgataatttattctgattacataggaaaatactcttcttcttaatggggtacatgttgacatatttaggagtgaaatgtcatgatgctgcaagtaacattcaaattgttaaccaaagaaaaattgtgtctgtgcaagtatgtgtaaagagagaaaggaaatgtggcaaaatgttaacaattggtcagagactgaataatttagatgaagaaggaagaatgtacttcattgtatttttttacggccttttagtaggtttgaagttttcagcataaaaagtgggtaaaagaaatgacctctttatgctgtctgcttagcagacagttccaggaaaagcccctccctctttccggctacatgattgcaatagaatggatctgtcaagtttctacagtcctttccagagaaattgatgtggagctgaacctctgatagagtgttcagttggattagtaggaaagcaggcatttaaggcaaggaaacacataagtaatacatcttagtagtttgtaagtttcaatatttgtttcagccagaatttattagcagtacatgcttcagatttattctttccttttaatggcaaattgggaatgcatatgaaaaacatttacatatcagttctctaggagcactctccctcatcccccaccatgcatagtctcaatgtcttaaagctaggcaactgtaggtagactcaattggagactgcctgtttctgccttcttaacattctggtgaccacctggattcagatatttgttataaaaacaggcgtatctcagaaatattatgggttcaattccagagcaccgaaataaggcaaatagtgcaataaagcaagtgacacgaatattttgacttctcagtgcatgtaaaagttatgtttacactatgctgtagtctattaagtgtgcagtagcattatgtctaaagaaacaatgcacatatctaaattaaaatgtactttattgctaaaaaaaatgctaacaatcatctgagtctttagtgagttataaattttttgctgataggaggaccttgtgttgatttaaatgactgctgactaatcagagtggtggctggaggtgggggtgactgtggcaatttcttcaaataagacaacagtgaggtttagatttctctgtagcacggagtgctgtttgatagcattttacccacagtagaaattccttcaaaattggagtcaatctcaaaccctgatgctgctttatcaactatgtttatgggatattctatgtcctttgttgtcatttcagcatgttcacagcatcttcaccaggcatagatttcatctcaaaccattttctttgctcgtccctaagaagcaactcctcatttgttcaagttttgtcatgaaattgcaggaattcagtcacattttcagtccccgcttctaactctagttctgttgctaatcccagcacgtgtagtgacttcctccattggagtcttgaaccccacaaagtcattcatgagagttagaattcttccaaacttaatattgatattttgaaatccttccatgaatcatgaatgttctgaatggcatctagaatgatgaatcctttctagaacgttttcagtttactttgcccagatagaggaatcactgtccgtggcagctatagccttacaaaatgtttttcttaaataataaatactttttttgagatagaatctcgctgtgttgcccaggctggagtcctgtggtgtgatctcggctcactgcagcctttgcctcctgggctcaagtgattctcctgcctcagtctcctgagtagctgggattacaggcacgtaccaccacgcccggcaaatttttatgtttttagtagagatggggtttcaccatgttggccaggctggtcttgaactcctggtctcaagtgatctgcctgccctggtctcccaaactgctgggataacaggcatgagccagcatgcccagccaaataataaaacttgaaagtcaaaattactctctgatgcatgggttgcagaataaatgttgtgttagcagttatgaaaacaactttaatctcattgtattctccatcagagttattgggtaactaggtgtgttgtcaatgagcagtaacattttgagaggaatcttttttcctgagcaataggtctcaacagtgggcttaaaatattcagtaaaccgggtggtaaactgaggtgctatcagctagctagtctttgttgtcccatttatagatcacaggcagagtcgatttagcataattcttaaaggccctaggaattttcatatggtaaatgagcattggcttcaacttaaagtcactagctttctttagttcctggtagagtcagcttgttcttcgaaggcaggcattgacttctctatagctatgaaagtcctagatgccatcttcttccagtacaatgctgtttcatctacatggaaaatctatagtttattgtagccaccttcatcaggtatcctagctagacggggataacttcctacagcttctgcatctgcacttgttgctttaccttgcacttttatattatgaagatggcatgattctttaaacctgtactagcttcatactttacttctgcagcttcctcacttctctcagccttcttggaattgaagagagttaagcatttgctctggggtaggctttgacttaagggaatgttgtggccagtttgatctatcaaggtcacttaaactttctccatttcagcgataaggcagtttcgttttcttatcatggtgtgttcactggagtggcacttttaatttccttcaagaactcttcctttgcattctcaacttgactctttggcacaagagtcctagctttcagcctgtcttggctttcagcatgcctttgatttaaagtgagtgatgagggagtaatggctcatgcctgtaatcccagcactttgggaagccaaggcaggcagcggatcacttgaggtcaggagtttgtgaccagcctggccaacatggtgaaaccctgtctctactaaaaatacaaaaattagctgggcatggtggtgggtgcctgtaatccagctactcaggtggctgaggcaggagaatcgcttgaacctgggagatggaggttgcagtgagctgagattgcaccactgcactccatcctgggtgacagagtgagactcccgtctcaaaaaataaaaaaatttaaaaataaagtgaatgacatgggactcttcctttcacttgagcacttagaggccattataagggttattattaggcctaatttcaatattgttgtatacccaggaatagggaagcctgagcagaggggggaaaatggggaatggctggtctgcggaacagtcagaaaacacacaacttgtattaagttcactgttttatgtgggcatggtttgtgacgccccaaaacaattgcaatagtaataacaaacatcactgttttttttaaaaaaaaaaaaaaaaaaaaaaaaaaaaaggccgggcttggtggctcacgcctctaatcccagcactttgggaggtcgaggcgggcaggtcacgaggtcaggagtttgagaccagcctggccaacatggtaaaacccagtctctctaaaaatacaaaaatcagcctggcgtggtggcacacacctgtagtcctagctacttgggaggctgaggcaggagaatcacttgaacccgggaggcagaggttgcagtgagccaagatcgtgccattgcactccagcctgggtgacagagcaagactctgtctccaaaaaaaaaggcagtatctgtgaagtgcattgacgtgaagtgcaataaaatctgtctgtaatatttggtttaggttcttgaattaagatttatgataaaaaaagacgttgatttgagaataacttatccatgctcaatatgaacacattgtaataggcttaccaaattgtttaattatacattgttcaactaattataaatatcctgtataggatcagtaaccagtgtgaattttatttgaaccattaatgcctttcctctgggaaattgttgataatgattcattggttagaattggctaagtcaaagcaccagtctgttttgttccactttcttctcatgtatgttacagggcattttcaggtttcttctgaatctcagtggggaaaaataggatcagtataaaatatatattcaatgagaaaagagtcaagttttttagcatcaggacaaaatatatatcagaatagaaaggccagatgataggaacattagagtacatatgctatctcaagagtctgaaatccacttgagcccaggagtttgagaccagcctatgcaacatagtgagacatcatctctacaaaaaatagaaaaaattagccaggtgtggtggctcatccctgtagtcccagctactcaggaggctgaggtgggcgaatcacttgaactggggagatcgaggctgcagtgagccgtgatcgtgaggtgaaattttttatttatctagagtgaaatgtacaaatcttaagtgtacagcttgataaatttgagctatgaatttggttctgcatttctgtgtctaaagacaaaaataatttcttagaggagattaaacttttcttagtgcttatttctgaaataaaatttttgaatgagacctcaatatagggaatattgagtcatgtagtgtaggagtccccaaccctggggccactgactgggccgcacgtgaggtgcaggccagcattagcacctggcagtggcattagattctcatgggaacgtgaactctattgtgaattgcgcttgcgaggagggatctaggtggtgctccttaagaaaatctaatcccaggtggaacagtttttatcccgaaaccattcccgcccaccccctgtggaaaaattgtcttccacaaaacccgtccctcttgccaaaaaggtttttacagtataccaagtgaaatctcaggtcatgaagctgaggtgcaatttttaatgggagtgaagggtggggagctaaataaataatcttcatccaaaaataaaacctagagtatataaagaaattggacactttttggcttcttttggttttcttgtaattgaaataaaaacaaaaacaaaaaaatggccagtgcagtggcttacacctgtagtcccagcactttgggaggccaaggtgggcggattgcctgagtccaggagtttgggaccagcctaggcaacatagcaaaaccccctctctaccaaaaatacaataaattatacgtgcatgggtggtgcacgcctgtggccccagcaactcaggaagctgaggtgggaggatcactggagtcctggaggggtggaggttgaactgagctgtgatcctgccactgtactccagcctgggttgcagagtgagacctgtttcaaaaaagataaaataaaaaaaggagaaatagttgatctgcatattctgtaaataaaatagctaaatagctgtctcttcatacatatatgtgtgtatatatacataagtgaatatatgcacacatgtgtaatttctttgaacatatttgttaagaattaggcatggaaaggacttcagcaacaattttttggggttatttactggggtggatctgctgctttaaggaataagtaagcaagtgataatattgactccttttctgaaaattccagattaaaaaaagatttccttttgattccaagattgtcccacattcagaggaaagagtaatagagaacctgcaggcaaagccaggatttttctgaaggaacaattctgtgtttgattcagtgcctgaaaaggaatcagttaagtcctcaaagttctttaaaacagagcatggcctagatccttttagctggaaagatagcttaaaacaaatgtttccacttggtcactatggctgtagaaaaataacagtactgctcccatgaaaatctgattttcagcagtgtgaacctgcccagaaggaactgatggtgagaggtactttttttcttctataaattctttgtgatgcctaccctaaatcactttctgtgatctgacttttttggctctcctaccttgattttatgttattagaaaacctgtagcttagttaggggaggattgacttctttataggttgccaccaagaatacttttcaccagaaaaaatatattaccctatggtgctcgatgcatctctgttgtaacttaccctgcatttagagaggtttatacttctacatggttttctctttacactttgagtaacatgttcttgctagttgaatttaaggagttagtagcatatattcagtaattgcaaaacagaccttctttcctcacccctgaatctttggacagtaaaaatacattatataacattgaaatcattcacaatttagtggtttgaaattccagatggtaatgccatgaaaagacctgtcatattttgtaccttatattatgaagagggttatattaatcacaattagcaagtgagttgtgggcttcaagttgtcaagtgaatttttaggtaatgaacaagtttctagacatttatagtctaagtttcaggacatttatagtctaagtttcttgaataaattttgtcattttaaagagcaaggataaatgattgaaaaagaatttctgaatttaaatttttacatgaattatttaatttgacaatttaattcttacatgggtaagtaatgttaatcatcccattttacagaggaagaaacatgactctcataggacaaatggcccatcacatgtttagcaagtgatggaaaccagatttaaactccagcagtcttatgcttaaccactttgctgtgattctcaaaatgtgtagaataaacacaattgcaacatgtgatgtctcagctctctcctaagactgaattgctaaggtctctgctcttttattttacttctctttttacttcctaatccccagtttttgcttgttttaataataaaatctagaggaaatagaactgctacagttaaatatacttggattgaaagaccagatcttttatttattcatagctacatgacaagttacttcatttgagctcacttaaaaaaaaatgtaataatgtactaataagggagttaaaaacataatgttttgttgtgaatagtacacaggtataatttttaaagtattgaaatcattacctggaagatattagaggtttttttagattttttttttttttttttgagatggagtttcattctagtcatccaggctggagtgcaatggtgtgctctcagctcactgcaaactctgcctcccgggttcaacgtttctcctgcctagcctcctgagtagctgggattacaggcatgcatcaccacatccagctgatttttgtatttttagtaaagacggggtttcaccatgttggccaggctgttctcgaactcctgaccacggtgatccacccgcctcggcctcccaaagtgctgggattacaggcatgagccatcacacccagctaaggggtttatatataggtagctacagttgacccttcaacaatgagaggatcaggggcatcagcgcctctgctgcacagtgggaaatccacatgtaacttttgactttctaaaaaacttaactactgatagcctactgttgactggaagactcaccgataacattaacagccacttaacacaaattttgtgtgtatgttatgtgtattctgtactgtattgttacaataaagtagctagagaaaaggttattaagaaaatcacaaggaatagaaaatgtattcctgtttattaaatgggagtgaatcatcataaaggtcttcatccttgctgtgttcacattgaataggttgaggaggaagaggaggagttggtcttgctgtctcaggagtggcaaaggtggaagaaaattcttgtgtaagtggacctgtgcagttcaaacccatgttgttcaagggtcaactacagtgttattttgtaattaacattatgcatattattacctacatttctactttaaaagctaaatgttttattttaaaaaatctccctgattctactatgcatttaaggaagaaattataccagttctctacagtctcttccagaaaatagaaacagggggaatacttcttaactcagcattactcttaataccaaagagtacctaataccgaagaccatacaagaaaggaaaactaaactacagaccaaaatcttttgtgaatataaatgtaaaaatcctcaaccgaatattagcaaatcaaatccaaaaatgtataaaaagaattacatactatagctaagtgggatttattccaggtatgcaaggctggttcaacatgtggaaatcaattcatgtaatcgatcacatccacagtctaaataagaaaaatcatatggtcatatcagtagatgcagaaaaagcatttgataaaatccaacatccattcttgattaaaatctctcaggaaactaggaatgggggaaaattcctcaacttgataaagaaaatctacaaaaaacttacagctaacatcatatttactaatgagaacatagatccttttctattatgattagggaaaaggcaaatatgtcccctctcactactcttcagcatcatcctggaagtcctggttaatgcaataagacaggaaaagaaaataaaaggtataccgattgagaaggaagaaataaaacttaattcacaaatgacatgttggtatatgtagaaagtcccaacaaatcacaagtgctctggaactaataagtgattatagcaggttgggtgcagtggctcacgcctgtaatcccagcactttgggaggcagaggtgggcggattgcctgaggtcaggagtttaagaccagcctggctaacatggtgaaaccccgtctctactaaaaatacaaaaatcagctgggcgtggtggtgcacgtctgtagtcccagctactcgggaggctgaggcaggagaatcgcttgaacctgggaggtggatgttgcagagagctgagatcacgccactgctctccagcctgggtgacagagcaagactttgtctccaaaaaaaataaaagactatagcagtgttgcaataccatttatattagcacaaaaaaattaaagtccttagatataaatcttgcaacataagtacagtacaagatctatatgaggaaaatgacaaaaataaaaaatcgaagatctaaataaacagatattccatgttcatgcttaggcagactcaatattgttaagatgtcaagttcttcccaacgtgatctatagattcagtgtaatttaattcagaatcgcagcaggttattttgtggctatcagcaaagttattctaaagtttatattggtcagagacctagactaggcaacacaatattataggagaacaaagtcagactgacactattgtacttaaagacttatgaagccacagtaatcaagacattgtggtattgttgaaagaataaatagatcattgaagcaaaatagcgcataggtagaccacgaatatagtaaattgatccttgacaaaggagcagagacaaggaaaaacggtaattttttccacaagtggcactggaataacaggatatctcattcccctccacgccaccaaaaaaaaaaaaaaaaagaatcttgacacagactttatacttttcacaaaaactacctcagagtgaattgtagcctttaatgttaagcacaaaaatgtaaaactcctagaagataataaaggagaaaatctggtgaccttaggtttggtgataactttttagacaaaacaccaaaagcatactccatgaaagaaagacgttgttaagttggacttcgttaaaataaaatatgtacgttttgtgaaagttactgtttagggactaaagagataagtcacagactgggagaaaatctttggaaaatacatacctgaaaaagaactggcatccaaaaatattcagagaacccttataactcaataataaatgaacaacacaattaaatggacaaaaaaatctgaacctccttggagaagatatacagatggcaagcaagcatttcaaaagatgtttccacatatcattagagaacatgcaaatttaaaccacagtgagatactatacacctattagagtgatgaaaattccagacactgacaataccacatgctggtgagtatgtggagtaatgggaattctcattcattgctggtgggaatgcaaaataataaccttcaaaagacacttgggcagtttctttaaaagctaaacatattcttaccatatgatccagcagtcatgttccttggtgtttatccaaatgaactgaaaactttaagtccacataaaaatctgccgatacatgtttgtagcaactttatttgtaattgcccaaacttggaagcaaccaagatgtccttcagtaggttaatggataaacaaactgtggtacatccagacgatgcaatattatctagccataaaaagaaatgagttatcaggccatgaaaagacatgcacagagtctatttaataaaaaaaaaaaaatctacttggagattgaggttacagtgagctatgaccacaccactgtaccccagcctgggtgaacagagtgagactctgtccattaaaaaaaaaaattccttgaactatacaagcaataaaatgaactacagatgtgatgaatattacaaatacagtggtgagtacaagaaatcaagggaaaacatatactatgatgaaattttactatattgtttaatattgtttgaataagaatatattgttgataaaacaagaaaagctaagaaatgattaccggaaggatagtttttatctctgtggaagggagaatcaagaaggaacacttgagagatttctgagggtggtggaagagttttatttcccatcatcatggtggtgtgttatttaagtactcattttctaagtctttaaattgtacatatttttcttcaaatacattcttttaattgaggtgaaaatcacttcacagtcaaataatcattgtcaaatgtacttttctgtgttatttagtgtattcataatgtgcaaccaaaactaacagctctttctagtttcaaaattttttcatcacactccagaaacaccctatactccattaggtaatcattccctaacctccccctaagcaggtcccctcataacttttaatctgctttttctctatatggatgtgcctgtcctgaatgtatcataaaaaggaatcatacaatttgtgaccttttttgtgtggcttctttcgtttaacataatggtctcaagattcatccaagttatagtatatatatttgagttttttttatgactaatatttcattatatgtatgtaactgttcacccacttatcactgatggacatctggtttattttcatatttcgagtattgtaagtaatgctgccataaatgttctatacatctagtttaatgtattgcaatatatgtaagatacatattgtgaaaaaaataagaaggaaaaacatcttgttgggaccgtgtgcattaccaatagtggcatgttgctaaatattgacagacacaaagataaattaagcatgatccttaccctcaagggtatgtacggaattttgttgtggaattacaaaaacagtaatctaacattgcatattttagagcatcattgtagaattgaggctcccccttgaagtagttttaaggtaatacaaattgagataacacagataattataaaatatgaagtttgtacacggatgattaagatacttggatccttaagcatgatcatgattaagcataatccttaccctcaagggtatatatggaattttactgtggaattacaaaaacagtaacctaacattgcacattttagagcttcattgtagaatcgagcctccccttgaagtagttttaaggtaatacaaattgagataatgcagataattataaaatatgaagtttggacacatgattgggtaagatacgtggcttgcctggatgctgtgttcagctagacagctgtgatttacaggtgaattacaaaaaccaacaacaacaacaaaacaaaactacagctctgagattcctaatgatcattgaaaagagaggctagtctgtacaataagatttttttttcaaagtaaatataggttataggtagttgtagataagtttttggattggaacatacagttttatttttttcccaagcattctctaaaagatatgaagtcatatatccattgcctaaagtcagtaagttccataagtgaaaataattgatttcttcaattgataattgatttcttctcttccaaggtagtgattctcctctagtcttcaacccctagaaaaaggtggtagtatagaaagaggtggtattgctgtatttatttttggataagctaaaagcagggggctaattctctattagtagctaaaaacaaaaagtcctgagaaagttcgaattttttttcatatttttctgtcagaaggtacagaaaaattgtgtttattaaatctttttttttgtattttttttttttaattgatcattcttgggtgtttctcgcatagggggatttggcagggtcataggacaatagtggagggaaggtcagcagataaacaagtgaacaaaggtctctggttttcctaggcagaggatcctgcggcctaccgcagtgtttgtgtccgtgggtacttgagattagggagtggtgatgactcctaaggagcatgccgccttcaagcatctgtttaacaaagcacatcttgcactgcccttaatccatttaaccctgagtggacacagcacatgtttcagagagcaccgggttgtgggtaaggtcatagatcaacagcatcccaaggcagaatttttcttagtacagaacaaaatggagtctcctatgtctacttctttctacacagacacagcaataatctgatttctctatcttttccccacgtttcccccttttctattcaacaaaaccgccatcgtcatcatggcccgttctcagtgagctgttgggtacacctcccagacgggggtgacagccgggcagaggggcttctcacttcccagaaggggcggccaggcagaggcgcccccccccccacctcccggacggggcagctggccgggtgggggctggcccccacctccccccctggacggggcggctggccgggcgggggctgccccccacctcccgcccggacggggtggctggccgggcggggcggctggcctggcgggggctgccccccacctcccggacggggcggctgctgggcggagacgctcctcacttcccaaatgggtcggctgccgggcggaggggctcctcacttctcagacagggcggccgggcagagacgctcctcacctcccagacggggtcgcggccgggcagaggcgctcctcacatcccacacggggtggcggggcagaggcattccccacatctcagacgatgggcagccgggcagagacgctcctcacttcctagacgggatggcggccgggaagaggcgctcctcacttcccagacgatgggcggccaggcaaagacactcctcacttcccagacggggtggcggccaggcagaggctgcaatctcggcactttgggaggccaaggcaggcggctgggaggtggaggttgtagctagccgagatcacgccaccgcactccagcctgggcaacattgagcactgaatgaacgagactctgtctgcaatcccggcacctcgggaggccgaggctggcagatcactcacggttaggagctggagaccagcccggccaacacagcgaaaccccgtctccaccaaaaaaatacgaaaaccagtcaggcgtggcggcacgcgcctgcaatcgcaggcactgggcaggctgaggcaggagaatcaggcagggaggttgcagtgagccgagatggcagcagtacagtccagcttcggctcggcatcagagggagaccttggaaagagagggagaccgtggggagagggagagggagagctgtgtttattaaatcttaaagctaaatatctttaagaatattctttagtaattgcttcctttctacacacagacacacatgtatatttatttatcatgagtaagtgacaggtgattcagtgccaatctgagttcctaaaggttacacagttcaatttatttgtttttattgttttgtgattagcagcaataatgttagtaatagtagatacactctcttcatatgtgaagactgatgatgtcccgtgtgcttagagctatttttctagtagtcatggtagatttgcactagtttactcattctagatctcctttaaacattatacatttgtagtattactgataatgtgtgtaaatgactgatctgctagccaagattaggtgtgtctgggtcatattttaagtgatccccttaatttcagacttgtttcaaaaaggattttatgcatctttcagtaatagagtaagacaaagtaattagctaaggaaatcaggatgactggaaaatgagcacaattgagtggcattttgtgcctggtacttttctgaccatctactggctctctcttgttccttcaccttaccctgcttgggggcttatctctgcttggttccttaccattcattcattagttcccacttgaggcatggcatttatcccaaaattcttgaacctcggtgggcttttcccccctctgcacagctcctaagggactaaggtactagggcatcttattttttcttttgtggccttccagaatagttccttgctgccctcttctggctgagaccttagggtgttgttgagcaaattttggtttttaatcctttaaattccagcaatattttggataaaccagtggttctcaagcctggctgcgtattagaatcactctggggagttttaagaaaactaccactgtgtgggccccacttttggaggttctgatttaattggtcttggggtggaggtgggaggctggtttttttttaggggattaaaatctctagccagtgattaagatctaaccactaggataaatgacccttggaatcctgaagggcttgtgctacttagatatagtcctcacatttttagatatcataatggatttttaaaaaatagcattaaagttagaaatacaggagtatttctaccctctcaggaaaagaatagtttatacaaggaatgatatgaataagcaataggatctaaggtctttgtagtgtctactaataccagaagagattttgggaagatactttgtgttatcatttgcctgtttggttttctgtttctcaattttcatttcctctgtttctgttttaagggccaagccacaggcttctgcatgagtttggccattgacagatactagcggaagattggaggacaggtagaagggagaagccagggtattttttggttgtcatgtctggtaaaggctatttctctggtaggggcttcttgtcctttgtgactttagctcttatcagagagctcctccttccatggtccaaatgtgtgctggaaaatttcctgtattagtagctatgtcttctattaaatatatggagaggtttctgtttttttgattggactcctatttgatgtaccctgtaaatactacaatatgcttctctttcctctcttctgtgtttctacctttcctcctatctgttctttggtacttttcctactccggtgatagccacctgaattctgaacaatatttataacagttagggttagggggcattgctcttaaattggagtctctaattttatggaatgttctttctaagttttacttttttactttctgaaacttgtaaagcattcatacgatattatttcttagttggattagaaacgtgatgggaaataaaactttaatatgaacttgttgaatacagtttgttagtagatacaatttgtaatcatcctgttttgtttgtttgtttgaggtagaggtcttacagcccaggctgatcttgaactcttgggctcaaatgatcctaaccattgaaacctcttgagtagctggtagattaccagcacatgctaccatgcccaatttatcatctttttaataatgctttttgtttgttaattattttgttaagaatactgttgcagctactttgtttttaacattttgacccatgatacaaatctctcttactaaactttagtttgggtcatttaaaaaaataatagagtgcattccttttttttttttgaggcggaatttcgctcttgttgcccaggctggagtgcaatggtgcgatctcagctcactgcaacctctgcctcccaggtttaagcgattctcctgcatcagcctcctgagtagctgggattacaggcatatgccaccatgcccagccggttttgcatttttagtagagatggggtttctccatgttggtcaggctggtctcgaactcctgacctcaggtgatctgcccaccttggcctcccaaagtgctgggattacaggtgggattacagccaccatgcccggcttatttagtctttgaaggagtattaggatctttagtttctaaaagtggcgtattaactagctctttattatgtaaccatttgtactatatttcttattttttaatttttaaaaatttcaagagcttttggggtacaggtggtttttggttacatgggtggattatatcgtggtgaattctgagattttagtttgcctctcaccaaagtagtgtacattgtacccaatatgtagtcttttattccacattcccctccccttctccccctactgagtctccaaagtccattacatcaccctgattggttttgcatactcataatgtagctcctacttataagtgagaacatagggtatttggttgtccattcctgagttacttcacttagaataatggcttccagttccatccaagttgctgcagaagacattattctgttccattttatgtctgagtagcattccatggtgtatatataccacattttgtttatccactcattggtcattgggcacttaggttggttccatacctttgcagttgtgaattgtgctgcaacaaacatttatgtgcctgcgtctttttcatataatgacttcttttcctttaggtagatatccagtagtgggattgctggattgaatggtagacctacttttagttctttaaggaatctccgtactgttttccatagaggctgcactaattaacatctgcaccagcagggtgtaagtttctgttttcaccacatccatgccaacatgtattgttttatgactttttaatggccattccttcaggaataaggtgatatctcattgcggtgttaatttgcatttccctgatgattagtgatgttgagcagcgtttcatatgttttttggccatttgtatatcttcttttcaaaaatgtcgtttgcccacttattgatgggattatttgttttcttcttactgatttctttgagttccttggagattgtggatactagtactttgtcagatgcatagttggcaattattttctcccattctgtgggttgtctgtacattctgatgattatttgttttgctgatttgcactatatttcctttgatgtgggatttatttatttagatgtaggctttgcatgatatccaaagcatatatatgtatttggtaacacagtttttgaagtcttgagttttgtgtggttttggcttaggtaatctttggattacttatttctccaatccttttttttttgagcgaggtctcactctgttacccaggctagagtgcagtggcacagttgaaccctccaggctcaagtgattctcccacctcagcctcccgagtagctgggactacaggtgtatgccaccaggcccagctgtttttttgactttttgtagaaatgaggtctcactatattgcccaggctggtctcgggactcctggcctcaagcattcctcctacctccgccttcctaagtggtggattacaggcatgagccagcacacccagcctccagtcctcataagtggttcttctaactttctctattattgtagacggtttaaacgtctttactttaatcatttgtttaaaaaaaaaagcttcatgctgctagatttaagatgccaagaaatcatatttttgggaatttaactctgttaaaaatgaatgttgtaaactaattttattctctcatatttgtgtggagacataagatgaatcattagtaccattcagctgagtagtgtagaaaacggaattgtttttctttgctgaaagaattgaataaaaatattttcatgaagttattctttgtaccaattccatgtaagtaaggttgctacaaatatatgatttcttgacatatatgcatgtcaaagtatgtactaaatataaagtgttacttttcatacttaatactttatcttaatactttacctacagaggttttcatttaaaagcctgttcttaaaattacattaatctttcaggcttaaaattgcctttcaggtttaaaattttacttcttagttctaacctcagttataagtccctggttagggttcttctgaaacctcaatttggatttaaggatacattttctttctatgcccttttctttctgaagcacacatttttaacttgtttattgagcctttttctctacttgtgacttatggaagtagctttataaacgtgtgtgtgtgtgtgcgcacgtgcctgtgtggaattgcagcagaagtcattccttctcagctaatttcatgtaattcatttcagcgtgaaggttggaatgatctaatggttttctaagagctagactttcataataatgttacacattaaaacacataaacacagttgtatagatgttactgaaacttagaattatgatcatatgaagtagaagagttaattttacaaatttataaaaacaatttggagttggctttttacttctagctgtaacttgtttactgacaagactgagttatataaaatattttaattaagtataaaataatttaaatattttaattaagttatataaaatatcttaattaagagttggctttttacttttagcagtaacttgtttactgataagactgagttatataaaatattttaattaagagtatttagttggggccgggtgcggtggctcacgcctgtaatcccagcactttgggaggccgaggcaggtggttcacctgaagtcaggagttcgagaccagcctgaccaacgtggagaaacctcgtctctactaaatatacaaaattagccaggcgtggtggcacatgcctgtaatcccagctactcggggggctgaggcaggagaatcacttgaacctgggaggcagagatcgcggtgagtcaagatcgcgccattgcactccagcctgggcaacaagagtgaaactccatctcaaaaaaaaaaaaaaaatgagtatttagttaaagagacaactttaacattttataacagaatgattttattttgttttggttattcatcctaacaatgcacattttacaagtaataatgtattaatgcaaataaacatgattaaaatagtttcctctgtaagccataacagtgctgggaagaatccacaagaagtataggtcagttgtgaataaaaaaactgaatgaaaaatctgcttaatgaaatataaattaaaagattttaagcataattttaatttataattttttttttgagacagagtcttgctcagttgcccaggctggagtgcagtggcatgatctcagatcactgcagcctccacctcccgggttcaagtgattgttgtgcctcagcctcccaagttgctgggactacaggcgtgcaccaccatgcttggcaaatttttgttttgaaatggggtttcaccatgttggccaggctggtctcgaacacctgacctcaagtgatccaccctccttggcctcccaaagtgctgggattgcaggcatgagccactgtgccctgcctgtaatttttatttaatttttccggtgatggcatgagtgaatgtccacatttaaagttattttggttcacacatggcctttgtttattatttatgagaaaaaattatagaaataatttaagggtggtacagaaatgcaaatctagaggacttaaaatgtacatgaaaactccatttgatatgacaaataatttacaggtcaaatattttaatatttatatatataatagatgccagttagcacaattgacaagttctcttttacggaaaaggccccaaaatgtcttctactgatgccagatcagttgattatctagggatagatatctgaaataagctaggccaatttgattttctcactcaggaattactttattgactaattttattagttcattcagtcagcaagtatttattgaaggcctgttacatgtttggttgctagagatacaatgatggaaaattcagataaagtttctgctcaaacaaagaaattaaattggctagacatggaaatagtggcatccaagagggaaggtctatacattagtgctgttaaggcctatagaactcctctgattcctgtcattatttaaaaaacaaaacaaaacaaaacaaaacaaaaaaaaaccttggcggtttagttatttcttcagttctgtgagctacccaagcatccttccagtctttccaataaaacggaccacctccttcttactcttatttttaatttcttaaatttgttttaagccaaaaaaccctaaccaatatataaattggacctagggtggggttttattatgtactcagcttaggtcagatggttagatgtctagtcttatatctaacagattggctatgaagatgtggaatttgaataaaagtgatagcttctttacacgtccaatcttagagtagggaaatgagcatttcacagcagaaagttttgttctgaacaaaacagagtcccttgtagtgtatatctatcatatatactgcattatgtttggttaggacttgaaaattttatttcattgcatcatgtttttgatcaagaatttgtaggaattttgtgcaacaagaggttataatgttaatacgtattaatattctgaccgaggttgaagtcttcattcttgaaagaaaaaaaaaatgcaaaagtattctgatctcagaagatatgaaaactatcactcttcagaattactggctttgtgttttgaactagctctttcaatagtttaaccttcaactttttatacttgtcataacttgtttattaaatgaatcactatgtcaccacattctatactgatttacatagagaagatgttcagtaaaagttggcatgatttaaattttacaacaattaaccatagagtttcatcataagattggtttaagtgcattcattattgcagttgcaaggttatgagttgttaatgtttcagaaaaatttttaaggaccccttttaaaaaacgttttgtgtttacatatatacatacctccttcatcctaggtttcactttctctagtttcagttagccaaggtcaaccttggtctgaaaattgatgagtacagtataataaaatattttgagagggagagagagaacattcacatggcttgtattacaatgttattataatctatttaataattatttttttttaagagatggaggtctcattctatcgcccaggctggagtgcagtggtgtaatcatagctcactgtagccttgaactctagggctcaagccatcctcctggctcagccccaagtagctgggattacagccaagaaccaccacacctggctattttattattgttgctgttaatctcttattgtgcctaatttgtaaattaaacttaatcataggtatgtataggataaaacttagtacatatgtagtgttcaatattgtttgcagtttcaagcatccactgggggtcttggggcgcatcccctggggatagggtgctgggactactgtgttccttacacagtttcatctaatgttaacattttgcataaccatgggacagttattcaaactaggaggttgacatatatgttattaactgcaggccttatttgaattccacgtgtttttcttctaatgcctttcttctgatcaggatataatccaggattgcacattagatttagttgtctttattctgcagtctataatagttctgcagactttttgtcttctatggctacactttgagtttgtacaatgtgctctcatgattgggccagagttatgcatatttgacaacaatatcacagaaacaatatgtcttttgtcatggggttcacgatgtatgtcttctttactggtgatagcaaccttgatcacttgttaaggtggtttctgctgggtttctccactgtaaagctatctttccatttgcagttaatacatttcttgggagacactttgagactatgcagataaaatctaaggatctttctttgttcttaaattttttttttaatttgtgtaaatttatggtcttttttttttttaaatctaactaattaccaagatctatggatttatcattcaaaatcaatctttccttttttttggatcaagtttagatcagtttccttaaattcattttatcattcaatgatcaagtatgctaaaatgaaaaacgctagggatgcgaaaatgaacaagatgtaaatcttgtagtatcacctaatagtaggccttggcattagacagatctgatttcaaaccctaaattctaatcttggagtcctgtgaagttgtgcaagttgcttacctttgttgggcctcaaattacctcacagaattattagtaagggataaatatgaaattctagaaaggcaaaactagtctacaatgccagtacattgttgattgccttgggctaagagtgggaagttgacccaaagggagctgaggaaccttttgggatgaaggaaatatcttctatcttaatttttttcccaaaaccttatagtgtacatttgaagtgagtatattttattgtaggcaaattatattttaatgaaattgatttgaaaaccaaggtggttctccttgaacccagttttccatttaatgggataaaatatgatatgtagaattcataagtcttaaggttttagaaatcagtcgtctagctctcccttatccagaggagtcttgtgacaatttagcatttgcagagcaatttaagagtttaagtctatagttgtgacagagtaagaaatatatttttggtcctacccccagttcctgacacagagaacatgaaagcccttataatttcctgagttgtaggagtactgtcctatattctgttttaatatttggtcattgaccctggttcctgtctcagaactcctaaatccctttaaatttttggggtgatagtagagtcttttgttctaatggggtgacacttgggctcctgcatagcttcagaatgggggctggtcaccagaaagtccacaccataattagaaccttggaaatttcagccccactcccatcttctggaaaggggagagggactggagattgaattaataatcgattatacctacatgatgaatgctaaaaattattaaactgtgggatttggagagcttctaggttgcattgaaatgagtccagagaggccatgggagttctgtgcacctcctctaccttgccttacacatctcttccatttggctgtttctgagttgcattcattataataaactggtaaatgtaactaaagtgctttcctgagttttgtgaattgtcatagtaaattatcaaaccaaatggaggatgtcatggaaacctctgatttataaccaatccaaacagaagtttgtgaataacctgaggacccttacttggaactggcatctgaagtgggaacagtcttgtgggactgaacctttaagctgtgggttctgcactaactctgagcagaattgggttaaattgtaggacagtcagttggtgactgcagagaattggagcattgcttggtatggaaaacccacacattaagacccactggtgtttctgtgtgagtataggagaaaaacaatgttttcatttagtagtcatcgcattttggcatgtctttaggtctgagactctcaagttattctttttcttaagtagattccaaactcaggatctttctgatctcttttggtctctttagaatcttttaaattgattatctatggagtttgattacctagaggttcaaattgactgaagtcaacttcttgggactcctttgagtacagaattttattcttccctttgcaaccacagaactggctggattctggtgagctcctgaaagttattatttggtaatctgtagtttttaagatttgttcggttggcatacccttatgtatctacatgaaccttaaatttaatttattctcttccaaagtactcaaagactttggtagagaaaaaagttttatacgcatattttaaaatcatgttactttccatgtgatctaaaagtcattttctgtggaaaagagatcagtgttttaaaattatagctttttctttttttttttttaagcttttcctattttggtggtaggcaaaggaagaagtactgttgtaatttatagtgctcaaaatgctaattggctgcataaaaaaaggcaccttaatttttcttttctctgattgagataaaattatttggtagctcttagaaagaccaaaggctgaggggaggaagctgaaatgatgacatatagctatgtagctactaatatatgtaaatagaaattctgaatctgtagataatctaaatgagactgcttaaagggaatggcagagcttttgactcacatgtagttagtgtagttaataaaattttgttgatatcaagatggcattaaactgttggataaattctaaatatgtgttcaatttaaatctgaggtaatttttacagtttaaggcattgtttattttataccttttaccaaatgctatgatatgcttttaaatgtaactgatggcatttagtaaatctttatatgtatttaaaagcattatcaatggaaaagtttataaattttgttctctggttatacaactgtgagagcctattttaagggtgaagtacaggggctagtaactaaaaatcacgacctttctactggctatttctacaggctgtaaattttggccaaatactttggaggatttaaatagttctcatgagattcagctttacaaatccaaatttaaagtgccatggcaaatgtatctttggtattttttgtcctaattatctagcataaaaccaaagtgtacatttattaaatgcattatgattattagactgaattgctgcaatttacgtatctatagcagaaacatagtttggaataatagatttaaagtttctgtttctattcagtggcagatgttaacacattctaagttggaaaccctcatggtaatagattttgattgagaacttgtcagtcattgtagcagctgctttagaccacatttatatttaaataggagaaagtgatctgtttagaatttttaaagttgttgccatggcaaagtaacttgctatttcatctttttatctgccatcgaagtgatctgtctggctgcttattcccaggagtaggggggatgaactgttctgttggaaagcttatattaggacaatgctgaatgcttcctaatgggatataagttagaaagactaaagctttcagaaaccatggctttggttaggtataattagaattgatttttttctcaattaaaaacaggcaagataaagctaaaacattttttaagaagaaaaatatgagcttaatttaacaccacttttgacaaattcaatgaataacatattcaaattaaatgctatgaaaaagaatttctttgaatgagtctattatttctgtagcatgaaacactttgtaaatccatcttttctttataaaattgtatatatatatatatattttaaatgcccagtgtctcctgctgcccattttttttttacttgttctcttgaaaaccatggcagtgggctgggtgtgatggctcatacttgtaataccagcactatgggaggccaaggccagaggaccccttgaggccagaagttccagtccagcctgggcagcatagtgagactctgtctctaccagaaataaaaaatgtgccttgtagtcctagctacttgagaggctgaggtgggaggatctttgagcctggtttttcaaggatacatgagctatgttcacaccactgtgttccagcctgggcaacagagagaaaccttgtctcaaaaaacaaaacaacaacaacaacaaaaaccatggcatcataatctgatttggtataaatgattttgtgtttcatatttactttgattacattaaatttcttaaaaggaagaatattagtgcagttcttttcaggctaataattacctacatgatggatattaactccatactaaagcttaatttttttatttgtttatgtcatcagacaatgtatacactagtagtcaaagccacacaaattgagggtgattggcaagtggcaaattgtcatttgccaacaaagtcctcccgaataaaagaatttgactttcagaggcacgcacaagggagtgagaagatttgcaccagtagttgtatattgtaaggctgacatgtctttgattaacttgagatattttgtattatattggcttggcagctttaaggcatactgcatatttgtaatgtcatatgctaaaataatgtgactattgtgacatttactgagacaaaattatgatttcttggtcatctgagcatatggaagaccatctaataaaatatcaagtcttgtacttaaaaggaagatactcacttaatacctaagcagcttttcaaataggaaaggacttttaacctcaagcccaagagaaagcaaggcagtgtcaaatttatcaggtcttctttctattctactggctatttggtaatgcttttatggctaactacttgagagaaatgagtacattagctgaaggtaacacttattttgtttttcagagatgcagaaatataaagatacggagaacatgagaagttaaaaagcaactaaaggaaagtttgggtcattgattttgtggtttcagtacagtcatgtaccacataaggatgttttaatcaacaaacaactgcatatacaatggtggtcccataaaattatagtaaagctgaaaaattcctatctcctaatgacattatacctgtcataacttgtattgcaacacatgatcttttctatgcctagatacacaagtaccattgtgttacaattgcctaaatttagtacagtaacatgctgtataggtttgtagcctataagcaataggctatagcatctattaacaggtttgtgtaaatgcactctgatgttcgcacaatgatgaaatcactgaataaaggcggttttcagaacatctatctgtcattaggagatgcataactgtacacatataaaagctaataaaaatcttacagaaccctaaatatttgtaagttttaagtgaattttaagaatttatcatgtattatgcatgttttaatcacttaaatattgggcagtgtctcagagacaaattcagatatatctctgctaggtaagttttactcaaaaagggaatactcatgagaaatttttaaagaggcagttttctatttagtaagtctggaataccagttttgaaatccttaataaatgtcctttttcttgaatcctcatatccatatatggccacaaattagactctctgtatttgaatagactagcatctaaattatcagatgatactgtggttaaacatttagtaagtttgtggttgtataatttggcatgttgcagaagatctgaacattgagaatatatagttcataattacattccaactgaataattacatataataatagaaatggaattttaaaaattaagaatataatatattgatagtggtaaaatagatgcaggactgtatctcagtcccttttgtctaaaaggagaaatattttatttgaaaaatactgattcctgattcctaagggtttttacttgtgaatctttttttttttttttttttttgagacaggccctcactttgtcacccaggctggagtgcagtggcatgatcttggctcactgcagcctctaccaggactcaagcgatcctcccacctcagcaccccaagtagctgggattacaggcacgcgccaccacacctggttaatcttttttgtagagatggggttttgccatgttgcccaggctagtcttgaactcctgagcttaagcaatccgcctgcctcagccccctaaaatgctaggattataggcgtgagccactgccgctggctgtgaatctttattcttatttgcttttcaattatttttcattgtaataaaatatacgtaaaacttgtcatttaaaacaatttttaagcgtatatagttcattaacattacgttcatagagttgtgcaaccattatcactatctatttacagaactttatcatcatgtcaaactcaaactctgtacccattaaacaataactttccattttctccttcccccagcccctgggtaaccactgttctatctctgtatgtgaatttgactattccagatatctcatgtaaatagtcatatagcactggattttgtgttcgtattgttgtgtcttttttcactcaacataatgtcttcaatgtttattcatgttatatagcatgtgtggaatttcatttttaaggctgagtactattacattgaatgtatacacattttgttaatccattcatctattcacggacacttggattgcttctaccttttggctttttgtgactagtgctgccatgaacctgggtgtacaaatatctgtttgagtgcctgcctttacttcttttgactgtagacccagaagtggaattgctcagtcatacggtaattctatctttcactttttgaggaatcatcataccattttccatggcagctgcatagttttacatttccaccagtaatgcacaaggattccagttaattcacatccttgctaacacttgttattttctttctttttttagtagccatcctaaaggtcatgaagtatattcttatttgtttttacttctgcataagattaccctgtcttcactggatatgctatttcttctttggaaaatcttgctcaatataaaagacaaattacttagataaggtatggcgagaaaaagctcaatgtatttgttacattaaggaggaattatctctaaaaagagaattgctaaataagttcattcattcattcaaaaatgtgtattgaatgcctgctcactctatgttgggcaatgtgctaagcattgagtatacagtgataaatgagaaaatcatggcccctgctttgagggaacttgcattgtagtgggagagacatatgacaaattaatgaatacaaaattaaaatataactgtcatgaaatttatatgacattgtgccttcaaagacaatgtatacaatattcagtgaaaatagtaatattaaataaagaatatatattgcaagattgtatttataccaactataacctcatttttaaaaatgcttgtgaaagaaaacaatgtcaacaaaatgctaacaatggttctaggatgatccaattcattgattttttttttcttaactaaaatttcttcagtgtgcatatattgttaatttagaaattgcaaataattacataaacaataaattaataatttagggatgatgtttaatttgactttcctgttgccagtggtgaccaaaaagtgctaagtattattgaacattttatctaccttaattatgccaagtaaatccagggcttattgtgatttataccaagtaaatccaaggttttttatgattgaatgttaattttagctctaggaaggtagttcttatttttggtcagtttgcaatactattaggatatcggggacaaaatggaaagtatgattttaaaaactgctcagtatttattaacggaaaattgtcatttttataagaaagaaatagtggaaaattcactatagttctttctggctaaaaagtgtgtaatatatgagtatataaaatatgaattagtctgttttcacactgctataaaaaacacctgagactggataatttataaaagaaagaggtttaattgacatacagttccacatggctagggaggcctcaggaaacttacaatcatggtggaaggcgaaggggaggaaagcaaggtatggtcttacaaggcagcaggagaggggtggggaactaccactttttaaccatcagatcatgtgagaactcactatcacgagaacagcatgggggaacctgcctccatgattcaatcacctcccttgctccctcaacatgtggggattacaggtccctccctcaatacatgggaattacaatttgagatgagatttgggttgggatgcaaagccaaaccatattccaccccagacccctcccaaatctcatgtccttctcacatttcaaaacacaatcataccttcccaacagtaccccaaagtcttaactcattctaacattaacccaaaagtccaagtccaaagtctcatctgacacaagacaagtcccttctacctgtgagcctgtaaaatgacaaacaagttagttatttccaagatacagtgggggtacaggcattgggtaaatgttcccattgcaacttggagaaattggccaaaacaaaggggccataggctccatgcaagtcagaaacccggccaggcagtcattaaatcttaaagctccaaaatctcatttgattccatgtctcacatccaggacacactgatgcaagggataggctcccacggccttgggcactctgcccttgtggctctgcagggtatagcccttgtggctgctttcctgggctggcattgagtgcctgcagcgtttccaggtacccagtgcaagctattggtggacctacctttctggggtctggaggacggtggcccttttctcacagctcaactaggcagtgccccagtggggactctctgttggggctccaaccccacatttcctttccacaccgtcctagcagaggttctccatgagagctctgcccctgcagcacacttctgcctggccatccaagtgtttccatacatgctgtgaaatctaggcagaggttcccaaacatcagttcttgtcttctgtgcacccacaggcccaacaccacatggaagctgccagtgcttgggggcgtgcaccctctgaagcaacggcctaagctgtaccttggccccttttagccacagctggagctggagcagctggaatgcagggtgctctcctggggctgcacagagcagcagaggcccagctgatgataccactgttccttcttaggcctctgggcctatgatgggaggggctgccatgaagttctctgacatgctctagagacattttctccattgtcttggccattaaatttggctccttattacttacacacgtttctgcagctggcttgaattcctccccagaaaatgactttttcttttctaccacaagtcaggctgcagattttccaaacctttagactctgcttcccttttaaacaaaagttgcaatttcaatttctttgtgaacaatatgactgaacgctttcagaaaaagccatgtcaccccatttttgttttttttgagatggagtcttgctgtgtcgcccaggctggagtgcagtggcgccatctcagctcactgcaagctctgcctcccaggttcacgccattctcctgcctcagcctcccgagtagctgggactacaagcgcccaccaccacgcccggctaattttttgtatttttgttagagatgggatttcaccgtgttagccaggatggtctcaatctcctgacctcgtgatcctcccacctcggcctcccaaagtgctgggattacaggcttgagccactgcgcctggccgccatgtcacctcttgaatgctttgctgcttagaaatttattctgtcagataacctaaatcgtctctctcaagttcaaagttctgcagatctctagggcagaggaaaatgccaccagtctctttgctaaagcatagcaagagggacctttgcttcaatatccaataaattactcgtctgcatctgagaccacctcagcctggaccccattgtccatatcacaatcagccttttggtcacagccattcaacaagtctctaggaggttccaaactttccctctttctgtcttttcctgagccctccaaactgtcccggcctctgtctgttacccagttccaacatcacttccacattttcaggaagcaaaaatgatttcactttcacatgatctctatagcagtgccctactcctggtaacaattttctgtatcagtctgtttttacactgctgtaaagaatacctgagactgggtaatttataaaagaaagagggttaattgtctctcagttccacatggcgggggagatctcaggaaaattaaaatcatggcagaaggtgaagggaaaacaaggcatgtcttacatggtggtaggagagagagtgcaggggaaactgccactttttaactatcagatcttgcgagaactcactcactatcacgagaacagcatggggtaaaccacccttatgatccaatcacctccctccctcgacacatgggattacaatttgagatgagatttgggtggggacacaaagccaaaccatattaaaatagtactgaattttgaataactgtaattgtgaattgatgttaaaatctgattgaaagagtacatcttagcacaacaatacggtatattgcctagtaatagaataatgcttcaagaaggagctctggagaggggacggggtgcttatttaaaaaaaaaaaaaatttggcaaggcaaggcacggtggctcacgcctgtaatcccagccctttgggaggccgaggcgggtggatcacaaggtcaggagttcaagaccagctggccaaggtggtgaaactccgactctactaaaaatacaaaaattagctgggcgcggtggcgggcgcctctaatcccagctacttgggatgctgaggcaggagaattgcttgaacccaggaggcaaaggttgtggtgagctgagatcgcgccattgaactctagcctgggtgacagagcaaggctccatctcaaaaaaaaaaaaaatttcaacttagtaataaccatttattagatgcctgatatttatcatacattgcatgaggcattagcatgcagtatttctaaccttgtaaaagtaggtagtatagatgagaaaattgaagcccaggagagtcagttaatttttccaaagtcacaaattaatatgtatatttggagtgaaaaacagttattaagagagaagctgaaggtgatttccaataagccctagaaatggatgtttccgtaggattctgatgtctgattcagaattactagctacatagtaatctgacctgcccagtttacaagataactagcttggaattcatttggtttcctcgacgctttctagcaggaagcttttctcaagaagcaatccctgcattgaagtgagagaaaatggaggtcaggtgactaattagagtttggatgtataagaattcaataaaaggaaggaaaagtagatattatttaagatatgctgagcttaatcgtgttttcttatgggatttaagtagcttcttgtgatttaaatgtttaaaagaaatgtaaggctggatgcagtggttcgcgcctgtaatcccagcactttgggaggccagaggtgggcagatcacctgaggtcaggagttggagaccagcttggccaacacagtgaaaccccatctctactaataaaatactaaataaaaaactaaaatactaaaataaaaaattagctgggtgtggtggcatgcacctgtaatcccaggtactagggaggctgaggcgggagaacctgggaggcagaggttgcagtgagttcagatcacgccactgcactccagcctgggtgacaagaagaaatctccgtctcaaaaaaaaaaaaaaaaaagttatgccgtttcttacagataggagttgagtctaattgaatagaagaattattcattaaaaagtatcctgttagcatttataggaaattaaaaagatatatcagactcccatagtaccctaaacgtttatatccatttattctgttttggccaggcgcggtggctcatgcctgtaatcccaacactttgggaggctgaggtgggcggatcacgaggtcaggagatcgacaccatcctggctaacacggtgaaaccccgtctctactaaaaatacaaaaaattagctgggcgtggtggcaggcgcctgtagtcccagctactcgggaggctgaggcaggagaatggcgtgaacccaggaggtggagcttgcagtgagccgagatcgtgccactgcactccagcctgggagacagcgagacttgtatcaaaaaaaaaaaaaaaagtatatatatatatatacacacacacacacacatatatatacacatatatatacacatatatacacacatatatacacatatatacacacatatatacacatatatacacatatatacacatatatatacacatatatacacatatatatacacatatatatacatatatatacacacatatatatacacacacacacacatttctaacagaatcccaatttcaatcttggtatacatttaaaatagatttttggaatacatttgaggttaaatttccttaaaaaataacaacaacctatgttgtttgcttgaaaaatacctggcaggagcataaatggcaatcttactctccttagtttagagagatttcatctgtaagaaaaaattttcaaaggccaaaacttctaaaccttttatgatatttttactacatgcttgttcccccttactgtaccttaattcatggtacttaaaattttaatctacagcaaccagccaaagaaaccaacaatttctgttcaactagaaggtaggaattgacacctgtgtttttgttttttgaaaaaacacaaattattcttcttttataaaatcacctaaattgtgtgagctttgcttgacatgttaatgtgatcattacctgttagtaatacactaatgagcttggcctctttttttttttttttttaatctcccacattttccagaacagccccaatttgttacaatcaggattattttatctgctgtatttgctaagtattattttactctccttcttaatttattttattaaaagtgattttcttaagtatgtgatttaaggtttatcagtgggttttattttcaagtaacttcttatataaatatttatctatgtaaatttataacagaaaaggccttttctggactgtgttttgttacagttttcttagttatactttgtcagcttcagggctgcattaagttccactaggttggtatcttattgcttgaaaattgttctatcgaaacgtgctattaaccagccagtcttccgattctctcacttgtagtaggcagaataatccgcctccctgcaagatgtctgtgtcctaatacctggaatttgtggatatattaatttacgtgccaaaggagaattaaaataacaaatgacattaaggttgttaattaggtatctttaaaataagattattttggattatctacattgcccagtggtaatcactagcatccttaaattgtggaagagggacccaaaagtgctatttgagaaagactttattagccattgctggtgttgaggatggaggagtgggaagcatgaacaaaggaattagggcaacatttaaaagctggttaaggcaagaaaatggattctccctctagagattccagaatgaaacagccctgctgacatcttgatttttgcctagtgggactcgttttagttttctcatccccagaacagtaacataataaatttgttttcctttaagccaccaaattatggtaatttgttatgacagtcatagaaaaataataacaccacctaactgtcatgacctttgcattttgtcactcaccataggcctgggtagatactccctgttctgcctgggactgcttttttccctccctgatttcagagctactgttacacgctttccaccactattaaggttgtgatagccaggtttttttttttttttttttgagatagagtctcactctattgcccaggctggagtgcagtggcatgatcttgactcactgcaacctccacctcccaggttaaagtgattctcctgcctcagccctccaagtagctggaattacaggtgcccactgcctgccgccacgccgggctaatttttgtattttagtagagacagggttttaccatgtcatccaggctggtctcgaactcccgacttcgtgatccgtatgcctcggccccccaaagtgctgggattacaggtgtgagccaccatgcctggcccaactagggttcttatttgcaggcaaaagaatttactgtagctagtttcagcaagattttaaagcatagagaattgttaggagggctaaaggagcaggttgagcttccaggaaaggttctcaaaaccatactgcagaatcagcctaaggaggtgataataatgctttgttctgaaagccacagagtcaggtagctcctaccccaggttccagatcattttggagatctggctgcagattatcttgcctcttccttgacctaaatcttcagtggtccacactgcaatagactgtctgactctgccattacctttctgatcttatctcctgttagtctgtctctattcactttgttctaggaacatcattgtcttgctgtttacaagtcaaatggccctgtagcaggaacatgcctgtaattcatgacacttaaaattttaatctacagcaaccattcaaagaaaccaaccatttctattcaactagaaggtaagaactgacaccagatattgtaagaaattggggctgttttggaaaatcttccctttttaccttttttgtctgtggccactgaatcaccattcattttttcaattacaattcatatgtccaggatgagagagactcctcgtccatgctgatccaaataaaggttgctggtctctctcacctcagctccatttgcagtggggatgaagatctgtgggaaaatgaaagggttttctttttcagttacatcaagaagatggaaagtaagtttttttaaaaatagccttttctaaactttctgatgactgatggagccatcatttgctcaaacaaggaaagatgtagcaaagggaagacttgttatgtaaatttaagccaccactgagcccagaacacccagaactttggaaattggctattgccatgtctggactgcgagtatgggaaggggacactgttctgtctgttgtccccgctaccgtccctctctctcagtatcaacgtagatccagacattctgctttgcttacctccaacctgactgttcccatacagagttgtgttaagcctccttacatgctgttagtgggaaataccaaaattttgacaaactgtccagtgcattaattgtcatttatacacttgtattaactctcattttgactccacaaaaagtgtaatgttggttcgagctcgagaaggaatctggattctggtagctttgcccagaccttgggaatcctcctcctcaatacatttaattaatgaaatgttacagcgaattctaaaaagagctaagagatttgttttcactttaatcgctgtgatcattggcctaattacagtcactgcactggccactactgccggaatggcgttacatcaatctattcaaacgggtcattttgttaatgattggcaagccaattccacccaaatgtggaattctcaacaaggcattgatcaaaaattggctaatcaaattaatgatttaagacagtctgttatttggcttggagattgggtagtgagtctcgaacattacatgcaaatgcagtgcgattggaatacttcggatttctgtatcaccccgtattcctataacgagactgatcattcatgggaaacggtcaaagacaccttctgggcatgtgatcttaatggtaagagtttcactactcagtcctccctttctttctggtgcggaggcagacacccttaaaaatggagatttcctttatagatgtagatttcttttataaacatgtttcaaaatagccagctaaaagacagaaaggtgtattttagagaccaatttagttcagtagacagtctttataacttagctatggttttttaactaaaatgactgagcttagggctaagcccattaactaatagggcaaagaaagtattctctctacctggactccacaaggatagctcttataaagaagcaagcctattttacctgagggcttaccttctattagcaaacactttatccacctttattttcacattcaggacagtatagtaatttagccaaaagatttgcagattcaatttttttaaatcaactagttccttaagctttttatttgctttttataaagaggctttcaaaagaagcaataaaaatattgcaacatttttagaagcttctgcacatcaataggcatccttgggtcagccaaattcaggagaacttatttatttattattatactttaagttctgggatacatgtgcagaacatacaggttcgttacataggtatacacgtgccatggtggtttgcagcacccatcaacctgtcatctacattaggtatttctcctaatgctatcccttgcctagccccctagcccccagcaggccccagtgtgtgatattcccctccctgtgtccatgtgttctcattgttcagcttccacctatgagtgagaacatgtgatgtttggttttctgtttttgtgttagtttgctgagaatgatggtttccagcttcatccatgtccctgcaaaggacgtgaactcatcctttttatggctgcataatattccatggtgtatgtgccacattttctttatctagtctgtcgttgatgggcatttgggtgggttccaagtctttgctattgtgaacagtgccgcagtaaacatgtgtgtgcatgtgtctttatagtagaatgaattataatcctttgagtatatacccagtaatgggattgctgggtcaaatgatatttctggttctagatccttcaggaattgccacactgtcttccacaatggttgaactaatttacactcccataaacagtgtaaaagcattcggagaacttatttttaaatgcagttcttaaaatgcaatgttgtttatttggaacattccacagtaatttaagattgttgtttgtatgactttgccattttttgtgaacatttgctgcttctggggcctaaacgttctatgtgtaaatgtagatgtagctagaaggtagagtactcagttcttcagaaattaagcatcacatttttacgttgaatcttggttttgcctctcagatttctttgatcagcttagccagtgatttttcctacctaagcatgcaagaaaaaggatcaaaggggatagaataaataaatccctgtgaattttcaaaagctagagtttgtaacccctgtagtattgccatttatcgccagtttttgtttgacccagtcagatatttaaggcctctagccagattcaatccagataattattggatcctgtccagtttctttttttttgaaacggagttttgctcttgttgccaaggctagagtgcaatggcatgatcttggttcatcgcaacctccacctcccaggttcaagcgattctcctgcctcacctcccgagtaactgggattacaggcatatgccaccatgcctggctaattttatatatatatatatatatatatatttttttttttttttttttttttagtagagatggggtttctccatgttggtcaggctgatctcaaactcctgacctcaggggatccgcctgcctgggcctcccaaagtgctgggattataggcctgagtgcccagctggaccctgtccagtttctgttgtgacttctgaaccaagttcagataaaaaatttactcaaacctgtatagctcaaaaccgcaaaatcttggattctgaagctccactgagagaacttacccacagtctctggttgttgtgagagaggaatggacagaatgggcccagtgggtatttctcttggtcactggctgctcttggggcttgctagatgctccacttcatgtcccactctgatgccatctgttacaaaaaaagactttagacgaatttaacagagtttaattgagcaaggaatgatttgcaaatctggtagcccccctgaacatgaaacatgataggttcagggtgactctagggttcccacatggtcagataatatttaaggacagaaaaaggaaaatgcgtacagaaaacagaagtgaggtacagaaagtgctgtattggttacaggttggtgtttgccttatgtgaacagggattgaataggtagcctcctgtgattggccaagccttgtaattggtacaatagtaggttataatgtatttacacatctacttaggttatagttcactatatccagaaacctttaggctgaacctaaaataggtgaggaggcagcttcaggctatgcttaatttaacaacataaagagcttatatttgagttaaacatactaagcttatatctcaagtatgccacttcctttggtaagaagcttaaactttccaaggctctgttttctcatctgcaaaatggagataagacttgtacctcacagagttgctgtgtggattaagtgagaaaatgtatgcttagtgtagtttggctctttactactcacattaacatattaatagaagaggataaagtatgtacaaaatgctctttctaagaaagaagacacattttagtaatcagaatggcttaaatatactttaagccaagggtccccaaccccagcgccacggactggtactggtttgtggtctgttaggaaccgggctgcacagcaggaggtgagtggcattatcgcctgagctctgcctcccgtcagatcagtggcagcactagattctcacaggagctgttaaccctattgtgaactgcgcatctaagggatctaggttccactctttaagaaaatctaatctgaggtagaacagtttcatcccaaaaccactcctcccactccccattccaccactacccccacccccaaattcccccactcctccacccctgttctgtgaaaaaattgtcttcctcaaaactggtcctgctgatttaagccttaaaaagagtaggttttaacattctcatcttgaataactcatgcgctgaaaatttgggttacttggagtttgtaacactttaattttctctttcttttttttttttgtgtgtgtgagatggagtttcgctcttgctgcccaggcctggagtgcaatggcatgatctcggctcaccgcagcctccacctcccgggtccaagagattctcctgcctcagcctcccgagtagctgggattacaggcatgcgccaccacgcctggctaattttgtattttagagacggggtttctccatgttgatcaggctggtctctaactcctgacctctggtgatctgcacgcctcggcctcccaaattgctgggattacaggcatgagccaccgcacctggcaaattttttgtttcttttatgcaccgtataggggaagaaaaatatctttttcttttaccagtcttggattcattggctggggccctttacaagacagatgcacaagacaaaaccgtacaaatttagttaacgtaagttttatttgacacaggagccttcataaggaaatgaagacctgaagtagctgaacctgagtgtttttattctagttttgatgaaggggaagattgtagaagaatttaataagataaaaagtatgagctaactgtaataaactgggggaaacttagcaaggcctgtttgttcacattcttcttggcgtctgtgtctatgttcctttcctcccagtgtggggagggtacctctcacagaagagtcttatgactggcatcaggggaaggtcaccaagtctttcctgtacatgctgtttatcaaattcattcatctcgaagtattcagtatgccaggtactgtattttggggtagcatgtcctaaaccctcatcaactgactttcatttcaaaagcttttaaatcccctgtgataaaaggtacagtttgtaatgtatgcaaccatacttagaaatctaaaaactgataataggatttggcaggggggtaccccatattgattacatatgtttatctagtgctttgatcaaaattgtttccctttgaaaaatacagcagtgttgactttggtggggcggtgggcggggggttgttcctgcttacatgtctgctgaagcatagtattttaaggttttgttttctttatttatagataatttaaaagctgactagttaccctctccttagaggctttgtaagtgcattcttatcagtaagatacatgtttactatatgactcagctagattctatatagatagtgtccttgtatcattaccagtaccatataaaaatactatatggatatatagggttgaaaacataatttattttctttccatttttagatttttagttgagacattctcttgaaaacaaaagtcagattaacaaaagaaaaagaagtttattaaagtgtgctgtacctatcacttgggagaggcctcagttcaaaagtgtatctctttcaaggcagtggcatgggggacttgcttaaatagtatcttaacaaaaagccagaaattctatatagtgacaagacaaaaaagatttatcttcaggcttccaaaaggtggggtaatatgggaacacatatttactactgctgtctctgagctgataagcagtgttgcaaaaggggcctagctttaggtgagaaaggcagcgagaaggggtgggcaaagtgtgcccgttttgttaagcttttaacttaaactaaaatccccagtattttagagaggaaaattttgttttcctccagatacttaacagtttataaatctagtgttctaagaagtatgttaaaaaaaacaccttattcctgcttccatgtgaattatattacctatgaagcatcattgtacatttatgtaaattcacatttgctaaatcacactgagggaaagcttaatataatcatttcatcattatataatccattcagtatgattgcatttcctcctgatgcaatttgataaacttgtgtttgtatagctgcaagataatgttccacagataatgcagttttatacattttattttcaatgctttttagtgggtgtatgtgtatgctatgtagagaaattagatgaagtttctcttaacttcattatgggcaacaaaattccttggctttgttacagtttactaggccccatagtgaaaacacctctgagtgtaggccaattctagaatacaaaattacttgtgatcagagctgtaatatgagattgaaatttgttacacaaagaggttactatcctttttttgaggataattaaacaatttgtttctttaaaacaaattaatagtgattgtttcaggatagtataaagtacaatttaatctttaacagtgagagaggctttgtagtggggtctcagtggttaagtccaattctgggacaagtaaaaatgttttagggtcttattacagaatgaaaactatattgtttcttaaggaatttaatgaactaaaaaacatttttgcttaacactcttgatttgtagtacatcgaccaagtatcttcatttaacagaaagtacatacttttgttaaataatgaagttttctggaaatctgttaactaagggtacttagagtaggaatgtgaatatttcaaatttcaaatcatccttttcttatgacaaaactctttttgtggcattacactgctttagaataaagttcattaatgcttgcttaaaaaaacataaggggtactgtatgtgtcaaaaataaaaagttggaacttcataaaattataggatttttttcttcctttcccacctctactgttttgtcattgctctttgagatgaaagagtctaaacctgtatgtttatttaactgttggatttcttgtttctcaattaggaaatgaaagcaaaaatctacacttgattttataattgacctatttgttttcaaaagtatgcacataaatgtcaaaatttaagtctaatgtaagctatttaccctaagcattaacatatctgtgtaaaaatggttacccatattgcatgtttaattaccttggtgtttaagagctctgatgaatattaataatttaccaggatttgatctggaattattttcactctgtgatattagaaaactcttaaaaacaccaacattatgttttatttctgtcactacatagcaattcctgggcaacatagaggtgacatgaagagtaagagagaaaggggattagatgtcgacacttgggattgagctgttagaaatagtatgtttgtctaaagagaggaaatgaaattttttttcttttttctatgcataagaaatgaaattttgtggggtaggtgaggagatctctggtttgtgatcttctttattgacttaatgcattctttcaatatctataggaagttatgtcagtaactggtagataaattctggcattacataccaaacaggagagacaagcttctgccttcattggagcttatattctctttagggatagcaaaaaaaaataagtaaataagacaatttcattgactagtaagtgctatgccagaaataacagagggtagagtgataaagaatgattggtggagtgattttagattcagtgctctggtaaggtctctgaaaaggtgataattaagatgatgagaaagcaccaagtggtggctggtttcttaaaatgaggtattaaattacctagatcaacatattggataaaatatataatatttaaatgctttaaactcttaagctctaaaaagatagccatttttttaatgatagcctgtaactaggtagggacagtagataaggatggtttaatgctgtgcagaaaaggaaaacgaaatggaaagagatttttaaaagaagtaccaaaggccaggtacagtggctcatgcctgtaatcccagcactttgggaggccgaggcgggcggatcacttgagattgggagttcgagaccagcctgatcaacatggaaaaaccccgtctctactaaaaatacaaaattagctggtcatggtggcacatcccggtaatcccagctactcgggaggctgaggcaggagaatcgcttgaacccgggaggcagaggttgtggtgaattgagatcgtgccattgcactccagcctgggcaacaagagtgaaactctgtctcaaaaaaaaaaaaaaaaaaaaagtaacagaagtatggccatagactgcctttcataagtatttgtgttgcaggtacatgtagcccatcttggctggagatggtccagtctcatactgtcccccaaagcaaatgtaagcctctacagatgagacatattatcctagacctcagtgaacccctacaattacattttccagcaagtagtcaaagataacaaagcatatggagaaacagacaactgaaggagaaccagcaaaaagagacagcagaattggaattccatagacttgggatattaaaaatattagacacatatttaaaataactatgcttatgaattataatacatatgaagatatctccaaggaaatcacaaaaagcagcatagcagatttgaaaaggaaccagacaaaacttttggaaatgaaaatcccagtaactgaaatttaataagcctggttttgtgttgagtactttgtatcaaatgaattctcctactgaaaccttataaacgttaggccatatatatatatacaacagctatttgaaagccttggagagcagccggtgtaggttcgacttgagggtctgtgattcttgagaaaagagaagctcatgaagtgatctccatatttattctggtcttttccttgagggaattttctaattctcagtgccagatggagatcaagcaaaaagaaggagttttacatggctaaggagcccagagaggctggtaacggaggcctaatcgtgggggttgggggtgagaggagaactgcagagaactgaatattctgcacataatatctgcatataagttctccttcaagtatggtagtttaatcactacccaggcccagggcaggatttctggaaacccatctgataacagtgactttgaggcttaagagctgagcagaaatttcagcaactttgaaatacagattgagttcgaatgcataagataactagtaattggtacactgaagccattatctaaaaagtatatcctttatgatatattcacctgtgtaaattgtgttcttaaaagctaaagatgagagaatttgtttaaagaaatacagtaataggctaagttctgtgatctttatcttatatggaggagtaaggctgtgtcccaaatgcaaatacagcttcaggtatttgagattaaattaagaaaatacagtagtcccctccttatccatggggaatatgttctaagaccccccagtagatgcctgaaaccacagctagtactgaactctatgtgcagtgtcagttaatctgataaaagtgactgtgtgggtggggagggaagggtagcacatacagcatgaatgcactggcaaaggaacaataatgtcctgagtgggacagggtggtgtacgatttcatcacactactcaaaatagtgtgcaatttaaaacttttgaattctttatttctggaatttttcacttaatattttcagactgtggttgactgtgaataattaaaaccatgggtcgtgaaactgcagatgaaggaggcctactgtattacacctttgatcataattgtccactatctgaatgaagcaatatatgattcttactaacttttcacttgctgtaccagattgctacagaaggtaagacctacttagaggtcaaggatatccttgtgttggtccatacataattctttaagtcatctttgtttttatcttgctaagggtttccaatatatctttgttcttatatataaacagcttttaaatgcttaggaaaatttgatgtaagtactaaaatgtcctcaggattgaccagtacatttaatgcatgaccaaatacattcaacatccacaggaacatacagcattcaggagcttgttttttataggtcattgaattttctacagagctactgctgagaattattttttaaagtaatatgcttgtctcaaatatgcttgtctaagtcaataagtccatttcactagaaagtttccaggcagtaaataaagcaatacactgagcgaatttttattgtctcgagtgacataatgtctctagttttcttacagttcacagtggttttactacagaagcacaacagtcattcctgttctcttagtggaattattcatggcttttaataaggtagattttattatgtttcaagatcttgaatttttttaggcttctgtttccatacacacacgtacacatttaatatggctttctgaagtacctttaaatcagaatttatcttacttttgctgtgtttaaagcattttctattgaacttttcaatgaaattcaataaatgtaatatttttcaactttcccaaaaatttaatattaaggctgatttatagaaattcatctaaaactttgctactcaaactgtggttcatggactagcactctttggccatcacatgggagcttattagaaatgcagaatcctcctcctcccccatgctgtcacttactgactcataatctgcattttaataagctcaggtgattcatatacacatttaagtttgagaagtgtagatctacagatctaaaagcttatttactagtgcttatacttcatctagttaaccctcaaagggaaagagccctgtgttttagaaaatgtataccacagcatgaaagatcaaggtattttaaaaggtttctaggaatatcttagaggctgatataatctgttctttttggaaacaataatttttattttctttttcttttttttttgagatggagtttcactgttgttgcccaggccagagtgcaatggtgcgatctcggctcaccgcggtctctgccttctgggttcaagcgattctcctgcctcagcctcccaagtagctgggattacaggcatgcaccgccatgcccagctaattttgtattttcagtagaggcagggtttctccatgttggtcaggctggtctcgaactcccgacttcagatgatccacccacctcagcctcccaaagtgctgggattacaggcgtgagccaccacacctggccttttattttcttcttagtggttttaccatgtcatttgttatatccctttctttttgtttatctattaataatctaggtacacatcttcagtttcagctcttttctgtagacttttaaaaccaatgtctgttctctctcccatttgactcaatttatatttctgacattttccatatccaaaaagaatatatcgtcattcttttcaaattatgctttcccccccaacttacttttgttaatcatacatctgttttaggcctagtaaagtcaaatattctgcaagagtcttttcacagcttttctaatacacagtgatttttcctttctttgttcctgtaaccctagagtaggtatggaattcacgtcattaacccaactttctatttccacgttatttgtacttctgataataaagtttctgacaataaaatatgttcttggaatgcctctttgtaaatggcagtaatattccaaatgattagttatgccaaaaaaagggagaaaatagttatgccagcaagtacaccttgcctgttggttgaatgtaaacattaatttttttgtttctgtgttttcagttaacagggttggttatgtagtaaccaactcctagcaaatcttgactcattaaaaaaaaaaaaactaaatgaaaatcccaaaagtagtacagttcttataaagcaaataatgagtagtcttacctttaagtacataagaagtggacttaaaattgatgcttgagaccttatcaaatgtacaggtaatcatttcttaaagctgtattggattatacaaatgtaaactaatggaatactaacttaaaaaacacaattttaagactaaggaacattgaagattatcatccccttattttaatgtaatggaaactgacacagcaattaaatgcctgtttctagtatttcttaccaaaaagtatgtagaacatatctctcagcttttgagttttagtctaaagtccagaagctccaagatgataaatttccaaattatgcccacttcaaatagggaataaaacttggactaagtggcgtctggcatcagactgcatgtgaatagttttaacgcaaaagacttcctgttccaaaaaaatgatccaaagagtagaatgtagttggtagtttgccctaatcaattgttggggacatctagagttgtgcatttgaaagcttgtaagactttgcccagtttcactctatgcatgttttctactattgttttctttatagggcatgacagtcatttaccttttatagcttttgtatgcttcagctatgtagcacagtgggaacatacacaattttgcacttgggaaagtactaccctgttttctgggttataactactgaaacaattttaccagttctaccctcagtttctgttgaggagtagccaaacatgcctactgttctagagatatttaagataccagtccctcagaatcaaaattaatgcctgcagtatattggtttccagggtttgttgctttgtagtggtcaggtatccagaagcttcatcttaagtataatggaagaaagcttttgtttttatacaagtggatataaccctgataatgttgtatatcactttgagaaataggaaaaatagctgaaaaatgagagcaaaaatattttaaaatctttatttttccaaaatgccaaaatgttgtgtggagataatcaggagaagagaggtgctgtatgtgaatacctttggatttactgtacacaggctactcctcataatccattgcttatctttttgaaccaagttcctatctccccaaaataccatgtaatcttcgggttaaattttgttaatattataagtttcaaatctttatttacttttgggggataaaaaagtctgttgtagtggttgttttccaaattttccttgccctgtcattttttatgtgggctatctgcgaaggagaaaatttgtaatctaaatttaataaaacttcaaatatttaaatggtttctaaaagtccaagacagttttcctctgaaaattaaaagagccttctagaactttagagctcagaattaaagaactttaaaaataaagtattacttttaaaaagactgtttatgaaaagttgttattgtggtattactattgtagttttttttgagacgaagtttcactctttttgccgagtcgggagtgcaatggcacgatcttggctcaccacaatctccgcctctcgggttcaagtgattctcctccctcagcctcccgagtagctgggattacaggcatgtgccaccacacctggctaattttgtatatttagtagagaccaggtttctccatgttgatcaggctggtctcaaactcctgaactcatgtgatccgtccacatcggcctcccaaagtgctgggattacaggtgtgagccacccccatgccaggagtatttttttttttttgagatggaatcttgctgtgttgcccaggctgtagtgcagtggcgcgatctcggctcactgcaagatccgcctccagggttcacgccattctcctacctcagccacccgagtagctgggactgcaggtgcccgccaccaagcctggctaatgttttgtatgtttagtagagatggggtttcaccgtgttagccaggatggtctcaatctcctgacctcgtgatccacccgcttcagcctcccaaagtgctgggattacaggcgtgagccaccgtgcccggccggactattgtatttttaaaataacaactgcctctaaattttttggtaggtgagataactttgtatgtagctactatttagactgttaaatgttaaacctagccaggcgccatggctcacgcttgtagtcccatcactttgggaggccaaggcttgcagattgcttgagtccaggagttccagaccagcctgggcaatatggtgacaccctgtctttacaaaaattacaaaaaaattagcagggcatggtggtgtatgcctgtagtccctgttacttgggaggctgaggtgggaggatcacccaagcctgggaggttgaggctgcagtgagctgtgctgtgattgcaccactgtactcaagcctaggtgacaagagtgagaccctggagactttgtctcaaaaaaaaaaaaaagaaaaagaaaaaaaagagttaaacctctgtgtctcattcactatgtagtttgttttttttacacaaaagtctatttttttcattgcccttttgaccaaaaagttaaaaattttcccccccgctgactaccttgtataggtcccctttttggtcacctacaaccctgaaaatccttgactcctgatcggacgttttgggagtcatctaaagccatttgggaatcattgattagtctagaatgtagatatggaacaatggctcttgcaactttttagcagtggaactatttaattaaaatctgtcatagaaacttaggatgtataaatgtacaacacataagtgaactactcttctctcgaagcaataggtgcagaggttggatttgggccctatctacttgtataagcaaggggtgcgtgtggcccacgccctgatggctccacagatcccagtccagactagaagatggcgtctgtaataagtgatgaatcaggtgaagaaggatctttgaacagggaaagcaaagtattggtgcctcataagttttgaagaaacccttgactggctgtgattaaagtagaacataagattaagtcaaaagctctttaagatgcattttatctgttttgtgttaggtatgaaattagtttaggctaagattcaggagaaaaaaatagaataatgtttacacattgttaaacattagtattcatactaaatgggattttatgtgcagttaactaaagctaaaaaataatttttgaatgtatacagtattcatgaacaaaaaccagttagtttttgtttttatgaatagcattgtaaagttcagtgcttacgttaccattaacctatttaatcagatgcacttagagttgcatattctgggtttgtgttagaacaaaaagcgtcaatttttgtaatttcttttatgcttctctcttgaattttgtttgatgctctttatagaccctgtcaaatacagtcagctccctgtacccattggttccgtacctggattcaactaatcacaataaaaaatattcagagaaaggatggttgcttctgtactgaagatgtacagacttttttttttcttgtcattattccctgaacaatacagtataacaaccatttacataaaattttcattgtattaggtgtaataagcaacctagagatgatataagtatacaggaggatgtgtgtaggttatatgcagatattatacaatttaatataagggacttgagcatctcctctgaagtttggtatttgccagagttcctaaaaccaatcttctgtggatactgagggacagacaactctatgtaattgtttgttttttagtcctcagctaacttgttacattttttaacaataggattctcaatatgtggctaaggaaaatgtttatgccaccaaacagcttctgaatcttttttgttgttcatttattgattcaaaaaatatttactgaatactggccgggcgtggtggctgacacctgtaatcccaccactttgggaggctgagatgggcggatcacctgaggtcagaagttcgagaccagcctggccaacgtggtgaaaccccatctctactacaagtagaaaaattaggtgggcatggtggcaggcacctgtaatcccagctacttgggaggctgaggcagtagaagtgtttgaacctgggaggtggaggttgcagcgagccgagatcacgccactgtgctccagcctgggcgatggagggagactctgtctcaaaacaaatgaacaaatatatatataagcctgcgtatctcaatcactatgtagtttggtttttttacacaaaagtctatttttttccttacccttttgacatatatatttatatataacattgttaaggggctgttagaggaatgcatcatacagcaagtactgtttataagcagagaaatatttactctgtattagagtcactgtcatctgaagaatgacaaagtaaaattttttgtgccagtttgagtgtattccctgaactaattccatccatagtttgatacgagaatataaaagacaaaatatcctttctagaaatattcacagtgcactcatggtgaacactaacactaaaggtgctatagagcttcaagttttttgaagaatattaagagtgacaaggaggcttaggagtcatatagtgcatattctcaaccaatatagaaatccaggccatatcgtttttgatatcagtcccctgcttaaaatttctacaaatggtaacattagtaaaggacaatctatttcatttttaattaggtcatccttggaaataatagtttgaataattaattgaacaaaaagtgcctgttattttccattccatggtcccagttttgacctctgcagttaaaagtttaagcctaatcagctttccacaggatggcagttgcatgtttaaagatagttatcatgtccctctggtaagatttttttttctttgtatcaatatcttttaaagttgatatcttttgctatgaatctcaaattgagaagggttgcttatcatagtgtgaatacccttttgcccacgcagaggcagaatcctcttctgtacatgttggttttgttatttttcttgagctttcaatattttgtcttgttagctcaaggttggtgtaccttatcctccaattttcctaaattttcaaataaatcaatcctggtacctttttaagcaaataaaatatttaatctatttttgttattttaactaattgactcttaaatcattatattaaattataaagtaaataaaggtatagccagtgaaaaaattaactacaataaaagacaaaattgagtgacattaaacatttagtgtataaataaacatcagtgatttacattgttggcaaaataataacactgtaaacatctctgtagcaattgtggattcaataattaatgattaaatgaatgtatacattttgaatgctcttcctttatatatcatcacttgttggatacctaagtattcagttggccttcgtggcatgtttaagagattctcttttactaggtgaactgagatgctcctaaattataattacatagtgaaagacctcacatgccaatccttgttctcctcagtcatattaccaaaatttggtgtactttgaaggattcgcctatgataaaataactttttagaatttttttaagaatcagtgtgatggaagaaaacagtggatttctgttagtattttgtgagaaatggaagattacgttactgttgtctctacttcttccatgtaaagaaaatatcctcattacatttttgagtgaaaagaaagatttatttctagagccatatttttgtataaaattagggttttcataactttctaaatattaggtagaataagagaaattcttgtctaatctgttatgaaaacaaaactttaattaaaaaatttttgtgaaaatcttgaaatacactggtaagttttgtataggctgtttagcattccagtgcaatttggggaaatgcttactgttttccttgtaatgttttccattaccttaaaatgcagtagtattgcccaaggatagtagtgaattaatgaaacaatttagcattgacatgacccactcagcttattttttgttgccaaaaggttcaaaagaagacatttagtaatgctgtgagccatgggagttgctgtgctagtttattattacagcacaacccagacatgcaagatatccttaaataaagggcattgaggtagataatgcacacagagcacttactagtcaacaggacttggtttgcatatataggcaatgcctgtctactgattgatgaagcctattatcatgagattgtatttttattaaaggcaacacttagtaattctgtgcacagatgattaatagccaaatggttatagattttagttaattagaatggttaagatgaaaattctgaatgaaataaattgaatcatttctttatattgatccattatacatgaaattattaaagcttaagattgccatgtaaaggtaaatcatgctatgagtattctaactaaagtttgaatcattttagtcatttcttctcataatataaacatgctatgattaatctaaaatttatttctaaatatttgctaacataagataatagcttaatccctttattagcaataatttttgttcactagcagctgctgagttagagcgataaggacaagtcactgttaactttctgttgtagaattcttctagtcctttcattatacggctgctagtactttttttctctacagaatggagtgagtgaaatagcagtcttataaaagagaagatattttagactaagtgagtaatgctgtccattgcagtaggaagaagggtcaattttttttcttacaatagcataaagattttttggtcaacaagttctgtatagattatacctaaataacctcttaatttcttttcttaagccctgcagtcataccagaagcaaatgaaaatcatttagaaactcagatttatcagtttatgatactacttgttctagttttttttaaaaagtttatattcaagaatatagttcatacacgtactttcacacacacatattcatataacatcctaagagatccatgtatatgtgtacatgcattttctatttatctttatattttgtgatgcttggcttcctaacatatgattaaaaatatctaccaaatatttaatttgtagctcctgccaccatttctacaatggtgggaatacctagaggcatggcccctaagttattatagaggatgcatagaaggacatacactcaagcactgtgagagcattatattggtaattatacactcccagcatagcaaggctggttaaaatgtgataggagaaaccacctcctgtttcacttcatacctgttactttctactcattttttttcctctcaaaatactttgcactcctctgacatttctccagtaattcacatctttacggtatttttttcattctaaggctacttcatgacacttgactttacagtatttgcagtgtgacatagtttatcatttatgcacaatgctaatgcagaataccatttcaatgcttgtgtccttgtctgtctttcattaaaaataatagcatcaaattctccttgaagtgctgtgtttattattttctgtatattcctgtgcatctatttttaaatctgtcaacagtctcaactgtgtaatcttagttttcagtaaaataaaatggtaaaaatctatcttcttatttgcaaattaaagtaaaagttatttttttaaaaaattttatttgtaatttttgtgggtatatagtgggtataaaataattttaaattgtagcatataactaagaaaggtactcagatttcggaattgtgaggaaagaaataatattttaatagaaaattacttacattgggcatcttggacactgcttttggtctagtcttcctgacaaataatttaagtagaatgtttcctgtattaaatctcaagagaagcaaagtcaatttacctgaaattatattgagatataatcaatatgtagagtgacttaaaaataagaaaagtccagtaggttatacagaaattagtctcattacttttcacaactcgttcttagggcaaaataatgtataacatataccatcagttaatgactcatatttagagtttgataattaaattatatctaacactgaagcagaaatgaagactgattgcttgtgtcatgtattgacaaaacatttatacactgtaatattttgaaacataattactgagcaacaatgacatgaatgttttacttaattgcatttgcttcagtatcagttatccagaaactccaaggcagttcttaagcgaactttctaaattcagtagcaagtaaccttttagtccagctcataaattaatgttttgacagccatttaaaatggcaagtaggtaaatttattaggaaacaatgcaggataaaattgaaaagacttggagtgggtacaactgtttgtgtttgactggctcaagaaggtttcacaagccccattacagtaaaaattcctcataagcagtattttaaaatattaaaatctacttgctaattctctagctaccaagctacgaaattcagaaggagttgtgttgtgttgttttgttttatttatttattcgagacagggtctcagtctgtcacccaggctagagtgcagtggtgcaatcatggctcactgcagcctcgacctcctggactcaagtgatccgcctgcctcagcctcccaagtagctgggaccacaggtgcatgccaccacaccctgctgatttttgtagtttctctagagatgagattttaccatgttgtccaagctggtctcaaactcctgagctcaagcgatcgcccacctcggcctcccagattgtaggcatgagccaccccatactggcccagaaggagtttgaaattagaaaattactgtggacaatattgcgaattcctagcttgtcactattacctctgttatgtacaatgtgtattatgtgtttacctttctccatccctttaaactgtgtataaaacagtaagtgtgataattaaccttctttccagtaatctttggaaagaagtaggaaaggtgaacaggctcaaattaaatgcaatctcagacattgaagagatttccaagaaaatgggagcaactggtcttgttatttatggtagttccctgacatacaactagccagttagccagtactaacaaacacagaaatggacttcatgttgagtagttgccataggtatataccatttgactgtttttaacatctgtattgcttacgatattggacatctctctcactccccacatatcatggtttattagtcagcttttggtaaaccgtgatagcaaacaactccaaaattttagtggcttatttgttctcgtttactgtgtgaatctgctgtgttctgctctgtacccgcttattctgataacctaggctaaaggagagaggaaggtgtgatagcaggacctgtgtcatggctcttaaaacttctgcttgaggccaggtgcggtggcttatgcctgtaatctcagcactttgggaggccgaggcgggtggatcacgaggtcaggagatcgagaccatcctggctaacacggtgaaaccccgtctctactaaaaatacaaaaaaattagctgggcctggtggcgggcacctgtagtcccagctactcgggaggctgaggcaggagaatggcgtgaaccagggaggcagagcttgcagtgagccaagatcacgccactgcactccagcctgggcgacaaagggagactctgtctcaaaaacaaaacaaaacaaaacaaaaaaaaaaacaaaaacaaacttctgctagaaactggcacatagcactttcacatttcattagtaaagcaggtcaaatgaaagcaagaaatgtaagccttctataggaacaggctcagtaagggaaaggcagctcatattaggactgtaatactgtttgtcacataggagttaatatttatatctcccaactgcaccaaccactgctccatccctactgtttatggcagagaagcacaatttttttttttttagcttttacatgattcttgattttcttcttaattactatttacatattatagaatgtaattaggaaataacagtaaaatcagtgacactggtgaatgtagagagattagtttacaaaacgtattatgtcatttatatccatactggtaacttcttactgcaaaaataaattggcaataatgtaggaaaaaaatattattccctccttgttttttttgtatagagtaccattctggtaaaggagccagtagagaaatttggagtaacaaattaaacatttttatttttcatgttagatattttcatatgtagactaatactagatgttctgctcttatattcatttggctataaatttgaaatattttgaagtaccaaaggttttaaagtaatatttcttatttatttaaaacacaataaaagcatataaagacacaaatagattttactgttttgttttgttttgttttgttttgttttgttttgttttgttttgttttgagacagagtctctgttgttcaggctggagtgcagtggcatgatctcggctcactgcagcttccacttcccgggttcaagcgattctcctgcctcagcctcctgagtagctgggactacaggtgtgtgctgccatgcccagctaacttttgtatttttagtagagatggggtttcaccatgttggccaggctggtcttgaactactggcctcaggtgatcggcctacctcagcctcccaaagtgctgggattataggcatgagccactgtgcctggcctcttcacatttcttatagaaaaatattcctatgaatgagtagcaaataattctgaacataaaaattgagattctgaatttccttcctgtcaaatcaaaaagccgtcagttccattatgtttttgttcagttataattccttttactttttaccaaaattttttcctctggcattctttttattattattttttaaattttgcccagggtggagtgcagtggcatgatcatagctcactgcagccttgaactcttgggctcaagcaattctgcctctgcctcccaacagctgggaccacaggtgcacaccaccacacccagctaattttttaatttttttgtagtgacagggtctcactatgttttccaaggtggtctggaactcctgggctcaagtgatcttgagcctcagcctcccaaagtgctgagattacaggcatgagccactgtgcccagctgttccccagtattcttaatgccacttgaatgattgattttataaatgggttcacttttcttttcattctttaattaactcatcaataatagaattagggcattgtatattgttattttataggacagccatctgtcttacctaacaaaatcagcataatttaaatcttaatttcatattgagcacctctattagggtaggcaagaatttttcttatttggtagcactacagtccaaagccaaaagtactttgtcaaagtgacagatttaggtctaagatatgtaccttgaggaattgatattgtaactttcttctttatgcatgattttggagatggaagtagcatagctaggacatacggttttatttatattgtttagtggctaaggaaggttaacatgaaatcttgttcaatttattttttgtatttgcatagtaacgtaattatcaattctccttcagtatgcatgcaatgcattgattcataattaattgattcccctttccacaatatcatcttccagtgctttcagaggatagaaatgtccactaatgcttaaggtgttctacttttttttccttcattttacggttacttccccatcagcatttcacctttttctagcacttttatccaaatcatagattttctatcactgtcaatatttgtattagtctgttctcacactgctaataaagacatacccgagactggtaatttataaaggaaagaggtttaatgaacccacagttacacgtagctggggaggcctgacaattatgggggaaggtgaaggggaagcaagacacgtcttacatggtagcaagcaagagagcttgtgcaggggacaagctctcatgagacttattcactatcatgaataaaacaatcagatctcgtgagacttatacactatcatgagaacagcagaggaaagatccacccccatgattcagttgcctcccactgtgtccctttcacaacacatgggaattatgggagctacaattcaagatgagatttgggtgaggacacagccaaaccatatcattctgcccctggcccctcccaaatctcatgtcctcacattccaaaatgaatcatgccttcccaaagtcttaactcattcagcattaactcagaagtctacagttcaatgtctcatctgggacaaggcaagtcccctctgcctatgagcctgaaaaatcaaaagcaagttagttacttcctagatacagtggcagtataggcattgggcaaatacagccattccaaatgggagaaataggccaaaacaaaggggctacaggccccatgcaagtccgaaatccagtggggcagtcaaatcttaaagctccaaaatgatcttttttgactccctatcttacatccaggtcacgctgatgcaggaggtgggcttccccatggtcttggacagctctgcctctgtggcttcgcagggtacagcctcccttgtgactgtgttcatgggctagctttgagcatctgcagcttttccaggtgcacaatgcaagctgtctaccattctagggtctggagtacagtgcccctcttctcacagctccagtaggtagttccccagtggggactctgtataggggctcccacagagcatttcccttccacagtgccctagcagaggttctctatgagggccccacgactgtagcacacctctgcctggagatatccaggcatttccatacaacctctgaaatctaggtggaggttcccaaacctcagtttctgacttctgtgcacccacaggcccaacatcacttgtaagccaccaaggcttggtgcttgcaccctttgaagccactgcatgagctgtaccttggccccttttagccatggctaggaagcagggcaccaagtcctgagactacataaaacagcaaggctctgggcctggcccaggaaaccattttttcctcctaggcctctgggcctgtgatgggaggggctgccatgaagacatgtcatgccctggagacattttcctcattgtcttggtgattaacatttggctccttgttacttatgcaaatttctacagctggcttgaatttctcctcaggaaatgggtttttcttttctattgcattgtcaggctgctgattttctgaacttttatgctctgctgcttttttaaacttaagttctgattccaaaccatatttttgtaagtacataaagctgaatgcatttaacagcacccaagtcacctcttgaacactttgctgcttggaaatttcttccaccagataccctaagttatttctctcaagttcaaagttccacaggtctccagggcaggggcacaatgccaccagtttctttgctaaaacatagtaagagtcacctttattttagttcccagaagtttctcatctctatctgagatgagcagcatttgaacaaagccattcaacaagtctccaggaagttccaaactttcccacatctttctgtcttctgagccctccaaactgttccaacctctgcctattacccactttcaaagtagcttccacatttgtgggtatctttacaacagcaccccactacctcagtaacaatttactgtattagtctgttctcatgctgctaataaagacatacccgagactggtcatttataaaggaaagaggtttaatggacccacagttccacatggctggggaggcctcacaatcatggtggaaggtgaaggtgaagcaagacatgtattacttggcggcaaacaagacagctagtgcaggggaactcccctttataaaaccattagatcttgtgggacttatttaatagtacaagaacagcatgggaaagacctgcccccatgattcagttacctcccactggttccctcccatgacacatgggaattatgggagctgcaatttgagatgtgattggcacacagccaaaccatatcagtattcattttgcaaaatgaaattttagaacagctatatagtgtaaaagttgtcaaagtcaaaatggaatcactaatgttaaacaaacaaacaaaaaaccctgacaaatagagctggaggaggctgtgaagagagggttctcatgcttgcacgcttgataaaaactatcataaaagactccacaaaaaccacaaccatgtacaaaggccatcacaactttactcaataaatacttctacccaacacatctgcccagcaactggctgtccaacctttgactcgtgtcactcttgttattgatctttatagccaaggataatcattttaaaacatttatcttatcctcctcacttttcctttaaaaactattgtcttcctaacttctataaatacacacattgtttactatgacacaggtattctcatgaaaatgctctttccaaataaatatctttcttttagagaacctttctcagtttgttattaaggttgacagtaacatgcctttacttagcagtaactttgtggggttttttagttttttgtttgtttgtttgtttgagacagagtgtcgctctgtcaccaagctggagtgcagtggcgtgatctcagctcactgcaacctccgacttctgagttcaagtgattctcctgcttcagcctcccgagtagctgggactacagacacgccccactaagctcagctattgtttatatttttaatagagacgggtttcaccatgtcagccaggatggtctcgatctcttgacctcatgatctgctcgccttggcctcccaaagtgctgggattacaggcgtgaaccaacgtgcctggccctgtttttttttttttttttgagacagagtctcgttccgtggcccaggctggaatgcggtggcgcaatctcggctcactgcaagctctgcttcccaggttcacaccattatcctgcctcagcctcctagtagctgggactacaggtgccccaccacgcccagctaatttttcgtatttttagtggagacagggtttcaccgtgttagccaagatcgtcttgatttcctgacctcgtgatctgcccgcctcagcctcccaaagtgctgggattacaggcatgagccactgtgcccagcaagccctgttattttttatgttgagtgtttccttgaagggcatgtggaagaaaatgccataaggtggcccatcttactttacatttctggtttagagtgatattattttgaatttctaccatagaattgaaaattatagccaatgaaaagcaatgtagctctttttctttctttttttttatttttattttttgagatggagtctatctctgtcaccaggctagagtacagtggtgccatctaggctcactgcaacctccaactcctgggtttaatcgattctcctgcctcagcctcctgggtagctgggattacaggcatgcaccaccacgccctgataatttttatatttttagtagagacggggtttcaccatgttggccaggatgatcccgatctcctgacctcatgatccgccaacctcggcctcccaaagtgctgggattacaggtgtgagccgctgtgcccggccttagctctttttcttaatgagaatgaaggggttttcgtgttgttgtgtgtttgcttgtttggttttggttattatatctttatttaactcagaatttaaagtcaaaggtgctaatccaccctggatagacccagttaaaagcagagtgacttatcttccatgaatcttggtttatcatcaggatatttaaccttgagctcattacctcttcacctcccattagaaacctggatgggagacatcagttttggagaagatagtctaatgcagtttttttccaggttaatcaatcagtcagtgaattaattaattctttaccctttcttgctttctttcttttctctcttcctccattcctttctctctctctcctggcttccctcctttcagtagaattctttctctaataaaattacacagaaataacacaatctattttattacattgtttatttcagaaaataatttgggttatatgtaactggtaaataagggaatagcatcaatataatatagaagtgaagttggtttataataataattcccaggacttccaagttgcagcagctatacataaaacacactaaattgaatgtagcaaccaagtgcctgtgtcccattcacccgtgcccccattctaccttttggctctgttcagccgtatcctctggacctgatacctgttggaacagagagttgctataggatggtggagatttttgaccgtcagtttctttaatggttattgggtttttttttttcaggttttcactttctttttggggtcaatttttatgacattttaaaaggaacttggttgttacatatgatatgttatctttagggtgccttaggcaccttaaagcttgaaaattccaagctaatttccaagattagcttggaaatgaagatttaggtgttaacatgggactgaatgaggtttctaggctgaggctgtaaaattaagagtgcagggaatgaagaacaaaatttgtgtctagtgtagcagcctttctctctctctctctcctttcttttttgcgacggaatctcactctgtcacccaggctgtagtgcagtggtgccatctcggctcactgcaacctccgcctcccaggttcaagcgattctcctgtctcaacctcccgagtagctgggactacagggattcaccaccatgtccagctaatttttgtatttttagtagagagggggtttcaccgtgttgaccaggctggtcttgaactcctgacctcaggtgatctgcctgcctcggcctcccaaagtgctgggattacaggcataagccaccacacccggcctctctctttttaaaattaccattttcttcatatttatcatatgccatagtctagccattataaccatatgttatatatacatagcaaggagaaatgttctaagtattagctaatcatgcttgataggcatagtaagagaagacagcgggcacagtcattcgtcttttgtttcaacaagagtaaacttgttaaaaacaattggctgaaaaccccccagttatttacatatttgatgcttttttatttttgatttttgatatatgtgtcctttcttctggtttaggcctatgtttgcttttttatttttgatttttgatatatgtgtcctttcttctggcttagcctatgtttgcttttttatttttgatttttgatatatgtgtcctttcttctggcttagcctatgtttccgagggaaaacaggccccaaatcagaatattcaaattttgtattttatccatctatcccccacaaaagtgtcttgaatatgaatggttgttccccttttttaaaattaggaaaacaggtttaaggaattgattttacctaaggttttctcatccttgactcattggcttacatctttattttccatttcccaaggtaaaacatagcagtttggaattctagctgagtgtcctactcatcaatgtaactctcacctctttatttacccttcaaagataaataaaagccacacacacacacacacacacacacacacacagacacacacacacacaaagaaaaaacatatttacccttcgtttactgccctgggaaaatggagatgaatcctttaaatatttttcctttgccagctggcacagtattaacttttgtcagttaagggtactgacacaatgccattaaaggaggaagggagcttctttactagtttttgagtgcttgcagcttccctggctcctaaagtgcaaaatggtcatctgcactcaatggcctgtagcttcttgcagaaccctataccctatccacccacgaggcagttttgtagcagagtaactctgctgcttttgctgcttgtagcaatagcgtttggctcctgcagtgcatggaaaccagcagcacctagcagccaacatcttctgggtggttttatagtggagtgcttccagtgagacaccacccatgaatagcttttcatgacgctctaaaggacagatttccagcaagttctgcttatgtagcaccacagcatcttctgtgccatccagtgagccatagctgtgacctttccaacaaaatctggatcttagtctggggatatagtaggtattctttcttggccattccgttttagttctaagggtggtggttgcgccttatcatgttctagagttctccttacttcttagtagccaatctctggttattccagtactctgtttagttataataatgattctttatgttgaattttccctgttcaaactcctgtgtgatttctaatttctaattggaccttgactgatatattgtatgtttgtaaaatgcatggaatataaatggctaattatgatgtttctttagataggcattcttgagcacatgtgtctggaatatatttcactataatgttagttttgatgactgtattgattttcaaaactgtcagtttagaaactagaattttagatttatcaatcagcaatgtggtgttatgtggctaatagattagacattcatctgttgatgagttaaaaagctctccctggaattaaaattgcttatcactgtatagtactttgcatacatttattaatttccttagtaattttatgaagcaggttgcaggtatcacatttctgtaagaaggaattaagtctttaaagttcaaacggtattccttaatatccttggatatttcttaaccatcatatactgagtttactaggacatatagcacttgatccgttaaaactattacatgcaatgtcagagtttgtatgttgtagatgtctttcatgtcactccttctctgggccctgcccccatcataaacttgaataaatttgtgaaatatctttttaatatttacttttttccccaaaagtcacagtacattaaattgaatgcatttatattcttatgtcacattagcatcactttagcttactggatagtattttgtttttagttggttgcaagtgttgatttttcctctttcagtttgcaaaactatatgacaggaaatctgtagctaaatatcactttatgatttccatctgttcaagtacaatagtgtttatggcacagtccagattgcaatgtgatagaaatatcctattatagcagatagaattttaaatgatcattgtacattctaatgagaaaacatttttaaacaagtacttcacttaatttcaaagcagagtaactgaataatactacaatttgatgacagcatctgttctacagagtgtgtttgtgctgtcaacaataaaaactttttctgactcccatagaaatctatcagtttgctcaaatctgtactaataatggaagccaagtgggcagggagattattgtataagtcaatttgaataaccttaaaattttttgtttctattagcatggagagtatctctcattattttctgtgaaatgactttgggagtagagctggagatgttattttggcctttttattacgtgacagtaaaatttttgctaaattatattttgagagtattaacatttactaaataaaaacaaacccctttatcacaaggaactctggccatttcaaatcttgttggctctaaagttgagggatacaagaaagcagattaaaatgatggctcctggagtgtcaggtgttagtaattccaaggtttttagttctcacagtgtatatttgcctctattacactgatgcaaatgcatctttcatgtctgatcagctactatttggtcattcacttttatgcttcctattctagtacatgcagtgctgaaatgaatgggaaaaaccactttcccacatgaatgctctactgcacttttatctcaaaaggagcattgtatttcttgagtttccaaaggattttagataccattcttaatttaattattttatggccctttctctttaggtctgtattagtttgtgagggctgccataacaaagtatgacagactggatggcttaaacatctgacagttttggaggctaggagtttgagatcaaggagatcaaggtgttggcagggttgatttatttgaggccccttcccttggcttgtagatcatcttctcactgtgtcttcacatagtctctgtgcatgtctgtgttttaatctcctctcctgtgaggacataattacctctttaaagaccttgtctttaaatacagttacattcagaggtactgggggttaagacttcaacatatgaattgggggtcagggaaacaattcaggacataacaagatctttagccctcatctaaatgaaccatgaccataaacagttctgagcctcattctataggtacatcagttttcttctctacctttggttatcaaattccttagtaccccagctactcctcttttcccatttaagatgacctttctcctattccagacattggctgggaagttagtcaagaggtaacttaaggaatttagtgcagggtgtctaccttaagattttcactgatttgccttaaatcatgttcttccattacatataaaaaaaattaccagcaggccttgtccttcaggtgtgtttctcactcccagaatacatgttgactccacttgtccttcaggtgtgtttctcactcccagaatatattttgaatttgtaagaagtacgcagtttagaccttgttcagaatccatacagtattcattagttcccccctctagtcaatatttgtaggccctacaaacattccatgttcttccataaatcccttcttgagataataaagaagtatagccttttaaaccagctactcagcttgcttgtcaaattcatattttccaaacaaaaattaaataaggcttatctgatagttggtagttgacaatattattggtggtggtggtgttatttatttattttgagacaagatttcactctgtcatccagggtggagtacaatggcacaatcactactcactacaaccttgagtttccgggctcaagggatcctcccacctcagtctcctgagtagtcggaactacaaggtgcataccaccacacccagctaattgtttaattttttatggagacacagtctcactttgttgcatagtctggtctcaaactcctggcctcaagtgatccttctgccttggcctcccaaagtgctgagattataggcatgagccaccaagccaagctgacagtgttatttcataccaccgatgatacttcagagacccatcaactctgactatacatttcaaccaaaagttttgttctcatttattttatgccaaattagaaaattatttcctacttcttatgtagtttgcaagatcacagaagaatctgaaagtaacacagtattgtactttgagttaatttctatgtatggaggtatcaggtatactgttttgacccagaattcccaaaattcttttgagagattagaaaggaaaattagtagaatgggtgaagtcagcaggtctgtgttgacagagattattttaatttgaaaaaaacagtcggctggtattattaagtggaaaaaatgtggatcctttcattttttaaagataatttttcattacattaaaaaattcaagtaaaatgcaaggtgacccttaataaggtagctttcttacctgtcatattagtaagatttacaaagctgccaacacaccattttcacagttatgggaaacagacatactcatatattgttatgagcgaatacagtcagttctgccatagttcaacatatatgttccttggctgtgttaggcaaaattgcaccataaaaaacacagagcttgtgagaaaaatgagattaggagcacaacactcaaaaacttcatcagtgacacaaaatttaagaccctaataaaaattgtggcacagtttttaaaatacatgttaaatggctaagtacatgaatggctaaataaaataaacatggtactttaccttgaaaaagacctgaactttgcttgtggaagtgggccctagaagggttgcaccttgtgagttaataaggtacctttcttacctatcatattaataagatttaaaaagctgccaacacagtgttttcatagttatgggaaaacagacatattcatataccattataaaggaatagtcagttgtgctataataaagaagagatagttcttgtcctccaggaactcaaagtcaggcatatgcaactcaaaatcttccatattggaaagtggtagagaaaggttattcaaaatgggttggaaacttgtaacaatgaatgtgaatggttgtggcttgtgacacatgtgagctcatacctctgtaagctgaggtggatgtaggaggtacgtatgatttgtatatgcctaccctgctctgtttagctaggtacagttttctacatttatctgctttcttgaggataaaatcaagcataaacaaatacaaaatttgtgttatgtccaaattgttcccaatatgtcaattgtgttgtaacaaattcaaatttcaaagttagtgtaatagcagaactaatgagttggtataacttttatggagaataatttggaaaaaatatacaaaattttaaatgtacatgcccttttaaaaatctgcaaactctagttatcctaaagataaataacgacttatgcaaaatgatgtatttacaaggatattcattgcagcagttttttttgtcataaaaaaagatcataagcatcctaaatgtctattcatagatgagtggtaaaataagttctggttcatgcattctgagaattaccgtgctgctgttaaagaaaaccacttatacaaactgatgtgtaatgttcttcaagatatgttaaaaaaaaaaaaagtagggtttagaatagtatgtataacatgctatcactggcacaaaaatataatatatccttgtgtatctctatgaacagattaacactgaggcatatgctagtatcttgatatgccagactctgagttccttaaggacaagaactgtattttatttatcactctgtcttcaacaggtagcatagtgcctagctcatattaggtgcatgataaggatatattgaatgggatagatgaatgtgtcttaacattcatgtctcagaaaatatgataaacacaattctaaatgtaaaattgaggattattctaaggtatcgtttgtgttactattttttttcaagcaatgacttatgcttagaacattactgcattttcagattttgatttaaatatatctattgaggtcatgccgccactgggacatatccatagtagaaaacaactgatgaagagccattggagaaagggctaacaggacaaagagcagagttggcattaggaggcattatttaagttctgtgtttctccaaaggacaaaaatagaactaatggatgtagaagatatagggagacagatttcagcttaatataagagcataccaataggtattaacaatttaaagagcagtgtcttaaagacttttggtggtggttatgcagagattgctatcaggattaatggaaggaggaagcatggtgaaattgagagatcagtagtcatttttaagaatcaggcagatctggctgggcgcagtggctcacacctataatcccaggcactttgggaggccaaggcaggcagatcatgaggtcaggagttcaagaccagcctgataaatatggtgaaacccccgtctctactaaaaatacaaaaattagatggcgtggtggtgcacgactgtaatcccagctaatcaggaggctgaggcaggagaatctcttgaacccaggaggtggaggcttccgtgagccgagattgtgccattgcacttcagcctgggcgacagagtgagactccgtctcaaagaaaaaaaaaaaaaaaacaggaaaagaaagaatcaggcagattaggtttgagtgctctgccacttagggactattgtgaccttgagcaagaaacataaccttttaaatttccttaactatgaaatagggataattaaatgtatctcatgggattgctgtaaggattgagaaaaggtaaagtaccctacttcatgttatgttaagccctcaataaatggtgacaattgccattgaaataggaatacttttttaggtagaaggtatatggtatttggtttctaaggtcctttttcaacctgatatttcctaagttttattttacctattttaagtaagaaacatttatacatctgtgtttcaattgtattataccaaaaatataatttctgaattgtgagaaattgtttattaaatgcctatataacaatcatgcttaatgtatgttttaattattaagagatgatttgcatttaattatctaaggtcgactaccacagtagagactgtaacagccatgattccttcagtaaaacagaaattcactatgcatttcagtgagggactataacatagagaattggttacataggtgtcagaggattgaatgagcaaaagtgagagctctgaggtaactgagtgataataactgctgaaagcagctaacacttctggaactggagaagtgaagaacaggggacctgcagactgggactcaaagacctgaggagatggtcctgcctggcggctgttgctacctgtaaagaattagtatgaaacttgaacctggaacccaacagttgtggccaagggcaaagtattgttgcttgtaggacacctacagcaatatcaagtaaacagggaacacatttgtcatgctttctagtctccctctagtgttccttattggcagaacctagcaggaagccagatggcaaatgggaaatacagttttcagatcctcagccctaggatcacaaagcagagtataaaagggtaaatttggaattaagacacaatagcttgacaaatgcacagagacatctgtgtagaatatctcatattttaacaccaaatttatgtatttttcatatagaaaatttgcattttaaaatgtttttgtctagaaggaatttgcgtgtacatatactttccatcaataatttaagatgtgttcctttcagaaaggatgactgagttcactaagaattccacataatttgcttttctccccacaacccccaactcttgctgaaaatttgatataaaccctcatgaatctctaggaaaccttttccttctttattgcatgtgattcttccaggaattaagatttgcagaatgtaacatgaattaaaaattaaatttgaaatatttgcagtcatatgtttattgttactgagtaaaattgctagtgtggcttcagtttcttgcagttaaagcagggtggacttgtagagctgaggctgtttctatgatttaaaagatactgtgttaaaaaaatatattcttattcttctttgctaaagtgagccaatagattgcaactgtatttttgattaaatatagtttgatatttttgcaaattatttttttaaaagatactagtattcacagcaaatgtgcagacgtaactaagacatccccacacctctgttacaactagatatgttcattcgattttggtagttatacagttcccagtgaagtcaccaatgtttattggccccttccttcactgagatacgttcatgggttctgatgagaaatacttgtaattattctaagagcatgctttagcatgcaaccttggtaaaaatatggtaggatcatactcttaaaacatcttttcttttgtctgagtgcaggcattaggtaaattatgtcacacacagcactgcagtgatttatagaagttaaataaatgttcgtaagtaatcttaatacctttaaaatattttgggaggtaaggttttacattatgaaaatattctgagcattttataaaattattcaacatttatactttggttatagtttttgttaaataggaaatatctaattatataaaaaacgggatatattggcagagtttcttaataggagttctttttgatgtttcctttcatctcattagttacaaggtttaaattctatgccctaagttcattggcatttcacaggtagactttttgctgctattttccaactttagatgtgtgaagcctgtactacagcctctggatgaatggcaacataaaactagggtcttcaattaccagcttaaaaaaagaagatattaaatataaatatcagaaaacttgattataaacactattgatgggaagaaaaaaaaacttgattaaaatatcctgaattgtaaggggacccattcattaagatattgattataatagtgaaatttaaagtcaactggtttttctaatttatgttaatcataattaaccctccataacattgtaatacatgttggtaatagtctgaagcagactgttgtatgtatagaaacaatttcttcatatttttaactacctgaaaatatgagtaagttaacagtagttgagagtagtacagatttttggttttgaaataccattagaatagcagtgtcactttttaagcactgtgcagcttcctgtgttattcccttctttgtccaactgttactttttcttatgagaggcttccacaccctatttggtatccactttctttttatcaaataaagataattgcataatgaaactactgtgatttcatgccctaacttattcactgtctttgagtttcataagataagcactataattaaagtcattttaccaacaattagtgggaaggaagcatacagtggacaacatgttttaaaatcatagaaaggaggaatgcatgattttagaaatctgaatgagaactcatagcatgtagagctcaaattattcttcctcaactagcagcagatcaaaataggtggtggtatagtttgaaaaagcatatttaacattatcacataattttatactgggaaaatgaaaataaaaaagatgatgttttgtaatacagtccacatgagtaaggtttgataactggtgggagtgagtagttacagattctcaactgagaagggtggcaaaaaaaaggcttttatatttatcagaatgggacatagatgttttttctttttttgagacagggtctcactgtcacccagactggaatgcagtggcacgatcttggcttactgccaacctctgcctcctaagttcaagagattcttttgcctcagcctccctagtagctgggacaacaggaatgggccaccacacctggctgatttttgtattttttaatagagatggggtttcaccatgttggccaggctggtcttaaactcctgacctcaagtgatctgcccgcctcggcctcccgaagtgctgggattacaggcatgagccaccacgcccggctgggacatagagttttaaaatgttaagaaatgctaccttagattgtatctggatatcttctggtattaattgttgcctccctttcctgtctcacaggtctgtcataagatttattttaaagtttaaaccaagttctagcctaacaatagagggtaactactttaagtagacaatttcacgtacactactagacaagtgattttcatgtcaggagaactccaaactgagactcccatctaaggtacatctgggccacaatttctaaactgtgtgccaagaaactcaaatcctcacaaaggtgactcaaggccaactcagagccaggggagaagcctgctggtcttccaatcgcccttcaaataatttatgttttttacttagttttcaaaagactttactgggagaagaaaatagttttactgtcttaaaaaaaataatttgggtacccattgaagagtatcccaacaaatagcaccattttctttcttgtggctggcatagccagttgaggacattctgtttttttaaaagagcgtttctcactgttttcccacatgagactgacaacattgttttatttaccaggctgtgaataaactgtagaaaattagaaagtggattaaaaccttattttggatattttaacagtgggtatataccatatgttagatacatgtatacacacacgtttttgcaaactctaaattttgggagaatagcaacatattcctaaaggaatttctaaagagcaggtactggatagttgaaaagaattacaggaaatgactagtgtaaaaacggaaaagctgatatttttgaaatttactgccactgttctgttattatatttgtactaaaaataagtttcttctaaaaagtatagtttctgatttttgtttttaatctctactgaaatcagagcctactttatacaaaggtagtgaaacaaagtttgccctagtgttctattcctggttgaaataaccagatgcacttagttttagacatgaggaacaaactttcccaagtgttatctttttatcttaatattttaataaatagttatataaatattagcaaatctaatccagcagtgttttaaaataataaatctggaccaagtagcatttatccctggaatgcagggatggtttagtattaggaattatacctaatataatttagtagattagcagactaaagaaaatattatgtgagtcataaaccatgtatgggcacttttgccacataggtgcaatgttttaacagtcaaaaataaccaccttcttttaatagtgtcatgtgaattattctttttttgcattagaatttctacacatggtttctgttactattgtactgttattctaaacatttgtttgattttaagtctttatatcttttcttaatgtcattcagcagggcgtcaatagtaattctgaaaaatattgtcccagaaatcagtaactttggggaaaaagttaattatggtaaaatgtagtgaagaaaaccaaacaaattgatgttaaatgagagacaaaattgtacaaaatattagtgataaagctgagaaaaggcaacagtaaaacaaaaatgttgcagcgattatagatttttgtgctctcacaccatgtcatgtacagtttctttttcctatgggaaaattaatactcaatactgagttttgacttatgtgaaatctacaggaataaatacttttcatacaagaacaaaaagaagaggtacctaatttagctagagcaggacaggaggatgatggtagggaaaatgactagaaaaatttatccagatgaggaagtcaaagcttcagaaggtgaataaacatattcaaggacacttacaaatggataaagtcgaagtttaagtgtgttggtcttaggagtagaattgagtatgactctatagtatgcttactacttattttggtttcttgcccagaagaaaggtatttcggtaaaaaggaaagcaaatttgtatacagttttcctttcaaatgcagaagaagcaaaacacgctagcacttacaaatattaatttcagcttgctcttatctgtgtttttgccagtttgtaggacttgctaaaaaaaattacacagccctggggtccttagctaaccaacacattcttgttactgaccaggatatgctggttgactgttttaccatgtgcgttaaattaggagaaaaagatatacaagttcatttggcttttatgtgcacagaatcttttcaaattgtaaaaataaaattacctatccactggaggatatcttgggccaggagttcaagaccagcctgggcaacataggagaccctatctctacaaaaagtgtaaaaattagtcaggtgtggtggtgtgtgcttgtagtcctagatacttgggaggctgaagcaggaggatcgcttgagcccaagagttcaaggttacagtgagatatgatcatgcctctgcactccaacctgggtgacagagtgagaccctgtctcattcattcatatacacagacatgcatgcacacgcacacacgcacacacacatgcctctccacttgaaataaaaataagttaattcagtattttgaagaaatcagagtatttgacttagtaatatttctttccagattttttctaagtaacaaagaaatttatttgtatattgtgatatgattaatccttcagttaatctaagtttagccatataatgctttctttctactttgtctcttactcgaataataagaaagaaaaaatttcacagacaaatatttctgttcttccagtgtcctgaatacagagtaggactgtaagaattttaactaattcttattatggggtattatgcaaagcaaaactatactgagagtcagttgttttattctcaggttctgtaaactgagactaagttgtttggttctttaagtctcagtattgttttgtgtttcgttttgagatggagtcttgctctgttgcccaggctggagtacagtggcctgatctcagctcactgaagccttgatctcctgaggttaagcgatcctttcacctcagcctcctgagtagctggggccatagactcacgcccccacacccagctaatttttgtatttttttgtggtgacagggttttgccatgtttcccaggctagtcttgagctcctggcctcaagcaatctgcccgcctcagcctcccaaagtgctgggatttcaggcatgtgccacgtcacctggctaagtctcagtgttcttatctccaaaatgggataggcctatatccgtggaaatactgctgctgcagccctattccagaccaactaaatcagagtctctagaggcaaaactcagatatacatgttttctaaagttttctggatgattctcatgttgggagtcatcgttgagaaccactgaactagattatttataagattcattctactcagagtgtggtccacggactggctgccaatataccaactgtttattgccagtcctcaagtacatgtgcagctagcttgtgccaaaatgtaaatcagctaaagcactagtgtgctatttagtttggttgcattctttttttggtagcaagactattgattaaggaaatagtaaatttaatttacactttggtacaagctccttatttggtttcagaccagcagttggagtagcacttctttgagttctttcctagttcttaaattctgcgactgaatatataatatatggttgtttaaaatctgctgatctacaatgttattgcaatactactgaacattataataaacagaaggttgttatttagataatggaaatggaagaatttggaaggttaaaaatgttggtgacaattttttaaagaaaaaatgaaatgtttaggtgccagtcttctaaaatggaaaaatgtttcattcaaccaccatattatgactaatattttatggcataatttactggttcagtgcaccattctttctttattgttgcaagagataattgaattacacatggctaattattaaaaatgattgcagggcagttttaaaatgtaaaaaattccatgtgatatttaataggacttcaatagtggtagctgaagaaaattaagaaaataattgctcttaaatatatcagttaatcagtaaacactgttctgcaaataattcatatggaaaggattgtttatgagtagactgataataccaggctcacgagaaagttttgactattatagaaaaacatttaaaattcatggtatgatgtgaaacttttaacttgtaacctttatttttgaagacagtagtattaaaaacagtgttgggtgagaattaatctattttggatatgtgtttgtgtcaggtctctttcccagccttgtataactttatttgttaaaggacgaaaaagagacctgaatattatactgctgatttaatacaaagttcattctgaacccccactgtcaaaataaattaaggtcaattttgatttctctcaatacgtttgaaactcccttttttattattatgatttcatttatagaatattataggaaattatttgctttaaaaagtacctcaggacaagtattcacagattgttccagatcagcagttacagctctttactatcagagattaatttacaatgtaatcaggattctccttattcatagtcctgcttattatctaccttgagttcttgttcttagtaaaaatgcattgttcttttttcaattatttggacagtgaaggtaagcctaataacagatattgttggcctaaaaaaactatgaaatgtatatatggaaccccagtataattaaaagttttgaataggctatatgatgggttgactccacagattttctgggtaaacagctgactcagttagaccatgtgtgattactgtcctttgcaaaaaatagttttcttccctttcatctgactcattcttagtctttggtttttcctaattcatttagtgtgttgtaaaccccatcttccaatcatgatgaacctccagattaaaaaataataatgataaatgccattgtttaaatgttttaataaattgtagaacctgagattatatatatttatgaattgttatggatattttcaaaatatacataagtagaatagtaaaatatatccctacgtatttatcaccaggctacagaaattactgacccatgtctaatctttttccatctgtacctttccccactgcagtatattttagacatgattccattaattcataaatattcctcaagggaattatcaaaacatagttggtgaactagaatggatgagctccaagaaccccattaggtaatgaggaatctttgctagaaagaaatacggaatttctgttagagttcaaagaccatgtcacataataactacattacttagattctgtgcagtgtatgaaatgccttcacagcagctccatagtaagaacctgaaattatcttctttctctaattcttctatataaatttttaaagtagtgtttttttgtttttttgtttgtttgtttgttttttaaactgagtttcactcttgtcacccaggctggagtgcaatggcaagatcttagctcactgcaacctccgccttccgggttcaagcaattctcctgcttcagcctccccagtagttggattacaggcgcctgccaccacgtccagctgatttttgtatttttagtagagacagggttttcactatgttggccagactggtctcaaactcctgacctcaggtgatccaccagcctcggcctcccagagtgctgggattacaggcgtgagccaccgcccccggccttaaagtggtaaattttttagtttgcataatactttgacttttgttgacttaaaattccttatagtgaataacagtataccaccacagtgagcaatgatgagcttaatgagggacaggaatggaaaaattacagttttactggtttagaagttcagacacagtagctaacatattgtctaatgagtaatattttgcaaatattgaggattattaatttttaaatataaagatgtagtaatagttctttggtaagtctaaaaaataagtagaccatctacccttttatttgtttcaaagtgtcaaaacaaaaatagaatcaatggtgagaatggctttgatgaaataccagtgaggaaggtcacagtaaattattatttcatgacaaacaaaaatgtaaattcttttacattgcaaatataatattacaagagaatagcaaatttacagtatacacttggagaatcattctaaagcagttgaagtctccccaacaccacacttcaattttttgtgatctgtggtctccagagtaactattataagtggttttcccagattctggaggggagaaaataaattaacaatggattgataactttattgttcaagctatagtaattcttttcactgtgagattttacataattcactaaaattacccttgttttgtaaatatggaaccattcaacgaactacttttgaaaatgcaaatattgtactctagctagtacaatgagctctaggaaatcagaatcacattttgaaagaatcttgaggtttcaaagcctttcaaattctctcagttgagaaactgttacagtgtaaagtatatgtacgaagctttcccttttaaaagacaataaaaaatagttttgaattgaagagtaataggattagtaatctttataaaattaaagagccagatatgcccattgttttcagctaaataatggttccttaaatatgtccatatcttaatccccagaacctgtgattatgtcactttatatggcaaaaaggactttgtaggtgtgattaaattaaggatcttgagatggggcgattatcctggattatgtaggtagtctcaatgtaatttcaagtatccttataagagggaggcaagagaatcagagtcctaaagaaatgtaatgacagaagcaggagtcttagtcagtgagagagagattttaagatgctgtgcagctggaggatggaggctcagtccatgagccaaggaatgaatgcaggtggctcccaggagctagaaaaggattttagggaatgtattttcttctagatcctccagaaggaacataacctagctgacaccttgattttaggacttctgacctttagaactcttaagataataaatttgttttcctatcagctagtcattttgtcgtcatttgttacagcagcagtaggaactaattaacctatgaacaatttttaacctatcggtattgtaagtagtacttctaattattcttttaaatatatctttctttgaaaaacttattcttctttaggattcagacttttcatgtactcagggagaataaatgagtcctgttctaagttacttttttctcttggagatatcacatagttgagttcatggcctagaagattttctgatgtttgtacatgcccatgggagaatgtgttatcataataatttttagtatgcagcctcttgacttgatttttcacttatagtgtagaccataatatttgtcaatttcttatgcatctactgtgtatccagcattgatatagacatcttctgtacataatacattccacaataaccttgcaagtttggtattatttttattttataagaaagtatcctaagtatgacccattagtttgaaataaattagtatttgttgtgtaaatctttacctcccagtattgttgtttaagaattaaaacaggttgttcagagaagacgaaagacttttttttttttttaattattactatactctaagttctgggatacatgtgcaaaacctgcaggtttgttacgttaagtatacacgtgccatggtggtttgctgcatccatcaacccatcatctacaataggtatttctcctaatgctatcccttttctagtcttccaccccctgacaggccccgatgtgtgatgttcccctccctgtgtccatgtgttctcattgttcaactcccacttatgagtgaaaacattggttttctgttcttgttagtttgctgagaatggtttccagcttcatccatgtccctgcaaaagacatgaattcatcctgttttatggccacatcatggtgtatatgtgccacagtttctttatccagtctatcattgatgggcatttgggttggttccaagtctttgctattgtgagcagtgctgcagtaaacatacatgtgcatgtgtctttatagcacatgatttataatccgttgggtatatacccagtaatgggattgctgggtcaaatggtatttctgggtctagatccttgaggaattgccacactgggagaccaaaagactttaaagcactgttaatttaattgggaagataagaaatactattcatattatagttgagatttgagatgggctttgaaggatgaataggttttttgacagcaattggagggaggatattccaagtgaaatgaatactgagcaaagactcaaagatgagaaaacatggactaggttataggaatgtaacagtttggctagtatatttgtgtagggaaaaaataaaagatatgctggaatgaagtgaaaaggtgtttagatatttccaattttgtagaattttatttttaattcagttggtgtactaattgtaaaattaccttgaccaaactgatatcaggatgacaatgtcaacattgcacactctttgaagacagttctcatttgctgaatgaatgaatgaatgctgacccacacattttcaaggaaaaccttggttatgttcaatacatgtattttaaaactgagggaagtatgtcctttctgagagattgtcatcaacatggataactgaaaggttttgatgcttaaaaggataagctccaaatatctggaacattcacttgcatatatcactacatttcccaatagtatttgttaaattaaaccttaggtaataaagtgctagggttctttttcctgttctaacgaagtgaatatcataaatcaattcatttgttttgctgatttatcacattcatgggtgctgacttttttttttaatctgctcccaacttttgctttatcgtcattgaaatatgcttttcttctggtggtgaaagtagtatgtgaatgtttaatatgtaattctataatactgtgaattctgcatatcttgttctgttttgctaaaaaagtgaaaaaatatttccctgtgatgtgaaacagccattgaagtttggtgagtttatgagttggataactattataattactcagtgtatcttgctgttgaaaagcataagttaaaatgttttcatttattctacttggttgtagttataaaattatatggcccaataaatctgtacaataaatggccttttaatatatatattttaatttttagaaattaaaagattacagaaaagtccaaaggttatgtcagaattatcaaacattaatatttttgcatatttagctatccttctaaaattacatcaataatatgtctttaaaaatagaatatttcaaataaagttgaattttttttttttttaccaccatctccaattctgatcctctgtcttgtataaagtaacctattataaattgggtatgtatgttcctagtacttttttggtatttttactcatttgtgtaaccatacatttttaaattttttatttgaagagatggttatcatagtgaatgtattctacaacttgcattttttcactcaataattctgatatctagccatcttgatacttccagacgtagttcattcttttaactgctatgtagcatatatctataatatatctctaacagattttagattgtctgcagttatgagcagttcatctgtgaacatttttcttcatattttcttatacattcaagcaaatgtttttctagtaggtgcctagaaataaaattgcatggcatatgacagtgaaaatctttatattgttaatgattaatgtactttaaccaatagttttttagtcataaatgactgtagactcttacttaatattatagtttttaaaacttgtcaaattttatttagttaggtcacaaccatctgttttatcaaggtggatttggtctgttctatgacaatatgctgtgttcttaacaatcagcagttatctcataatcttataactactgaggaaagcagtgaaataaatggatggatgcacagatgggcaaagtctatcactaccactgaaataattattttaagtacatgccatatttaactgtgtcaatacattttattttgagtttggggatgccatcctagaaactgaatatacatgtaaataattaaactgttgtatattattccaacaagtacatttagggtactgttgtaaaacattttcaaaattaaatgtcaaatggaaattcaaattcaataaaattaaggattataaaactaaagctaagcatgttgtatgtaacagaagttattctggaaagtcctgcaaaaattagaatttgcattcatattgtgaattactgtactgctttaaaaaggaacaaggaaggtatttatgttttgatgtagaaagatcttgaagatctatttaagttacataaaggcaagacaaagcaaagtacatattgtcctaatatttgtgtaaaaatgaagtatttgttttaacttacatatacgtgaagtgatctctgaaccaaaaactaataatagtgattatgtgttgtgaaggttgggaattgggcagatagatacagaacaagagagaaactaaaaaaaaaatggattctgacagagaaactttttacatacctttttaaaaataccttttcacatttgaagctttgagtatattgccgtttttttaaaaaagtaatctataattttaatatttctattgtatacaattgaaaagtatttttaaatttcccatgtatatggaaaaaataaattagtaaaaacaatcatgagccaaatgacaactttggctgaaccctgtactgatatggaaggtaataatgatacgtgggttagtaataaagcacctctcctttggtaattgtaagggttctagttttcaaaatggcagttcatgactttccacagcctcttcctgtggtgaatttctggccagttggatgacagaaatacagggcttgctaaaagttaaagtatcttggcagttctggaaagagaccatctaaaccaccagccaatgctacctcagcaatattaccaataaccagttgttcactaagaaccggtcagggcgcggtgtggaccataggtatctttgctattctggactgttagtttgcttcctgatgtgcctctgcttatcttttcttcctctcagtttcattgggatcctcagctattgagttctgtcctggtgcattccagccccactgcaaaagaataggaatgagcatctaacacatccatctctgaatgcagaagaggttgaagtataacaaccttattcattattattacttgcttaatgaatttctggatttttattatctgtcattaaatatccaggacaggtgtcatccatttatccttatatcagttcagtaatctattcagtgaatatcagaactgggtgacatcctgattttaccacttactggctctgtggcactggctatggttttatcctcacagagcttcagttgcttcatctttaaagtttgaccaatagtaactaattaaacaggtaggtggaagataccatacgtaaagtttctagactaggtgccaaagcataggagtcgctcaagagatggtagctgaaaaaggaagtttcttacagtttttgatggtgtatggagtgacagtattcaatgcaagtagtgtctaatttgtgtagtctaattagtggcattttaaaatcccattgtaggctttaaaaaaatctgagggattgaatgttgttcttcttactatattagaaaagaagattaagaaggaacaaaagtagtttccttttaatagatccattaatggaaaacaagcagatttctttggaatgaaaaataatggaaagttcataggcaaatgcttgaaaagcatttttccccacagaggacagtttagagattttaagaaataagagtctcatgtttgtggaaaattagaaataatacctccttattctgatataattgagcaagaattgaggactgaatttccatctctgtctccccctccccgctccctgaacagagagattttgcctttcaaggtctcagtctgaggatttttgcttgatataggacctgtattcttttctcattctgttactgtgatatttttagaagtatccattttccttctaatatgcccattctgcccgtctttgaagtacctatatctttaaatgatgcctgtattcaccagtctgaagactcttctgactgggttttgcagggagcttgtggtgcatggggcatggggcattgactccgccaaggtgctttgcaggctaggcataacttatccaggtgaggacaggtactagaaggaagtgagaagaataatgttctgtggccctttcagaacctcaagaataccttggcagatccaagcgttctgcttatagaatgttagcagtagtagagcattatttctgtaattaggcacataggcaagagttaagtaaaaagtccggaatattaaccttaaaaaggaagacttggtagcacagaatatctgtgtctcagggggaaaaaagccagtaggcatgttctgtgacacctcaaaaaactgtaaaaggtggaaagtagtacaatttccaagaattagttagctcttcaaggagagtgagttccccaccattggtgttactgaaggaaaaagaagggcaaccacttttcagggttattgaaggaatttacccatcagattcattttgatgtcaataaccactaagctctcctctgtcttaaagattaaataatttttcaaattagattcattttttaccttttatccattggacagtttttacatcagtgttttatttagcatcattctgattgttgtttactttttaaaggggagaaggagaaaaggggagaggaaaggaagaccacattaaattcccaaataaaagaagcaatacaatctgggaaaaatagcgagaccttgtctctactaaaaaaaaaaaaaaacaaaaaaaaaaaaagtgtgcacctgtactcctagctactccagaggatgaggtgggaggattgcttgagccaggtttttgatgctgcagtgagctctgatcatgccactgcactccagtgtgggttacagaatgagatcctgtctcaaaaagtatatataaatttaaaaaaagaagaaataaattaaattttaaaaattaaatgtaaaatgttatgaaccttcccccgcccttaacaaaattttaagtgtataggacattattgttaacacaactttaagcacagtgttgtacagcagacctctggaacttcatcttgcataactgacactttatacacattaacagcaactgcttccccacctcagttcctggcaaccatcattctactttctgcatctatgagtttgactactttagacacttcatcagtggaggcatgcagtatttgtccttctgtgactggcttatttcacttggcataatgttctcaaggttaatctgtgttgttgcatacgatggaatttcattcttttaaaaggctgaataatattttactgtgtgtatatcacacagtaaatccattttatccattcatctgttgatggacattaaagttgtttttacatattggctgttgtgtacaatgcttcattgtacatatgggagtgccactatctcttaaagattctgacttcagttcttttaaaaaattaaacacagaactaccatatcccagaagtgggattggtagatcatatgttagttttgtgtttaattttttttaaaagcattttccttattattgtttggatatgcatttccctgatggttagtgatgtccagcatcttcctatacctgttagtcatttgtgtgtcttctttggagaagtgtcaattcaagtcctttgcccattttttaattgagatatttggagttttttgctattgagttatagcagtttcttatatgttacagctgttaaccccttatcagatatgtggttagcaaatatattctccgatcttgtaggttgccatttcattgtttcctttgctatgcagaaactttttagtttgatacagtcatgctccttgtctgttttttcttcttttgactgtgcttttgatgtcatagccaacaaatcgttgccaagacccatgtaataaaaatttccccctatgttctaggaattttacagttctgggtcctttgtttcagtccttaatccatttttagttggtattgctttttaaggaagccattattttaaaaataaaaatgaaaaacccatctcctttttatatatacctcctcttgatattttttggatagatataccttcactgtgctaactagagagaggaagtactcttttgcaatgcctgcgaggcataactaaacataaaggcccttttctttcagaaaaaattgacttcctgatgaaaagatcctgtattatttagtgtttccagaatatcaagatgataaattatcactggaaattatacatttccacagtcatcattggatagattataattggcgatattttgtaattctgtatgtctgggaatatgttaactgaaatactttgtaaaaagtataagactcataggaatttacttttctgactttttgtttacgagctttacaccacataaaattaagttaaatgactacatgcttcctataaagcatgtctgaaacccagccctctctaatcatggtagccatttaaagtgaagctgaagaggagccatgctattattcttcctttcccccagccgtttcaagattagattttgccagagaaataacagacacatctggtataggagacacttataacaaatctttctatgtagagaaccgttttattaattgtgccttctaattcaaaatatactacaaagttaaataaatgtgattagaaaggttctttgtgataattttaagtactgtttgattgggagatgggctgatggagaggggaaataatctagatttatttcatcagaattagtcctacattgattattctgggtaaaaaataataaattatgtaagtttaagaactattaaacttttaagattaacaatgtagaatacaggatcattttgtaggtggctctaaattaagcctttagattgaatcattttatgagaccaaataatcagtttaaagtaccttatgctttacctgatttaataatcaacaaaacattttattctaaatttattgtaaagcaagatagtaattggattttttatccccaagaatcaactgctggaggtatcttgtttactatattcatgtagccagaagtgaaaagtaactgaagactttattgttacagtcctgtcttatattctatgtatgtctgcaccctgccttaagtgtggttgtttggaaccgaaataacatctttcttgttggaaaatatggatgtatatgtcttatgtgcattaacaatgcttctgaaacatgaccttactaaatatatcaagcctttccatatatcagctttagtatttatcaataaatatatacaggaagctatgaaatatatgtatagaaataaatatttaatatttagttgggtgactatatttgtaccatattttgtgagaataaattttctttggattataatagtaatgtttattttagaaaatttagaaaaatgcttttgtatttgaagtctcagagcaagtaaggtaaaatgctgtaaaatttatataaccattgaaatgttaggctcacaacaaatctttgataatctatattcagttcagcaggccaagacactggggaggagaaagggtctgtggtagtaaatactagcactatttagtcacataattttgaaatgcggcattatttttgttatgtagatctagaaaataggaaaataaaaatcattaaataaatagcagtaacagtaccgacatttttggacattacagctctaccagttcttagctttctagttgacaccattactatttatttatttatttaattttgtaacaagaatgcagatgccatttatttggtccataagtatagccattgagttttacaaaacatcaactataaataacctgaaactataacaatacacaaaaattggcttcatacacagacataccaggcagtacaaactgaaaacgtgagtaaattaacattgttttacattaatatacatagtgccatttaacatttaaaaacaagtttcaatacatagcatttgatacttctttgaatctgtttcagtcagagtatgaaaatggttagagctaggctaaaattaatttttctagccaaaaataaaggcatgatatttataaccaggtatcaacttaaccacaatattttgaaactgttaatgatacctaagggtatttacattaaaaaggcaacatgcattgtgttgttttatctcatgactggttatgcacatactttgttcaaagggtttttaaagctatattcctactttcagtatagcatactgcagtgtgtctaacagttctagcaaaatgaatgctttcagagggagcagaatcattttcaagtcactggtgtccattttttcccctttggaacaaaggacataacaaataatctggttctgcctagataaactaagtagtaagagggctctgtttagaggcatttctgttcaatctaatgctatgacatcatccagctcttccttctgttctatacgtgacctctttgcactgagattctctttctcgtctgatttcctcttgcggcttctctcttcttcactgacgtcagcattctttgaagaatcttcttcatccgaatcaactgtgagaacatcatcttgctcttgagctgtggaggtggaaggctgacctccatcattactgccattggttatgcttttggcagcatcttcagcttgttttggccccactttttctggggcatcaccaacacttcaaattcaacatcctttcctaggtcttcactatgaaggatgttgatcaataaagtatagtcctggaggaagtaatctgcttgaagccagctgcaatttctcattccaaattctgacaacttcttgtgattattagcttctgtctctcccttttcagaagatattaggattgttcctttcccatcttcaatttggacatctggtgctaccatagcaaatttttgtttcactaccttgtctcgtaaggtgagaacagtcactttatggacattcagccgtacagtcacctggcttgctggcacatatgtaacaattggggttgggaggatccagtgcacaaggcacaagaaacttctttcttggatttgcttgtttattcaaaacaattgttctgcagtggtctatttttcctgataagatcttcaatctttccaatactgtcaacccagcaatcactgcattagtagtagcaatagcaggaataatattccctgccactgatttgatatcaaatctactcttcatattcatactgaaaatatgcatcctgaggtttgtagcagaggtaacaaaatccattgcatatgggtcatccttatcccatgtgagctcagctccatcccccttttctgctaaatgaactctcagagtctcagtgctgtgagctccttaagaaccttgtgctcaccggcttctcccacgtcgacctgattgatctggttactattgatgtcagcaacctcaacagtttttgtttcaaaagaaacatgttggaagatcaaaggcacaggttgccagggaaagtgcactgcagttttacctgaaagctaatatggttgcctaccatgacagcatcatgaaccctgactataatgtggcatatttttgacagtttatattggttatgaatgctttagataacagagctgcccaaaaccgtgttaatagagtgtgcctggcagctgttgttcctcttattgaaagtggaactgctgggtatcttggacaagtaactactatcaaagagggtgtgaccaagtgttacgaatgtcatcctaagccaacccagagaacctctcctgactgtacaatttgtaacacaccttcagaacctatacattgcatcttttgggcaaagtacttaagaagtatctcctgacagagctgaccctgaagctgcctgggaaccaacagaagccaaagccagagctagaacattctaataaagaaggtgacattaaacgtatttccactaaggaatgggctaaatcaactggatataatccagttaaactttttaccaagctttttaaagatgacatcaggtatctgttgataatggacaaactatggcggaaaaggaaacctccagttctgttggactgggctgaagtacaaagtcaaggagaagaaacgaatgcatcagatcaacagaatgaaccccagttaggcctgaaagaccggcaggttctagatgtaaaaagctgtgcatgtcgattttatttatttttgagatggagtgtagctctgttgcccaggctagagtgcaatggtgcgatcttggctcactgcaacctccgcctcctgggttcaagcaattctcctgactccgcctcccaagtagctgggattataggcacccaccacgcccagctgatttttgtatttttagtagagacgggctttcaccatattgtccaggctggtctcgaactcctgaccgcaggtgatccacctgccttggcctcccaaagtgctgggattacaggcacaagccactgcgcccagcctatatgtttaactttttaagaaattgtccaactgttttccataatggttgtctcattttatattcccaccagcagttcatgagaattccagttactccacattcttgacaagtctcggtatgaccggtcttcagttttagccattcttacaaatttttgtgttatctcattgtagttttccttttattttctctaatgacaaacgtctttcatcttcttatctgcatatctcttttttggggaagtgtccaaatccttagttcatttaaaaaaatggactggctattttctcattaggttgtaagatacacattttttgttgatatgatacaaatcttttgttggctatacatttcacaaatttttttcctttatgtggctttccttttcatttctgtatcttttaatttcagtgaagtccactatattgatgtttgtttttgtagttcttgtttactgtgtcatatttaagaaatctttgccaaacctaaaattactaggattgtttcttctataagttttataattttagctcttatatttaggtctgtgattcattttaaattcatttttgtatatgatgtgaagaatgaagaaagaatgaagattcccttaaaaaaatggctatccagttgttcccatactatttgttgaagaggtgatcattttcttcattgaactatcctaccaagtttttctaaaatcaattgatcatatttgtatccaagtttttctaaaatcaattgatcatatttgtatagttatatttctggattcactattctgttccattgatctggatgtctgtcttcatgccagtactatactgtctggattactgtaacttgataacaagtcttgagataaagtggtgtaaatccttcaattttcttatttttcaatttgttttgcctattccaaattatttacatttccatattagttggtcaattcataccaaaaagtgtcctgggattttgattgggattgcatggcatctgtatataaatttttggagaattgacatcttaacagtagtctttcaatcatgaatgtggcatatctatttagatcttatttaatttttctcagcagagttttataatttttactgtatggtcttgtacatcttattgcaaatttatttatatttttgtgctattttacatggtattttttatgtgaatttctgattatctgttattagtaatatacaattgatttaggtatattgatttttatatcctgcaaccttgctaaactcattaattctcgtagcttttttattagattcttttggaatttctacgcattcagtcatgctgtctgtgacaaaagacagttttacttcttgctctctaatctgtgtgcctttctttttcttgccttattgcacaggctagagcctccaagacagtgttgtgtaaaactgatgagggtggacatccttgcctcattcatggttttagggtgaaagtatccagtctgtctttcagtaaagtatgataccagctgaacatttttacagatatccttttattagtttgaggaagttcccttctattcccagtttgccgagatttttatcatgcttctagtcccagtttgctgagatttttatcatgcttctagtcccagtttgctgagatttttatcatgcttctagtcccagtttgctgagatttttatcatgaattgatgttggattttgtttatgtgcatgtattaagatgaatacgtggtctttagcttatttaataaggtaagttacattgacttttgcatgttaaaccaatctgtatccttgggataaactacataggtatgataattgtcctttcatttcactaaatgttgttaatttttgcctctataagggatttcatgtctgattttggtatcaaaggctggcttcagagactcaactggaaagcgttttcttcaagagtttgtgttgatgttttcttatgttggtatttttggtattggtattttttttgtttggtagaattttctaaagccatttgggccttttgtttatctgtgagaaagatttgttttcattttttgtgcgaaggttttttatctatacatttaatagatttaaaaggttattctgtttagctatctgtgagcttcgttaatttttgtgtttcaaggaatttagcaatttatcaagtttattggctacagttgcttataatattcttttattgtctgtagtattctctcctttgtcatttctgatattaataatttgtatcttccctttttttttcttattagtctggctagaagtttatcagttttatttttatttatttatttatttttggcacaaagaactagctgtggtttaggtcactggtgttagaactgccttcttttctaatatgatcgtgtagtgctgtatgtttccctaaaagcactgcttcagttacatcttacaattttgatgtttttgttttattaggttcaaaatgcttttctactttcctttttgtttttttctttgtcctgtgggttacttgaagtgtgttatttagtccaagtatttgtggacatttcaaatgtcttttctgttattttaaatttaattctgttttagtcagagaatatattttgtatgatttgagtactttcaaatattttgaaccttgttttatgactgagaatatggtctgtcttatcaaatgttccatgtacacttgaaaagaatgtgtatctgcattctggatggagtggtctctaaatgccaattggctaattagttgatgatattgttcaaatttgctgtatcttagtgattttctgtttactatcaattgttgtgagcatgatggtgaaatctttaattatacttgcagatttgtctgtttttcctgtgagcttttaattcatatgtttttaaaactctcttataaaggtacaaaattgtttaggattgttatgtctttttgataaattgacccctttatcattatgaaatgatcctttttatctttgccagtattctttactctgaaatccatttgtcatgaatatggctacaccagctttttttgatttgtgataatgtgatatatcttttctcatccttttgcttttaagttatttaatgtttctctcatttaaagtggttttcttgtggtcagaatatagttgaatcttgcttttttatctagtctgacaatctcagccttttctatggtgtgtatggatcctgataattagtacattatcttttaatgtgcaaatataaatgttagtaattataaattaagatttaagaatttgaataatttgatagatcccatcaagtaatcttattcctaaaatttctattttctttatttttcgaactttgttttatttagacttattatttctaggttatcttaggccaccaagaaaaagccaaaattgggaagtaaactgggactacattagaaataaaatggcctccaaatatgagagattatgctacagagactcctgtaaaattttagctataaaagggtaaaatggagaatggtacccacagggtcacaaaccagagtcaacaaatgttgactccagtgttgctttctaatatcttctgtttgttattgattttagactacttgctcttatatcaccttgggagcttttaagaaatacagattccccagtcccatggaatttgttataccctgtaatctattttaaggtaatgtaactttccatgtgattcttagattactctagggtcagaaatcatggtcctgccctacttatctgaccactttaatctctgacttttctgccactatcactttctcctacagagtcttggcaccattacaggaaaaaacctctgaggattagtcaggtgtgatatacctagaatattatactaaacagtcttgacatgtatggagctttagctttgactgtgctatatgtaacattaggttagtagagatcaaatcacctcaaaccttcacttttaacattatccttcacttccttttaatatttcttagattgtggagtgaagaactctgtctcccatatggtttaatttagtatgctatattatttttattaagcaaatttgtgtgtctgctgtatactgggtaataatggtcatcacctttctttcagagaaagaagtagcttttaaacaagttatgctctcctcccccaaaaagtcacgttaattctacatgatttttttttttcagttttcgtggtttgattggttccagtgttcaattagaatgtacttaaatttatgttgcctaattcaaatagattaatggggatgaggcagagtaactcacaatagaacaaacagttttgagttactttgccttatccccattaattttatcaacccataccttttcataatgatcataattttatttctggcataggaaaataagccaaaaatattaatggatttaaaaagctaatatatagggtatgtaaagatcaacaaattattttaaagtagatattaaaatgtctattgtatagtaaatgttcagtagtctgcaaaataaagaatattctacttgagaatttttttcttacacttgtttcatatgattaaaattcagtaaaacacaattaaaactcaaattatggtcaagcattagtttttgtcgattgataacaactgtccagcattttactggtcattattgagaatatcaattatcattgcattgtgggcatgttgaagtgtcactagtaaagaattgtagtttacaggatcctgaataatggttcttttttgttacacaagacaaatgcaaaggaagacagtttttggaaatcgatgtttaaaaaagaacatctttagaatattaatacctgtgactaatttttaaagattcatgaaaaatacaaattcaactgaaaagctataacagtttctcagaagatacaaagctgtaaaatataaaaagttttaggccaggtgcaatggtttacacctgtaatcccagcatcttgggaggctgaggtgggctaatcgcttgagcctaggagtttgagaccagcctgggcaacatgctgaaaccctgtatctacaaaaaatacaaaaattagccaggcatgatagcgcacacctgtagtcccagctactccggaagctgaggtgagaggatcacttgagcctgggaggtcgaggctgcagtgagccctaatcatgccactgcactgcaggctaggtgacagagcgagaccctgtctcaaaaaaaatttttttttaactcacttttttagtcttaacaatgggtagtgtacaatctacttgaacttcagtttttaactagtaagccaggactggaacttgtagtttaatcagaatttcttcatatatacgtgaatgttcctagatgaatatctttaacatggttcttgaattcttggttgtaccccaaaaatggtttcagtttaaaagggtgtggggcaatgaccatgattcagaattaattaatgttgcattttcacagggttttgtaacagtttatgctcaagaacaatgtaaacatttcacttgtgctttccataatgatggtacagcatgctttaaagaggaactgactagccttaggagacgtagtggttggtggcgagcagtgaggaagatgggaaatccagttagtccaatagaatcagtgccatgagttaaagggtaatggatgtgatgaccagaataccctcacaactagtttataccattacgttgtttttcacagatctaaggtacatctaaaattccaattaatggggtacaattaattagttacatggaaaagataatattctatatctgtcttcttaataagccaacagaaatgccctctagaacaccgattctcaaagtgttcctggaccatcatatcagcattgggaactggactggcaaattcttagtccttggaattagtagctagggaatgtgggaaggcaggaatttgtattttaacaaatgctccaagtaattctgatgcatgctcagtttgagaaccactgctttagaatatgatgcatatcaaactccagtaaaataatagcaagttttcagcattgctaattctaattttcaacagctgctgcattaggttttcgttaatgatacccaaacccagctggagttgaatcctagttacttcttattctttttacttactagtgagtggagcaccaggtgcagttgttgaagtgtgaaaataatttagctttgtagacagttctggcatttcttgattttgaaaatgctttaatcttcttggtatgatatttcaacaatcaaagcacatctattttaatggcagtatggacttgtgctaagaatttaaggaaatctctgaattattcctaccagtttaatatcaaaattaatattttagctgaattacaaagcttatatataatttactcctattttatttttccaccagtatgtgcattaaaaattttttaatgtcttcctgaataatttactttcaacctttttcacatcttctacaatattatgtttagttttactttggaaaaaaatgctagcagagattttagttaaatgcattcttagtagtaaggtccagctgcgtgctttgtgagttgcaaaactcatgagtccttcaaaaaacattttaaaggcatgtcagtaagacatgaaactagcatttatctgctgcagtatactttgagtatctacaagtggacaacatggtcaaaagcacttaaaatgtttaatagattagtacatgatcttgcagtgatagtgcagatttgtttttggttgtattgcacatatgttataggtaatgttggtaatacagatatttagaaccaaaagctgatgaattcaaaattctcttttgatgtttaaaaataaaaataaaattctcttttttttaactgtgtaccttcatgatctcatttactccttttacatcagctgatgcctttgtgttgtgactcttaatttctatctttagttcagaactttctcctgagatgtatatcttctgtaacctacatattactacctggatgttccatgggcacatgaaactcactgtgtctgaaactgataatccaaatctctccctcatactaaccctgtaaatacatatggaatcagagttacattaatagcctatttttcattattataataggtcaaatagcctattttggccattaccctagatgtttgcacagggcttcattctccattgaaattcctttctaatatttctgaaactcttctagagatatctcatgtgggtttttttgtttgttttttaaaaagcagactcccctctacccataagaatctgcttggttacttccttgtccatagaacaactatctctaatcaagcatcatcatctctgctgcttccccaagaggaaatgccagaaagtatgggagccttcatggtgctaagattgatgtcacatttcatgtagaaatggagaaagttctcttatgtcctcagtaatgtcatactttatcacttgtgaacctgctttatgtgcctgtgtgaagaaatggcaaactatataccagctattcatgcatttcttcctctagtatgtttttattgctaggaagcaactgcccaccaaggattaaatttctcaccacaacccctgcatctaggtagggccatatgactagtgtttgccaagataattaagaaatggttgtgctttctgcactctatcggccagctggatcaaaagacttcaaggtactgtggagaatggcaaagtcagaagaggaaaggagcataattccttgaattactgcataaaaggctgtctgccaaccagaaacactcatgttggtacttgagcaagaactaaacttcttgtgtagtaaacaatcgagatttcgttacaacagctgatgtttccctaattaatacagtgccccctttatattacaaagcccttctttgaaacagctccttaatcatttccctgcattccctttctctaaaaactcaaacacataaatatctggaaattcatggggctgggagggaacagatgccacattacattctaatccagaacttttctgccattgtgccctccccatcctattccctagacctgttaggcttggatattgttcttacacaagcttgaaataaagccttatgaaaatgggctcttccacagaccagctacatacttgatttctcagtttgaacttcagtgtagactacaaactatcctgaattcctttcttcatccccatttattcttccttccccaattctcaaattcactgaatggtaccatcttcctcctcagtaaagaagcctagagacagtaccttagccacttccaattccgtcttctactcttgtcacctaagcctctaacccattaacctatctccttccagtccccatgcttcttccttactgcagttgctttccttcaagtcttaatcctcactatgtcttcaggccattgatactcaactgtaagcgttatcactctataaaatcttgcattgtagaagtcccgcgtgggttacttaaaactctttaaaaaaatggctctttatcgcttatagaagttgttctgaaagtgcagtccatgtaccatagggatgcttaagactcctttagggctttcacaaaatagttcacaatcattttcataataattctaagatgttagttgcctttttcactagttgacatttgtccttatggtaaaaagcattggtggtaccaaactgtactagtaggcattgtgttttttgctgcctttctctaacagcccaaaccctcaaaagccattttcacataagaatgtccgtcagaaagcaataactttattaaatattgactattttgtgtatgtccttaatattctgtcacaatatataaagtacatcaagcacttctgcataccagagtacagaggttgtcttgaggtaaagcacttgtgtgattgagttgtgctgtggtttgaatatggtttgtctctaccaaaactcatgttgaggcttggtccccattgtaatggtgttgagaggtggtgggacctttaagaggcatttggatcatgaggaatctgctctcatgaaagaatcagtacagtcttgagggagttagtgagtcctcactctctgaggactacattagttacaatgagatcaggttgttatgaagcaagattgcctctcgtgtttgcgctattttctgcatatgtcagtttctcttctattcctccatcattttttgatacagcatgaagcccttaccagaagacaacagatgtggctgcccagtcttgaacttgccagcctaaagaaccagaagctaaagaaacttctttataaactacctggtctctgtcatagcaagagaaaatagattaagacaagttgcaagctcaacaaggcaatttttttcatagaacactgtttttacttgaaagaatgatcaacacacaaactatgtttattcagacttgtgtagttgggagatattttctcaaaaatgaatgaagtgaacttgtcgctgtaaggaaaatagttgacagtattagttgccaattataaaattcaaaaaaacttgtatctgccgctatgaacataacagtttcccaatacttagacttctctgagattggtggtgttataatgaatgtgattttttaaattgtataatttttattatacaattctaatgtattaatatttggaggatctgcataactccgtataccaatatttttcaaatgacagtgcaaagtatatcaatataacagtatatattcactgatatgaacttgaatagtgtatattcattaatatggttttctatcacattgcagttaacttttaagaaattaacactaggttttagtgtagaattgaaaaagaatatttccaattatttgaaaaggctactaaagtactccttttccaactgtatctatatgagtctgattttcttcattgactccaacccaaataatatatggtaatattttgaatggagaagcagatatgaaaatccagttgtcttctattaagccagacactttataagatttgcaaaaatatgttacactaaatttttttgcttttggaaaattttttcacaaaatcatgtcatttatgctgacatgtcatattgttattttaaagtgagttaataaatgtttctcaattttaattactaatgtgctgttgctagatgtaacccacataaaccaaagctctttggtgtccttaacaatctttaagtgtataaaaggttctgagaccagcaagtttcagaatgctggcttataggatatggttcatattcctaatatggtgattaagacactgtgatctggcttctgcccacttttctgccttatgttttaccttgcccttaatttttctcctatcttctaagcttattaagaaccacttttagggcctatatgcactctacagtgttgtgcctccaaggactttgctcatgcttcttccctttgcctggaaggtttctttgtcacccagaaggcacttttttttttttttttaaagacaaagtctcactcccagcactctgggaggccgaggcaggtggatcacgaggtcaggagatcgaaaccatcctggctaacacggtgaaaccccatctctactaaaaatacaaaaaattagccaggcgtggtggcaggtgcctgtagtcccagctactcaggaggctgaggcaggagaatggcgtgaacccgggaggcggagcttgcagtgagctgagatcatgccactgcactccagcctgggcgacagagcgagactctgtctcaaaaaaagaaaaagagagagaaaaaaaactgtattttttgtcttaagctaaacaaatacatctgggtgaaactgaataaaataggattgtgggagaataagtaggcatcctactcccttcctcccacccagttgttactggcctgcttctctctctatttctgcttctttcgattttgttttagcctcggggtgagtgggtggagggagtccaaaaacacatctgtactgtagaggagaaattgatagcatagctttatggaacttatctcagggttatgcaatccagaggtcccctgatttcagctctcatcagtgcaggaatcctttttccatcattctttgacaggtcctcatgcaacctctatatgagtatctccagagactaataacttaccaccccctaaactgcctgtgtctttactttgcactactaattatttgaaagcccgttctctcttgagccacagtcatatctttttttctggagtaatgctacaaaaaggattctgcctctttttcacaataacttttcaagtatttcaagagactgttagtcatttttatggattttctcttagctaagtgcactgttttgttttgtttttttttaagttttttatgtggcatgatccatccagctcattcccattctggagtactctagcttttaacgtgtgcctgaaatgacacataatagccctgtgtgactaaatacaaatttcttaggaactgttccttcctgtgacttgaaacattaattactgtgttttggttaggagtataagctttggtatcagacagatgagggtgtgaattctgacttttttcccctgtaattcatatctctgagtctaaattccgtaatgttaccatataggattattgcaagaattaggtgaagtaatgtacatttaaacatgaaccgttggctgggtgcggtggctcacgactgtaatcctggcactttgggaggccgaggcggggaatcatgaggtcaggagatcaaaccatcctggctaacatggtgaaactccatctctactaaaaatacaaaaaattagccaggcgtggtagcaggtgcctgtagtcccagctactcgggaggttgaggcaggagaatggcgtgaacccaggaggcagagcttgcagtgagccgagatcacaccactgcactccaacctgggcaacagagtgagactccgtctcaaaaaaataaaaaatgaataaaatatgaagcattgttcctggctcacagtaaaggctcaaagtagaagcacttgttacactgataattatatacctattggcacagcctaaaattgccatacgtttttttgcagctgcttcacattactgttaatattataatcattatgctagtatatttgttgtttatcagcttgtgctactactcaggcttttatgccttctccaattagccatccccacatcttgaaagccagctctgtccttttaaggctgaacttactcagtgtattttccagaaggtttttctccaattcttggatccagaagtattttgttcttacttatggcatttgttacagtggcatttgttcaattttgtacaagatagactatgaaaataggaacagttcacttgagaaatttataaagagatgagggatgatgagattaatgtcttaataaagctcaagaaaaaggaaaagcatgtatagttggactccccattttgtatcagcgtacttatttcaagtgactgaaatgagtaaagaaagaagccttgaagtcagctcacctatgatttttaactatgatattttgtattttaaaaatagatacttggtgcaggtgttattggcagacagaagtaagaggctagggtgaacaggctatgggcgtctggtaaaagaatttttttcccaaaaatgctctgggagtttcattcccaaaagatggatgcaggtaaatctgactctggtcagtacaatcaaggcaaattggtgtttttctaaactgtgaattgggagaggattctacttacaatttgaataataggtctcatctctatacttattctggtacatttaaagaaaaacttaggccctatattggacctacttcagaccttacaatccatatagtaacccataaataagtaaaacctttgtatgttgtgattttttttccctattcaagaatgatacctagaatattatacaattactaatttggggaatgatatcaagaattatgttgtttttggctttggttgtggttttttataactttaaattttgagataattatatattcacaggaagttgcaaagatagtacagcatgtttttcttttaagcacctggaagacaaccatcttctgtccctctgtttcacttatttaccatgcctatttcaaaggaatgttgcaggaaacaattgcaaaatgcttttgcaatcccaaaataaaatatatcaaataattttaaaaggcatttgcaaaaaaaaggtagttctataatattgtagtgctgtatttaactataaggctctacctcttcctataatagaaatagacaaaatctcagacaatcagtataatgtggaacatgagctctagagtcacattgacctgtaatggtatcctgacatcagtaaacagctggtgatcacttaaagagactcagttttcttatttaaatggggataataattctgcctctcatgatatgatgtatataaaccacaacacagcatgggtgtaacagatgatatacataaaacacttaaagcatagtgagaattcaatgttagctattaccaatactattttttcatgtaggtgattagtgtatttctcagattgataataaaagaaggttataacttataaggatttcacattgttaaattaatgtaataactgtagaaaagtatagccatagccaagcttggcaagtacatttagtaaaatataactcatattcctttaacgtagtaaccttagcaataacacaaaaagaaaagaattggtgttttttggattgatggggtatttaataattactttaatgtttttatctaatagatcatctcaggagcattaactccaatatatttttagtgagaaccttatcacagatgaagttgtgaaagaaaatttgatatttattttgtaatgtattttcagaatgttaaggattaacatatatttaatgtggaagcattatgtttgtttaaaagatgtgtctaataagggcctacaaaaatttattgtacatgaagatactcaataaatattgttaaattgagaataaatgactaatttataaacagttaaatattttataatttgtttttaatgttattattaaaatgaacctgtattataagatctcaatatttggtaatttttttgaagtgaaacaaacataagttagccattttacagggaacaattcactggcatttggaacattcacaatattgtacaagcaccatctctatctagttccaaaacattactccaaaggaaaccccatcaccgttaatcgggtgctttccatttctccctccccccattccctggcaaccaccaatatattaatatatactgtttcatttttacctattctggatatttcatattaatctaattatatatgaccttcggtatctggcttcttagcatatttttgatgttcatctatattgtattactaacatatatgagtacttcattcctttctatagttgcataatattctattgctctgtatatagtaccacaatttatttgttcattcatctgttgatggacatttggattgtttctaccttttggctatagtgagttagtgctttaaacatttataagtatttgagtacctgttttcagttctctggggtggtatataccttggagtagaattactgaggtatttggtaattctgtttaacttttttgagaaactgccaaactgtttttcatcatgacttcaccatgttacatcccctccagcaatgtatgagggttacaatttgtcacttcctcactaacatttgttattttcctattcttttctctttttttttttttaagtttttggtttatctgtttttaattatagccatcctagtgtgtatgaagtggtactttgttgtggttttgatttgcatgtcccagtgactaatgatgttgaacatctgttcatgtttgttagtcatttgtatatcttctttgattattgattagagactgttcttttctaaagtctgcatacagtgctgtaaatttccctctcagtcctgccttaactgtgtcccacaaattttgatttgcttattttcattttcattcatgtcaatgtatttttaaaatttcccttgacatttctatttatttgtcttctgttctgtttttttcacttctgttttctctttctgcattcctgtgggttacttatatttttttttagaattgcattttgatttgagtttaatgtctttatatagtctttttcatgcttgttttacatattttattatataaatgtcacctgtcagttcactggtatcattttaccaattcaggtgaagtatagaaaccttacctccacttttgtctttttattctccctcacttacaatgtaattgtcttaaatatttgctctgccttcatttagagccacatcacagaatgccgtaataattttgctttctctgtcaaacttgcttttgaaaactcaagaggaaagggaaagtttattgtatttacacatatttttactctccatttttttgtttgttctttctgatgttttaagatttcttcttttatcttttcctttttgtttatttatagagtttttttagccagtcttttagggtaggtctactggcaataaatgctaattttctttcatgtgagttactttccctttcattcctgaaaattattttctctaggtatacgattattttatttcagcacttgaaaaacattgtgccacttcctattggctccatggttcgtgataagaaatctgctgttaatccagttttctcttgtaggcttcatacaggtgcattcaagactttttttgtcttttgttttcagaagtttgattatgatatgtcttgacatggatatctttgggtttaccttatttggagtttgttcagcttctctatctaaatgtttatgtctctttttaagtgtgtaaagttgtcagccataatttctttgagcacttttcaaccctgctttctttctcctattcttttaagactctgtgacaccaatgttagatcttttgttctagaccacagtttcttgagctcttgtttgtttttgtttctccttttcttggtctgttttcccactgctgttaggttcagtaatttcttttgttttttctttcagttcattaaacttttcttcatctcttccattctgctgttgaacccattcactgagctttttattttagttcgtgtatttccatttggttcttttttgagacaaagtctcgctctgttgcccaggctggagtgcaatggcgtgacttccgctcaccgcagcctctgcttcccaggttcaagtgattctcctgcctcatcctcctgagtagctgagactacaggcatgcaccaccacgcctggctaatttttgtatttttggtagagacaaggtttcactctgttggccaggctggtcttgaactcctgacctcatgatccacccgcctcggcttccctaaatgctgggattacaagcgtgagctaccatgcccggcctggttctttttttgtatcttcattttctctactgagattgtatttgctggggctttccatttttttcgtttggttcaagcatgttcataattgctcattaaagaatttttatcgtggctgctttaagtctttgataaattttaacattcctgttattttggtgttggtcatttcttgattgtctttattcattgagtttgagatcctgctggttcttggtatgatgaataagtattttatagaaacctgagcatttttgtattataagactctgggtctaattataatcttctgtttccttgcttggactccactgatactgcagaggtgccttgttacctgctgtctgagatgaaagtcctgaccctgtacttggccttctctgacatcaccccatcagggatattgggcattgtgagggtggaagtctaggctccctacttgtcctgtacagttggtgggggggccggtttttcctatgaaattggctactgtagagtggttattatctaagctttctatcttgctatgctgttcctttcctggtcctttggctacagagaataggtttttgtagggattcttttgtctgtacctgtttctagattgccagcttctatagctccaagtctggaatgtatgaggcataaataaaacttagggcaactcagcactttattgtccttaggtcccaggggttccagtagtctactgtcttctcttttagagtcttacatttgtttcatgtattgtgtgccagtattttaggtgtactcagaaggggcaatagtgaaacataagtctactccatcttcccttaaagtggaagtcactgttagctcttttttataggatgattcatataaccataacttgtaagttttaatggtaccatatgcatccctgttgactatctggaaaccacacaagaaagcatttgtcagtgttcagaatctctctaccttgcatatagaaatttattttgttagtcccccatggtgattgtgctcagggagactgattcaagctaataatactctttttgagacaggggcttgctctgtcatccaggctggagcgcagtggtgtgaacatggctcactgcagcctcaaactcctgggctcaggcaatctacccacctcagcttcccgagtagctgggactacaggcatgcaccaccacactcagctaatttttaaaaatttttagtagagacaaggtgttgccgtgttgctcaggctggtcttgaactcctcagctcaagtaagtgatcttcctgccttggcttcccaaagtgctgggattacagacatgagctaccgcacctggccaggctaacaatactcttaagaaaatagtgtatacagtcagacagtcaatttacttaattctcagtgattacaaaacattacttccatgaggatcagatggtgtttggctgggcagtcaactcacagtaagtgatgctgaagcaagaatcagttaaatagcctcacaacagctttcttttggtgcatctgtattgctcactattcctcattgtgtattcattttatggggaatgagttacacgtcagagcagttattggagatgcacacagctcaagattcattcctagaaaatgcaaaggatccaatttaattcagacatttaatggcactgagcttttagagcctagcttatctagctctacaataggcatacttgccaggaggatctgactagacaaattgatatgccaaggctcctccacccatagacaattcttgggtagaccctgctggtttcccctttgatttctacttgcctttgatctttacttacgagtaacctattttttctgcatacttaccagtgtcttttgttaggttatcatcaggcctcattgtcctaggagctgttttgtttttaagggtagttaatctagggtcatagacccccttgcctgtggttgggctctaagaggaagccctgaaatgcacaagccaaccttgtaagagagcataattttctcatcatattctcaaaggagtccatgatcccaaaatcattatgagccactaatgtgtagtgttgctctgctctgttatgcatatatagttcagtctcttataaatcaccttagcttgtcattactgaagtgttattattgctgatttctgtgttttcttactatagttaaagatatgaaaatttggtcttttttgttaatattttttgctttggatttattacttatctagttgttatcaatgtatttcttttttattttaacactagaagtttcagtatttgagggcaagacaatttattgctctttctctttgctgtttcttatatccctctcgtcctaaaatgttacccataatatagaactattgcacgttttcagttctcttttcttcagttatcctgcagtctgatacagaatacatccttgtcattttaatgctgtgtagattttagtttaatgtaatgttttatacttaactaatcattttattctgttaataaataaagtctttaagggcctgtcagtatggaaataggtaaatattactgttaccttttaaaagaattgagtttgttgctaatctgacacgtggaaaagcatcaagctcagatatgtgctgccttcatcaggagcctggaaaaactagaattgccatggagctaagtgtccatcttcagttggaaataatagtgccattggtgcctggcctgcctgcaatttcatgactcctacattgcaccccgtgtgatctgtaggctatacatttcatggtgaacctgagatagcttgcatagcagattttctatacatttggatcttgaacaatgtgggagctagggcaccactccccacccctgtgccatcaaatctgtatataacttttgacttcccaacaacttttttaaaaaatttttatcttaaaaaatttttttttattattatactttaagttctggggtacatgtgcagaacatgcaggtttgttacataggtatacctgtgccatggtggtttgctgcacccatcaacccatcatctgcattaggtatttctcttaatgctatccctcccctagcccccatcccccaacaggccccagtgtgtgatgttcccctacctgtgtccatgtgttctcattgttcagctcccacttatgagtgagaacatgtggtgtttggttttctgttcttgttagtttgctgagaatgatggttttcagctttatccatgtccctgcaaaggacatggactcatcctttttatggctgcatagtattccatggtgtatatgtgccacattttctttatccagtctatcattgatggggatttgggttggttccacatctttactattgtaaacagtgccacagtaaaacatacgtgtgcatgtgtctttatagtagaataatttataatcctttgggtatatacccagtaatgggattgctgggtcaaatggtatttctggttctagatccttgaggaatcgccacattgttttccacaatggttgaactaatttacactcccatcaacagtgtaaaagtgttcctatttctccacgtcctctccagcatctcttgtttcctgactttttaatgattgccattctaactggcgtaagatggtatcttgttgtggttttgatttgcatttctctaattaccagtgatgatgagctttttttcatatatttgttggctgcataaatgtcttcttttgagaagtgtctgttcatgtccttcacccactttttgatggggttgtttttttcttgtaaatttgtttaagttctttgtagattctgggtattagccctttgtcagatgggtagattgcaaaaattttctcccattctgtaggttgcctgttcactctgatgatagtttctttggctgtgcagaagctctttagtttaattagatcccatttgtcaattttggcttttgttgccattgcttttggtgttttagtcatgaagtctttgcccatgcctatgtcctgaatggtgttgcctaggttttcttgtagggtttttatggttttaagtcttagtttaagtctctaatccatcttgagttaatttttgtgtaaggtgtaaggaaggggtccagtttcagttctctgtatatggctagccagttttcccaacaccgcttattaaatagggaatcctttccccattgcttgtttttgtcaggtttgtcaaagatcagatggttctagatgtgtggtgttatttctgaggcctctgttctgctccattggtctgtatttatgttttgataccagtaccatgctgttttggtagtgtagccttgtaatatagtttgaagtcggtagcgtgatgcctccagctttgttctttttgtttaggattgtcttggctatgcggggtcttttttggttccatatgaaatttaaggtagttttttccaattctgtgaagaaagtcagtggtagcttgatggggatagcattgaatctataaattaccttgggcagtatggccattttcatgatactgattcttcctatccatgagcatggagtgtttttccatttatttgtgtcctctcttattaccttgagcaaagtttatagttctccttgacgaggtccttcacatcccttgtaagctggattcctaggtattttattctctttgtagcaattgtgaatgggagttcactcatgatttggctctctattattggtgtataggaatgcttgtgatttttgcacattgattttgtatcctgagactttgctgaagttgcttatcagcttaaggagattttgggctgagacgatggggttttctaaatatacaatcatgtcatctgcaaacagagacaatatgacttcctcttttcctaattgaataccctttatttctttctcctgcctgattgccctggccagaacttccaatactatgttgaataggagtggtgagagagggcatctttgtcttgcaccggttgtcaaaggacttcccaacacctttaaacttaactattaatagcttactgttggccagaagcctggccaatcaataaacagttgattaacacatattgtatattgcatgctgtattcttgtaacgctatatactatattcttacaataaagtaaactagagaaaagaaaatgttatttaacatacaagaaatagaaaatatgtattttttatttttttatttaaaatttttttttaagagatgggggtctagctgggttgcccaggcttgtctcaaactcctcggcttaagcaatcctcctccctcaactcctgagtagcagtagctgggactacaggtgcacgccaccaggccaggctctgagaaaatatgttaagttttctatttgttaaggggaaatagattatcacaaacatcttcatcctcatcatcttcacactgagcaggctgaggaggaagaggtgggcctagtcttgctgtctcatggatgccagaggcagaagagataaaggaggtaggaggcaggagaagcaggcacactcagtgtaaattttattgaaaaagaatccacgtattggactcatgcagttcaaatccatgttgttcaagggtgaactgcaatttattactcaaagatgaagaaaacattacgacaaaatgtatcctaagtattttgaatatactgcctacattctaagtgcactgcaaatgtggcataactagttaactttcttcagtgatttaagaaagcctcacaagaggctgcactaactagatgtagagcatctttgctaaaaaaaagaattataactatctaatacttacttagtaaataaagaaaatgaccatattgaaaacactgattgattttaagtattgccacagaagaaagatagtaatttatcatcaataatagttactgctgttcaactgagatgtgatttaatattactaacaaaattgttcttaattttccatacattttttatctttttatgtagttttaggcctaacattatattaataattgtcctatatatttaagcaaagtaaaaacacttgaaaaatagaaaatgcatgtaaatactatttgaatgaggaaagtagtgatgccaatatttctaccttttcataatttaagacatttctaaaattgtatgaaatacacagtttatatgatttaatacatataatgaaccaagaataataattactttttaaaaacatatttgtttcatggccctgccggaggtgtagcaaagttgatgaggtaattttaaaacaattttgcagtttgtctcatgttttttatagataaaatagatacctgcttatgaaataacacaaaaaatctttttttccaagtatttgatttgaagaaaaaactagtgtgagtaaattcagcattgttgattgtaagtgaatctttttttttctttagcgcaaactcctacttgtgtgagtgggtgaatcttttaaaggcaatttcacatatgtctgtgttgctagaggaaacctctcacgcttctgtcagcgcttaaatgccaacaccactgttgtatttcccttagtagaaaaggggagggtgtttggacgtaacattaccataatagttttgaactgtttagaagataatgttcctttaaaattgttgaatataataatgttcaggccaggtacagtggctcacacctacaatcccaacaccttgggaggctgaggagggaggatcacttgagcctgggagttcaagaccagcctgggcaacatggtgaaacgccgtctctacaaaaaatacaaaaattagccagatgtgatcatgtgcacctgtagtcccagctacttgggaggctgatgtgggaggataacctaagcctggggaggtcgaggctgcagtgagccatggtcacaccactgcactccagcctgggtgacagagtgagaccctgtctcaaaaaaataataataatgttcataggttctcaatacaaattagttgaatttaatctaagacaacttccaaatcttgtatggatgcttatcgtatgttaccttgatttgtaggtttatttataaagcactattgatttaaaaaatagtatggtatgtgcttctttaaagtctctcctggctcttttttctttcttattcttagtttattttatggattatcttttcctacttgccttttaaatattggtatcatctaagattctatcctagggtctctgtctgtgctacatactgtatattgtctaggcagctgtctatctgctacttgaacctttattctcaactgtacacctataaacccaattatcttatatctcctggatgacccaggctatccaacagtgtattcaatattaagctcattatgtctttctctctccattttcagttcataccttcccccagaataaaagagtatgtatatttgcatataaatatataacacatacgtatatctctcatatatgtacttctgttttggaaggcccactgctagtaagcagcaggcctggaatttttaattctggttttttgaatgcaaatcctcagctcagagtgtattctatataacatggtgtccatatcttttcaaccaaaatcaaagatgcatgctctgacaatatttgaagtctgcacttgttgctgtaattataccacattgcttttcatcttactttattaagttgtcagcatcataggggacactaataaccacacatacaatgtaaaactgcaattatgataaatatagtgagacatgtagtataagatagatgaatgtatattttttaaaagatagccgggcgtaggggctcatgcctgtaatcccagcactttgggaggccgaggcgggtggatcacgaggtcaggagttcaagaccagcctggccaagatggtgaaaccgtgtctctactaaaaatacaaaaattagctgggtgtggtggcgggtgcctgtaatcccagctactcagtaggctgaggcagagaattgcttgaacccaggaggcagaggttgcagtgagccaagttcgaaccactgtactccagcctgggtgacaaagcgagactctgtctccgaaaaaaaaaaaaaaaaagatgatttgacctagtcagagctatcagatgcttccctgggaagcaattgagttgaaatgtaaaggttgggtggggaaatggaagattgttcaagataggtgagatagcttgcacaaagacttgggggttaagagagtacgtgctatatgtgtaactatccccgtgcaaagtatttgcaatcttgctagagatttcacgctcctcatttccttctttcctctccttttcttgcatccttattcatatatatttataaaagaaaaaatatatatttgaatgtatattagaatgtatagatatttgaatatatatatttgaagctgaagtttgcattaaatagagaatactagaaagcaaaatgtaactgcttttgaaaccacatagcagataggtaattttagaggaaccatgaaatttaagtgaaaagcatagccatgtgctaaacatagtttctaatgcaacaccaaaaagaaaaaggatttatggtagtattgtttctacccttctaagtcatattgtttctactcttgttaagtcatattagcatttataatcactttataatcactgtcctgttacagttttttaatttataatttataatcactttataatcactgtcctgctacatttttataaaccagagaataactaaatcgggtaataaatttcaaaaccttttcttaaattataagtaatttctcttttaagtgcatttttatactgtgaagtttagtattccatgcaatctttgtgtgtttgagaattagttcaggctgtaggaattctattagaatgtaaagtgacttttgaactgcactgaagtactctgtggtctgtgctattctgcatttgttgactctttattcctttttgttcttgatatacatatgtattatccttcataaggaattctgaagctttggtcctcaaaacatttcttcaacagctcttacctagttcttgaataggaagattatgttccaggctgtacagctgttttagaatcaactagatcctcttagaaacccaagcaatttacccatgttttccatatcccttggttctttgcttttgttttttgttttcttttttgtatcttttctaatcatggtccaaagttcagtgttcataacttccttatagtgtccttaaaaacttagttcgtatctgtttttctttccagaaagggctattgcaagacacgaagtccgagaaattgagcagcgacatacaatggatggccctcggcaagatgccactttagatgaggaagaggacatggtgatcatttataacagagttcccaaaacggcaagcacttcatttaccaatatcgcctatgacctgtgtgcaaagaataaataccatgtccttcatatcaacactaccaaaaataatccagtgatgtcattgcaagatcaggtaattaccacttaaggaatgcccaaatattttctaatacttcctcactcaaattttctagctcaaggggataaagtattttaaagggatgtgagtgctgatctcagtggatcataagccttttaggggagagggccagctaacttttgtataattttacttgacagtatttgacacatttccttgcatatagtatgtactcaaatatttgtgaagtaaatgaattaatgaatagcttgaatttttgagaaaactgatgttcctgagcatagtatccttttaaaaatataattttggcatgataccctgcaataaaaattattgtctcaacttatgatggagaaatatttgatggatacttgtattcaattttgtgaccagcccctctttactagatagagatagagatagatacagagagagtttatatatacattgcttataaatgtatatatagtttagttgtggcttcttcaacataatcttaccttttaaattctcacgaagttttagataaacagatgaataaataattttgtgaaatggttttaagaaaagtagaggaaattatcttatgaaataaaatttgctcatctctttaatagtagtagcatacatttctcccacacctggaattttgactgcaattataaataaagttctctctataaatatggaagggcatgggaattccaccccatgagaaggaaagataatgtttgcaaatactacttaggatcaaataccaaattggagtaggcttattagaaagatatttgtgatggtcctgtagttacaatgatatttatctgtttgaaagcagtgaacttgttacagaattgactgtcatctcactatttagcataactataatccttacacttaaacaagagaattacattgagacacaagactaaggttggctttcttgctagagagctgtttgtaaaggctagtagtatatggtatgtcatctgcccatgtaatttttggctctttgcagaatcctggagtactcttttttgtagaaccaaaattccacatctgtcggccaaaccaaataactcttctatgaatgagaagaaacatgagttgtttttagctatgtgtgtcataaaaactattcattatgtaatattgtgtatctcaaggacaagtatcctaaatattctgtttttatacagtgtgtagtaggttttaaatctttttgcattactgcttttcaaaatatgctttggtttaaaaggaatatgtattcatgcttagataataatttcagatttattcagtagtactttttagaaaaataatgttaatttgtttgttcagcattacaaagtcctggtaactgcaagatgtctggcaatgacatcaaccattattttcatgaaatataaatctggaggagctcaccacatatgacatttataggcatcatgtagtagtatattttcccagttgcatttggatgagataaagcttctgtttttcttttaataacttgttggttatgtataggaaaaaaaaaacagcaggagagaagcataaatgctatcttaaaagcaattggattgcataatgaccaacacttaaaaaatgtttgtgtggggcagcgcagaagaatagtcttaatcattagctgacatacttcaaaattatcagctggtagtccaaaacctgatcttaattaagagtaacttacttaacaaatgttctttatataccctatctccagttttgtgatctcttgttctatgtagacgcagttcttcaaacaagttatatttactgcttccccttcttttgtgtgacatgttttcatgtttacttcacttttaatctagtaagcttcatctaaatgtaaactaaaaattgcactgtatttcttaaaaataatttttaaatattccctgaaccccatctgatataacacacttttattttaataatatcatattttgttgtctctgtgtactgttctcagctaccttttttttttttttttttttttttggagacagggttttgctcttgcttcccaggctggagtgcaatggtgcgatctcggctcattgcaacctctgcctcccacgttcaagcaattctgcctcagcctcccaagtagcgaggattataggcatgcgccaccacgcccagctaatttttgtatttttagtagagacagagtctcaccgtgttagtcaggctggtcacaaactcctgacctcaggtgatccgcccacctaggcctcccaaagtgctgggattacaggcgcctggcctctcagctgcttaaataagaattaaatgaactattttgctcttttttcttctctaagaaatagtttctaatcaagtacaacttaaaagatgagatctttcttaaatctgttgtctccagcttccgtgtaaagctcagtttactcataaaaatattttgagatatgttacctgaccatcctctttattccctcaccttccaatcttagttcagtctgcttgatatctgcctttagccccagctttcctagacattttttgtacatactatattaggtattgttctaaactgtttacctgcttaattatttgtctcaaaaattttagaggcaaagcccaaatatttttagtctggtataaaaccactcaatgtataatagttatatatattctgctatccttagaaatagttgtcaactctgcttttgagtttttcatttatttgttgtgtatgtaatatacacaaaggttgtactacattctttggggaaataacaaagaaatagaaagcatggccacatccttgaaggagcttatttaaaatttacttgggaacataaaacataaacacaggggctatgaaaacagttaaaataaaacatcaatttgtggtgatctcactgaaatatttaaccaaaagtgttccctaccaaaatgtttgatttggacctaatcccgagaaaacaaattaatgtagaatattctacagaacaactgacttctaaagtgtcagtatcataacaaccaaaaaagttggagggaggcttctctagactagagagacatggaaaccaaatgtaatgtatggtctgtgatcagatccttgatcaaaaatgatatctttgttcatagacatagtacatgctgaggtaattaggggttaaatatgaatgacaactatttgctttcaaataggtcagaaaaaattgagtatgtatgtgcatacatagagaaaaaagataaaagtgacaaaatgttaataattagtgaatctaggtgaagagtatagagatgttcactgtcctattttttcatcttttctgtagtttagaaatttttttaaataaaaaagttgaaaagttaaaagaaggatattaaaagataaacatttgagaatataaggtatgagaaactaagcaattagaataaggtgtggactcagtcattaaagatacatttttgcgatgggctttacttagttaatagagaggaattggcaagagataggtaatcaatcaactcttctagttgaaaaatggagtttgctttgctgtcatgtgtttagccataccatatatgtgattagccacatcttttatgatttttcaaaaaaagaattcttttttgctctcatatgtttaggtctatgattatatataaccccttttgttaaaacattggaaatacctagaatttgtattctctgaagaacaacatgaatttttttctttttgaaattcactctcaagccaactttaggttatctgcgttagagcccacagttcaccaggagttgcagatacttttcagagcagcactttagatgaattttctccacctataatgtgtatgctaatcactggttaaaatgcagattcagattcagaaggaccaagatggagcccagttttcaatttttaaacaactcccactggatgccaaaattaatgccgctggtctttaaactgcagtttgagtaacaaagatacagatgatgattctcagtagggatatgggaagatgaatactttagtcttcccaggatggtagggtacttatctttaaattgttattcctacctcccctacaaaatccacatttcttacatagaccaagaggccctttttaatctagcccttgtgtgcaccaacttcttacccactagccacactggccttgtgtttcattgaatacgccaagcctttcccattttaaggcctccgcacttatcctttcctcttagaatgcacttctcctggcttcttccagagttggcttcatgttatccatttaaggtttaatgacatcctcttagaaaaaccatgcctggccatcctacatattaattacctcttctaagttactgtgtactgtatcactcttgttgtgtcttctctggtactaatcagcttactaacttatcttatatattggtttgtttactgcctgtcttttcctctattataagatctttaaggataggaaccttgtctgtcttgttcactactatatcccttatgtttagaatagtgcctgagacatagtagaaactatacattttttgttaaataaatgatgaatgaatgaacaaatggaccaacatagattttgatagcggtagatgataataattactggcagagtgagcacctctgattgacagcagtatgatctattcttatctctcaggtggattgggaaccagccccctgccctacactcctaaaacaggttgaacagcacagctctgaacttcagtgaagatatgttcaattactgcaaacttttcttatatttttatccaaccactactttgttttcctgtgagtgtagaaaactttctccctggcttagtctcataaaagtacccacagccatacaagaaatgtttaagtaaatgcatgagtgggagtttggtagatagtaattactcaagttaatagtagcattcattcaacagatagtaattacagagttggaatttggccagaatgttcaggatgacattcctgctcttttagatagtgaaaacaaatgcttttgttatcacagataatcataatattgaggttgatctattaagaatataggtcaagacactactgttagtgagaagggtgcttcttagctttttcctgtaacatcagtttaggtctgattcaactaacaaaaaaccccaacaccattacctatattgtttgtgtttttccttaaggtctcttcttattacttgctagcctgacttgagtcatcaaatccaacaaaaatcacggtttacactctgcttcaggctagctgcgtttcatgtactatatctgactactacatctgaaacattcttcttggtagcatatttcagtcagagtatgaaaattttctatgactaaagtcactgtagtggccttatttcttctccccaagccagagttttcagtgtcttcagtctccttaacttcaattgatactattaagttttgctccttttttggcctatcactttacctttcatttgtgccaagtatagtcagtaagaatccataaagtgaactgagtagaagtttgcttacctaatctcagtgtcctcttcttactcctctgtattttcaaaccttgtctcaaggtcttaggcagcatgcccaagagaaataccagaagaaaacaaactgaaagacaaagcaagtggtgcagggaggtgagaaggcagatcatgatagagcagaactgggactagactgatgagagagaaaagatgaaggtgaaagagtagagaccaggaaagttctggagaactaaggataaatattaaactgtaaaaggagaagtggccgaattaatactttaaaaataaaacttttaaaagtactgtttttcaaagggagttactcatattatttccttggagaacagttttgaagaggagataaagataatatggaatttcagcagtatgtaaatgatactttttttttttttgagacacagccttgctcggtcgcccaggctggaccaggctggagtgcagtggtgcgatctaggctcactgcaacctccacctcccgggtccaagcgattctcctgtctcagcctcccgtgtagctaggattacaggcatgagccaccacgcctggctaattttttgtattttagtagggacggggttttaccatgttgccttggctggtctcaaacccctgagctcaggaagtccacccgcctcggctttccaaagtgctaggattataggcgtgagccactgcacctggccaacactttcaaatgctcagactgttttctagattagtgtgaaccatgttagccatactgacatcatttatttgcttcacacttttttcttcgtcataaagagaaggtaaacctcagttcagcatcttttgattcattgtaaattttaaatcggccacagctatgttaatgaaactttaacatattgccttagttaaatgctgatgagatgaaagaaaaatacgtatgccagatatattacatgtctagcctttagtatgcttttagtttgagcttagaaagagattctgtgtgttttgaggactttaacaatagtagaggccaggcacagtggctcaggcctgtgagcactttgggattctgggaggctgaggtgggaggatcacttgagcccaggagtttaagaacagccctggtaacaactctacaaaaaaaaaaaaaaattttttttttctttaaatcttggcttggcatggtggtgtactcctgcagtgctggctacttgggaggctgaggtgggaggaccacttgagcccaggagttagaggttacagtgagttatgatcatgccactgtgctgtccggcatgagtgacagaatgagattctgtctcaagaaagaaaaaacaaatagattctagagaattttaaagcaataataatcacctgaatttacctcagatagcatggatttaggaagtaaaattcaaaatcctacatagatatttagatgtagtctcttggtttcaaccaggagtactcagcaatcccagtggttacccaagataataaaaagacaagggaacaaacgtcaagggttattgttaaaatggttgtccggtaaagagagtagtgatcagggtgaatgggaagttgatatgacaataaagttgatgaatgaattcataaggaaataaacaattgagagagttatatcaacagagctttgagatgttggagagatggagtagttttgaacgactggatctgagggattgccttagtagtggatagaagttgagattttcagtgtccaatttgttaaagcagaatcatgatatgggggaggaagacagagcaatatggccaaatagaagccttcagcaattgtcccccagcaggaacatcaaattgaaaaactatccacacaaaaaagcacccccataagaaccaaaaatcaggtgagcaatcatagtacctagttttaacatattaaggaaagaggcactgaagaggataggaaacacagtcttatatctcctataccacccctcctccattccccctggtagctgccacatggcgcagaaagagaatctgcaccctgggtagggggagagcacagtgattgcgggactttgcgtttgaatatggtgctgccctgtcacatcagaaagtaacaaggggcagagctcagctggtgcccacagaaggaacgtttagacagctctagccagaggttaatcttccatctcagcagttggtatttcagttccagcagcccctgccaccatgggctaaagtgcttgggggtcctaaataatgataaaggagtcaattcagcaagagaatataaaatttttaaacatacgtctgtccaacactggagcatccagatatataaagcaaatattactagagctaaagagatagatagaccccaatacaataatagctagagacttgaagacccttctttcagcactggacagaacacccagacagaaaaaccacaaagaaatatcatacttaatctgcagcttacaccaaatggacctaatagatatttacagaacatttcatgcagtgactgcagaatacacattcttctcctcagcatatgggtcattgtcaaggatagaccatatgttaagtcacaaaacaagtctttaaaagttcaaaaaaaaattgaaattatatcaaatatcttctctgatcacagtggaataaaactagaaaccaatagcaagacacatggaaattaaacaacgtgctcctgagtgaccagtgggtcaataaattaagaaggaaatttaacaatttcttgaaagaaatgaaaatggaaatacagccttccaaaatgtatgggatacagcaaaatctgtgctaacaggaaagtttattgcaatcagtgcctatatcaaaaaagtagacaaacttcaaataaacaacctagtgttgcatcttaaagagctagaaaagcaagagcaaaccaaatccaaaatgaatagaagaaataatgatgatcagaacagaaataaatgaaattgaaacaaaaaaatacaaaaagatgagtaatctcagcattttgggaggccgaggcgggcagatcacgaggtcaagagatcgagaccgtcctggccaacatggtgaaaccccgtctctacttaaaaatacaaaaattatctgggtgctctagtcccagctactcaggaggctgaggcaggagaatcacttgaacctggaaggcggaggttgcagtgagctgagatcgtgtcactacattccagcctggcgacagcaagactccgtctcaaaaaaaaaaaaaagaaaaaaaagaaaaaaaaagaaggtttttttgaagagataaacaaaatcaagaaacttttagcccaggataaaaagggagaccttacaactaataccacagaaattcaaaggatcattagaggctactatgagcaactatatgccaataaattggaaaacccagaagaaatgagaagtcttgcagtagtgtagacattatccagcttcctgggcttttttcactttgtgttgaagggtacacattggatgagatatcattcatcctcaggagagggtttagtttaatattgaccatccttaggaagctttgttggaggaaaaagaatacttgaatttgtacctgactcttacttctgcccacgtctttcactacagtatactccaagcttgtactatatgatcttccctgctgtttagtttatataacactgttttttcagacctcaatgtagcatctttcatttccctcctacatcaccatgtccacattaaatctcagcttctggaaaacagaggtgagttgctaaatatatcttaagctcactttagccaccatcttcaatgccttattctctttgccttcttttttcctctcatttttggctgaaatactagaactgattttcatagaaccaaaggtttataggaaataatctaccattaagtggcagttataaagacttttcatattcagcatgtaaagtatgttaaagatgcaggctctggattatttaattttatattttgtttctgtttcatttgcaatttggtattttcattctgtttgatgccttagttgaagaattggaaagaacatgaaaacctcaaatcacatttatttggctctttcagtttcagtggggaaaaaaattgaaaatatctgctaaaatgacattgtatactttctaatgcaaactaatttttatctgcaattcatttttcagattttaatttaaggatgtatatgtgtattgagaggccaagtaaggcatataaccatttccattctaaaagcttcataatttctcttagtatgtgagttattaatgcttcccctaaagataaattatcccagaactcttccatttttctctagttcacattctctgacatatagctatatctgcactgtttcccctccctcacctaccaataggcctttaacaggaggcagctatcatcattcattgatattattgagtgtagtgtagtatgaagtgttccagaatatctccatgtgactacccctattctatgatgtaagtgaaagattgataagttgtcagaattatgcaattgacagttctgtgtttgagaggctgaagtcatagcttgcagatggtttcggtgcggtacaggttggtggacctcactgcccccactttctgcactctatctaggttctaaaagagattcttaaccacttgctatttatcatgcagagatttgcttatcaaaaatgtataccattttccattgagaaattgtatatcactgctttgcagctagtgatacttaggtttatcaaattctatattaaccagttttagacatattaaaatatacttatataatttttcatattaatttttgtgtacgttaattccaataagttaaatatttagaaattttaaatattttgacctgtattacatctctaattttattaatctttttatcaacaagcttgtgatatctgctcttaactcttaaatatcttctgataaccatcacctttttaaaaatcattttggttttaaatattactttttatttgttgagtcattaataaaaataaacttttatgaacagcaagcctctgagaagaaaacatttgatatgctggaatgttcctgtattgcctgctttagcatgtgtgttggcagggtgtagatacatacacccccacaacgaccctcctcccaccctatgtaaatgtactcactctacagcattgtaaaggatttcattgtgccattttgttttcagaatcatctttcactcttttgtgagtataatgatagtagctgtctctatgatgaattttaatagttacagattacagtatactttccttagtccaaacctgtgtttcaagctctgtaaaagtggttttaggtttttaaattcctatcttggaaatattttgctatcatcaaatttcattttctttaaattgtatataatgaatgtgttctccctttttaggtgcgctttgtaaagaatataacttcctggaaagagatgaaaccaggattttatcatggacacgtttcttacttggattttgcaaagtaagttacactgaaatgacacgctaaagaatgctttgtactctagtaacctaaaaaggaataaattcattaaattgttatgattttctaataaaagaatgtactgtcttgcctttgccagttttagatctgtaatttaaatataccttcttagtgttttactgccctctagtgttcataaattggcaattcttatattaattacatattagttattactctttaaagtttattattattgtgtgtatatgccttgtacaaccagaatgacactacttcaggagagctcaagttataacctagaggccagattatgacttaccacatcattgagaaagcaaaaaagctctcactaagttattggtgctccagtgtgtctgcttctcacccaagacatactgaagtgtacactttcccttgggctaccttattttagctttaaaattatgatgtattacgaggcttttttaaaaaaaattcatgatttcctctctcaccccccctctccttctccctctctccctctctccttctctcttgctctctctccctccctgtcactcactcactcactcactcactcactcactcctggactcaggtgatcctcctgcctcagcctcccaaagtgctgggattataggcatgagccactgtgcccggcctctgtcatattaatagttctctcaagaagggttcagaaaactatatgcctactcacagtattcaagtactatgtggctttctgtacagtctgtgccacattattaatcagaaaattaattaaacttaatattccaaacataacagtcttatggatacatttgaacttttttggtagtacacatagtaccattgtagtaaacctcaaatccaaatgttttccctaagattctgcattaacttcaaaaacactaaaaaaattttttttattatttagcttagacatgtttattcagtttttaaattagctattatgatttcagagtaacacaccttgatatattggtcaactttaaaaggcattttttataaaatttaaaataaaagtgatatcccactctcagttttacttaattttgaaaagaaaaagtagaatgaagtattactgattcaaactgataatcttaactttttgggaaatcatgtaattaaaaaagaatcacccaaatattacatacataaagtgatatgttcctatttctagttcctctcatagtactcaagatctttcaatcaaattgtagctctaaagttagatgtatgtttttctataaataattcatactgcaatattgaaaatattttataggcagctttaaaataaactaattatttttttctttgcataggcattgaaccaatttcataagcttcgttcatgtgcatattttccctcagggctgcattatccttgaattgaatgtttgttaccctttcacctaaatgatttattctttccacacacagcttggtttctaatagtctaggttttcattattaaaattataaattgagtgcttttgcttttggcaaagtcttatacttagaacaaagctctgatatatgctgaggttcttgtagttgaaaaaataaggctttttgaagagattaatctcatttattaaatgctgacatgaatttttaagcgtttgaatattttcatagtgagtcttatgttatttgaagggaaaagtattgtgaaaatttttcatagatttttccaagattttaaatacctaaacaaaatcagcctaggtgaaatgtattttgatgtatctatgtaatcaagaactgttgtagatgtaactagtatcctcaaatatcttttagcttaatagccatatgctccataaatggggaaggaaaaggaaagaaacatcgccttaccaattttttagattacagtcgttcctggggtatgtccagggtattggttctcggactgcctgagtatataaaaatcgcatactcaagtccctccgttggccctgtgaaacccacgaatttgaaagtcaccccttgtacacgggtttcacatctctcaagtactgtatctgtgtgtggttgaaaaaaatctatgtatgcatgggcctgcacagttcagactcgtgttgttcaagggtcaattgtgctttactcttcaaaacaatattcttgactggcatagtactttgtggagtccagtaaaatacttgctttcaggagaaagtggtgaatttggcaaaatacttatttaacacatagtttttttaaacttaccttatcagagacattaaaacgaatgtaagccccaagaaacctaggaaataagatagagaaataaaaaatgaacgctcctttctagtttagcccgaccacgaagaaatacacattatatttgcaagcttgtctactcaagccatgttttgattacatacatttgttttttactgaactttagaataataacaaaaatatcttttttacatttttgcattcctatcccatcttgctcctttttgtctgaatcttattctttgatttttttaaagtatatttcctagttcttcttcctttccatttttccctttaatgttaggttatgttttgttttctttttaattggtgaatgatacaattttaagataatgtagatataaattattataaatttgaaaattttccagtttaaaattgtatataggttggacattttcaaaatgtcatagtatgcaggaaatataaagttgagtaagttgcagttcttgaccttaatgagttcactgaaatctttttttctgtaattaccagttcatgaagttttattataaacagtaaaaatattaaatattcctccccttttaaatgtgcactatttattttttaatagcatctattagcccattttgattttcttcaaactttagaaaattaaaatgttagaagtctctttcaaaaacacttcttcagcaataaacattttcatttataatgaataatagctaaaagaacacttttaatgctgtactttctgtcagactctgctaagttttttatgatctagctacctcagtgtcacatgtcagcatctgtcttgagaggtatttgaaaattatttttgatataacagttttattcaggcacgtatcaggtatgtacctttgtagttgtccctagaaatgagaatgagttttcattgctgccattttggttcctccatattgccgctagtatcattttcagaacaagtgaggtgaatcagtaaagaagcagctatgtcacgacaagaaacaactaaatgcttcattaggtctgaaattctaaacagtaatcaagtgacaacattttaggcctaaatagaattagttaatatatagagtcatgtgagattgtcctttctacctaatacttctctgctaaaccagttgacgtttgccccattttctacaacttttaacaaatatgtcacaacattgtagatactttagaaaattattttaatcattccagacaatatgtgggagttgcgtttttattaaccttgtactactagctctttctacagcattgatcctgtagactgctaagaagcaatctctgaagtctgtctctaaagtcagacagatctgccattaaatccacttagactccttgctagctgtgtgatctcacccacattgtttcagatctttgagcttcagtgtcctgtttttaatttgagaataattaaagtaattacttcatggggtggtggtgaggattaaatgtgataatgtagatggagcacttagttctgtgcctcacgcagagcagtatggtgattctttttaaaattctgtcttctttcagttaccatattgtcttaactggtgttttcttcttctccttgtctgaatctctgctggtccttatttccaactcttaattgggcattgtataagactcttagcctccattattctcttttggaaggtttacacatttttgtctgtcatgacacccaaacaagaaactttcaagtaatcttggacaacttttttttatcaccacctatatcttatcagtcatcaagtcttttgagtgtcttctttcatttaacatgatgcttttgacattcatctaatttgatgcacatatcagtagttagttccttgctaagtagtacttcatgtatgggtgtacttcgattgatccattcaccagtttctggatattgaggttgtttatggcttttggtgattatgaataaagctgtcaaaacatttgcatacaggttttgtgcggacttatgtcttaacttctcttggataaaaacctcaaagtgggatggctggattgtatggtaactcaataagaaactgccaaactgttttcccaagtgattgtatcattttgccaccaaaccaacagtgttttaagagttccagctgttgtgtatcctcactagcatttgaaattgttagacttgctctttattacaaaatgtgagccattctaataggtgcacagttgatgaatgcccctttttaagacataaattactttaaaaatatttatttacactatcatcagtgagaccaacaaataccaacaggtcattcacttttttggatacaggacagtgggaccttgccactaggattagaaagtttctatgaagctttaggtctgagagagtccagaataactatgtacaatgtctccagcaagattgttgcctaagtagagaagttaaatttagtatgaagcagaaagatttcaaaacataatgattcccaaaggccattcagccctctttcaggttcatcacctccttttttgactttttccagccagttgacaaggttccttacaaatgttctgagtgtgcagttgatcttttaaccattattgttgttcatttgcatattgatactgttcacttgataggctattgatagaatgtaattgtaaaaaaatgagcctagtttatgttcttgctttgtcacacttcgtatgctgacatggcaagaatgaaattcctaaaatatctttttaccaacctgctgctcagattatatcttttcgtttctgattttcatctgcagattcctaccaaatatgctcttcttttcccaggaagatcgtgttctaacaggtcaacagtagtttattttctgctagtagaaatgggtttttattcttctacctgagctttgttgagaaatagctgaaatgattgaccagagttaaaggtgaggtctgaccacagacttcctatataaactagctcctatagaaactagctggttggcaaaagagtaaaaccagcaaacctcgttagctcttgttttctaactggctgagctgtgtggtccagttgctatttttaatcatgcccattatctgttataatcccttgcctccagcccttcgtgtctatataactgttccctaagttacatatcatagttcatatccattttcaaaatgagttcacagattatatctcattaaaatcatacttcctaataaatgccacccaaagccattccacacatagatagtcattttcctggacagcaaaaagagttttgtaaaatgccatattcccttttactgctgcctggtaattgctgtctgctccacatgtcagggactaggggaaaggaggaaacattggtaggagatgttcttctgcgaggagattattctcaaaggaatggctcaggatggagcagtggctaataatggagaggatagagaggattcccaggaatctcagtcttaagaatggaatcactaacccattgtcctgtaatctctccttgtagtttcctattaaaaacctctcagctctgtgagctaagggagcagcaatatattgctgttgcctccttactttcttactactcagtgtactctctggcaggaaggcttttgttagtggctaattcacaacggtctcctcaacctaattctattaatattcagcacctgtgtgttgggcacagtgctgagcattagtgataaagccatgaacaagagagaaatggtccctgccccggtggaacttctactctaataccgaatgtgacagtgctatgtatttgcaacagtactgtccttcttttaaaaaaaactgtgaaagaaaattttactgcactattggtactatgcctaccctcaggtgacttataatgctgttggggagaaagacttacaggagaaacactagtaggataagctaagagttaagttgcttgatagctcttaggtgcaggatgtgtcaaatgaaagcacatagaactgtatgctagagtcatcaggaagagaggtcacaagattttgttgtagcccctctgtttattccaaaacagcagccaatgaccttttaatatgagttgtgtcatggtaattctctttttaaatctttcagtggcctccctcctgactctgtataaagtaatgcttgtaacagtatagaagacccacacagtctgcactcactccacctcacccccacctctcttatcttccatggtattccctttttgattctacaggcagcttgatctccttgctgttcctcaaaacacctggcacttagctgcctcaaggacctcttagttggaaatcccatctttccagaacactttctcacagatgtttgcatggtaccttcctcattacataagactagtgatgtcttcccaaaaaacacaattttgaattgtattctccctcacctccctagcactccttattccctttcactgaattatttttctcctttgcactttttaccatctgttatatatgcttatttgtttattgcctatctgtcccaagtagaatgttagctctagaaggacaagaaatttagtctttttgttcattgctgtattcctagtacctagaatagtattatatctggcaatattgggttcatacaaaaagtatttttgaaggaattaatgtagaaaaaagaaaaatgagagcggcactcaaggaagacagaataagcaaagatatataaagagaaatagaataagtattgatatgggaggagataaaagaggccaacctaactataacagataaatggtttcttgtttgaggagagttaaagaaaaagttagatcaataaggtggtacctaagacataaggtaaaagaatcctaagacaaccagcaaaggagtttgggtttcatatcgataaatcagtagagttatttcagattcctaagaagagtgatttaacaaatgatgtttaggaacatcctttgagaattggtatggaagatagattgaaagggagagaaactgaatgttagaaaactatattcttgcagtaatctaagcaagcactgagaaaaagggaagtggtaaagagaaagaatgatgaagacaggtcacatctgcgagaaagcttacaaaacaaatcaaaatgactttgaaattttattaaatgaagaataatggaaaagtaagaatcaagatagctgtaacattttaagactgggacaagggtgtataataaaacagggagccagttgtacagttctagggtttgcaagggttgctaaagtaaaattcttcagtgttccatcaactctttatcattccctaaggaaataatgctgaaaacctagtgtctttcacctctatcttgtctttaaaatcagcaacagaaggtagattgacatgttcacacttgtgttcactaatgctgtatccattgatggtgttcaaaaaacactatcaaatctggctagtgtgatgagccagaagtgagaaatcattgctacatagttaatgcagatttgaaactttctgtagcagcagatgatttattcaggaatgtaataaagcaatttttaaaataagtttgcttaaaaattataaatattaaattctttcctagtaatatgtgggtactaatttgagaggggattttctacttggacttaaagtataatgaaggcatagaaataaaatgttttatataattcttgctggtaaagtttaaaattatttttcattcatttttatctcctttatcttcagacatagtttttaaattcatatttcttgtttactttattctgacatgaataatcatgaaatagttcccaatcgccacatacacatacacaaattatttaaattaattcatgttcttttttccttataggaccagtacttcagacttaaacatgtaatttcagggcactcctaaacagattgaaaatgttgatttcacctttgaaattttgttgtatttcagatttggtgtgaagaagaaaccaatttacattaatgtcataagggatcctattgagaggctagtttcttattattactttctgagatttggagatgattatagaccagggttacggagacgaaaacaaggagacaaaaaggtaatattttagttttaagatttttataaagataattgtttatgaactgcagtgagcaatgtgcttttaaaatttgttgttaattataaatttattacttgcttattgtggaaattttgaagagaacccaaaatataaagaagcaaaatgaagaaaattatatagctgatatattgtaatatacatttttttgtgatttttaaaaatatttcttttccagggcggaatcgtgttttctttatggttctattaacaattttctgtgcgattattgtaattattcactaatatgatatatttttgtgtattttttggttctctaagtattgatggcagtttatatttgtgatcatcagtttaaggacactattttgctgaagcagctatttttttctggcaagaagagaataatggctcaacaaagttcttaacaggctcaaatttgggttgtcttccatttcactgcattttctagagtatcaccagagttacatttctaagaaatcaaactgatttgtcacttctctggtggaaaacctttactgggacttcatgctcatggattaagacataggagacacaactggacacgatctcagacctagctctcctgtctgattttcctttaggtgtccagtgcttcggccacatgaaatgtcaccatcctctgaacttattgcttaagttattaatgcttcatacttttttacacatgtattattccctatattgagaatgcctttcctttactctggaaaactctttatccacctttaagatctagctcaaacatgaccacttccgtaaagtcttttctgatgcctccaggcagtgagtcatatctctttcagggctcccagagcacttcattcaaagctctcttttaagcatttattttgtgatatttggattaccagtttacctactgtcttttccaaaatgtggtgaatttcctgaagcatatatttaattcatcttcgtttcctcagaatttagcatcatacctaggttacccgtaagtgcttaacaaatggttgaatgtgtgaattctgcacattttaaacctaaactattacacagtagtgatgccagatacttggtatgttaatgataattaacatccaacagtatttttttctaagttagttataccctctgtgtcacatgatgggggcagtggttttttgttttgttttcctttttaatgatttctagaaattgctgtttctttagtctcaaagctttaggcagaagatactgatccaaacacagataactaaccaaatctgttttcttaaataatgctatctctcagcattatttaatcttctagaaatatttattgtggagattctgcgaagttttataaaatctattagtataactcttatgacttactactttagaatttattgatatttatttctaaattcacttgtgcgctttctttttattttttattttagccctacttacactaactcttgactcagtaaatgttagtatctgtctccctcctttgaccaaagtaatattagcgtcggtgttggaaaggaaaagattgcagtcatgtaggcccctatatccatcatttatcattgtcagccctggatagcatggttttgtggttcctagcctgtgtagtttgggggattgggtaataataactaataataattattaacagtaataatagctcacatttactgtgcaccataccaagcagtgttttaagttattttatatgtattttttcaggtagcttgcgcaacaattttatggggtagttgctgttattgtcctcattttacagaaaaggaaactgtggggcacagaaaggctaagtattttgcacggtgtcattcagctagtaaatggtagagctggaatttaaaaccaagcactctaattccagagcccatacatcttacatcctttgaaaagaagagaagaaatgcaacatgtcactcgacatttttctgtgaaacgtgatccaaagttgcatattcaatattcacaaaaaaatccaggcagcattttaacatcatctccctttcatgtttgaaagttttaggtagataggccatcctggagctttatctgttcttcaccctgactataataaggcctggggttttgtttttttattttttaacttcgttataaaatacacattaatatgcctgcttatctagatgtagtgttgataacatcagcaaaatactattgcattgtcttacttcttatgaggacagggctgtctgtaaataattgatttataaaaataagaaattactttgttttgtgctagacagaatgtaccttttcagtcttgaaacatattggtgattagacatttttagtaatttggcttgtttcttatgatacacatgttggtaacctaatgctgataccctaatgagttaagtggtgtttattgcaaataactccttaatatctttaactagcaggagttttcattaaactcatctgtaaagttgataagactgcatacatataacatttctaaagctggacaggttttagaaagatattgggtgttaaagggtggccatgattatgttggaaataccttgtaatggcgcttattctcaaaaatgtgtagatagctttatttctataaaattctagattctttgcacctcaagtgatattttgaggtgtattaaacagtattcagttcagcacttatggcaactattatgttttaaactgacgtactctagtaatctgaactgctccgtggttacacttcaaacacattttagatatatgtgcacctgcacctaggatagctttcacttgatcttgtaaagaatggaaggcttttgatttgggagatttcaaatttgcatattttagaactagagttttatttaatttaacctttgcccagtacctgggaaaatagggatattaagtaatccaaagatgagcattgaataactatatcaatcaaatcagtggttctcaaactttttgatataggaactccttttatactcttaaaaattattaaggattgcccaaagagcttttgttttgttttgttttgttttgggttatatctattgatatttaccaatatcagtaaatttgccatttactgaaaaaattttaaaatattaaaacaatagtaaagccatcatgttaacataaattatattttaatgcacataactatttctcctccgacaaaaaaatgaaaagagtggcatcggtttacatttttgcaaatctttttatcatctggcttactatagacagccggttttctttttttttttttttcattttctgtttttttgttttgttttgttttgaaccctgagaagctagacagctgattttcatatttgctcctgaattcaatttgttcgaaatgttcttttggttgaattgaggaaatccagcttcacacagatatataattagaaaagagaggattttaatagcttttcaaaaaattgcggctattctttaataaacactaaaacttgacaagtggtagtttcaaaagttagttgcaatgtagaatctgaaaccatagcagtgaactttttatactttgctacattaaaatctattgatatgttttacactttgaatgaatcttttaaccaagcataattttgaaacatcatacattggtcatttggaacatactggttcactgagttatgtggacttttcaaatgttaacatattttgttatacagcgttaaaaactcatatacattaatatcaccactaatctcatcagaaaagtctttaagtattgggagactgtcaagcttatggtggcagatacaagttttccaaaattttattttttgcttgaaagcttaatttttatcattggcctatcacaggatttctcaacctcaacattattgttgttttgggccagataattctttgttgtggggggcttcttatacattgtaggatgtttaccagcatctcttacttctacctggtagcatcccccatacctcagctgtgagaacgagaattgccttcaaacattgccaaatatcacctgagggtcagaatagcttccagctgagaacccgtgggatatcaacactgtcagtttttccttcaagtgacaggcataatttattcattttgagaaaatatcaccaaatactcaaattcaaatagctatagtttgggatatggtaggtgcatggatatataaggttttatttcttatttcttcttatgagctacaaaatctggcacaaatgataataaaaccactttttagaaaatggcctaggctggcaaatctaagaccatctagaaaaattcagaaataatatcaaatgcctcatgaaaatattttatttcctctgtcttcacctccactagagctatgcctttaatacccatgtaaatccccaaggtgcagtcttttcagtagtcatttacaaatattaatagtgcaagtggtttatatagcactattctatatgctctggaggacacaaatgctactgcttgatccacaaatgctacttcaggaagttttcactgtagttggaaagacagaacataacacataacacatttaaaaagcatatgaaacaagttatgtagataaagatatagacagacagatcaacctatcctaagattctaaaccagatcctaagagctgcctgttacaaggcagtatgtgattttgttttgttttgttttgtttttgttttttttgagacggagtcttgctctgtcgccaggctggagtgcagtgtctccatctcggctcactgcagcttccacctcctgggttcaagcgattctcccgcctcagcctcctgagtagctgggactacaggcgcgtgctaccacgcccagctaatttttctatttttaggagagatggggtttcaccatgttaactaggacggtctcgatttcttgacctcgcgatctgcccgcctcggcctcccaaagtgctgggattaaaggtgtgagccaccgtgcccaactgtgattaatttacatgactccaaaaaaaataagagtgtctcatcccacctactctggcccatttatttaataatttaccacattagatatttgataggtgagacttggatttatggcttacccgtgctgctttgtctttgttctagacctttgatgaatgtgtagcagaaggtggctcagactgtgctccagagaagctctggcttcaaatcccgttcttctgtggccatagctccgaatgctggtaggggagataaagttggctcagattgattatcatccttattatctctgtaatctgtgtttcatttcacaagggctagatatagggaaatcggtgaaagactagactaaaaataacatgtaattcagtaatatctagttttgcagttacttttaaatgcatttaaaagattcctcatgtagagtgatatcctaatatccttgcattgttttctgagatgccggtttttagtatttcttatttttggtgttatgttttgctgtattccagcagagctcttagagactgggggtgggggtgggtgtcataaatcttattttgtccaaagcttactgttttagctattcatgttaaattaagaaaaggcttagtgggttaaaattcacctggttttactgttaaactgattttgactttaagagaagccaaggttatggctgtggtttagtttgctagtaaatatcaagtggaaaataaagatactttaataagaactgtatttcctcagaatgtgttgagttttcagtttttaaaaataattttacgtatttatttgttctattcaatcattttaataggagaagtaggagaaaaaaggaacatattcaaagtttcttccataaaccataatgagaaatacaaggaatgtcttcattatttgagataatattattagattgctgtggagtttaaggtcctactcattagattacatcaaagcctcataatagtataagaattggaagcctataaagaatgccttctcaatttttaaccatttctttagaacagggattggcaaactacaggttgtatcctgcagacccagtttggcctttcacctgttttattttttatttttttgagacagaatctcactctatcacacaagctggagtgcaggggcacaatcttggctcactgcaacctccgcctcctgggttcacaattcttctgtctcagcctcccgaatagctgggactacaggtgcctgcactaccctggctaatttttgtatttttagtagagatggggtttcaccatgttggccaggctggtctcgaactcctgacctcaagggatccacctgcctcggcctcccaaagtgctgggattacaggcatgagccaccgtgcccagctgtgtcacctgttttataaataaagttttattgaaacacagccacatacatttttttacttattgcttgtggctgttttcacactgcagcagcagagttgagtaattgtaacctaaaccatgtgtattagctgttcttgcattactgtaaagtactacctgagactgggtaatttataaagaaaagaggtttaattggctcactgttctgcaggatgtacaagcatggcaccaacaagggcctcaggaagcttacactcgtggcagaaggtgacgcaggaacaggcatatcacatggtgggagcaagaaagtgggcagtaggggtgggggtatggttcccagactttcaaacaaccagatcttacgtgaactgagcgagagctcagttatcaccaaggggatggcactaaaccattcatgacagatctgctcccatgagccaatcacctcccaccaggccctacctccagcattgggaatcacatttcaacatgagatttggagggaacaaacatccaaaccatattattctgcccctggctcaccaaatctcatgtctttcttatatttcaaaatatattcatcccttcacagtagtcccaaagtcttattccagcattaactcaaaagtcccaagtccaaaatctcatctggagatgagttccttctacctatgagcctgtgagataaaaaacaagttatttattcccagtaacaatggtggtataggcattggataaacatttcccttccaaaagggagaaattggccaaaagaaaggcgcagtaggccccacacaagtctaaaacccagcagggcagtcattaaatcttaaagctccaacataatccttgacttcatctcctgcatcctggtgcaaggggtgggctcccaaggccttgagcagccctgcccccatggctttgcagggtacagcccacatggctgctctcatgggttggaattgagtgtacctgtagtttttccaggcaaagcgtgcaagccgatggtgagccaaccattctggggtctggagggcataatcaccttcccacagctccactaggcagttccctgtttgagtctttgtgtggggtgagggctgcagtgcaacccagttctgaaatctaggtggaatctgcaatctaggtggaatgcaagctccttcatgcttgcattctgagcatctgcagacttaacaccacctggaaaccaccaatgtttacagtttatgctcccccagagtggtggcccaagctatacctggactcctttgagctgaggctggaactggagtggccgggatgtggggagcaatgtcccaaggcttctcagggcagcaggaccctgggcctgcccccttaaatcattcttccccccaaggcttctgggcctgtgatgggaggggcagcctggaagatctctgaaatgcctttgaggcctttttcccattgtcttggatattagcagttggctcccttttagtcatgctaacctccttaataagtgattgctccacagtgttattaaattccttccctattccctgccctattccctggaaaataggctttccagtgggagtggttgctcatgcctgtaattccagcactttggaagaccaaagtgggaggatcacttgagcccagaaatttgagactagcctgggcaacctcatctctacaaaacataaagttagccaggtgtggtggcatatgcccatagtcccagctacttgggaggctaaggtaggaagaacacatgagtccaggaggttaaggctgcagtgagccaagatccagcctgggtaacagagcaagaccctgtctttaaaacaaaaaacaacaaaaagagggggctttccttctctaccacatggccaggctgtgaattttccaaatgtttatgctctgcctccctttaaaatgtaagttccaactttaagtcattcctttgctcttgcatttgattgtagcctcttagacacagccaggccacatcttaaatgctttgctgcttagaaatttattctgccagatgtcctaagtcatcacttttgtgtgtgtgtgtgtgttttttgtttttttttttttttttttttttttttttgaggcagtctcactctgtcagccaggctggagtgcagtggcacgatctcggttcactgcaacctccgcctcccgggctcaggcaattctcctgcctcagcctcctgagtagctgggattacaggcgtgtgccaccatgcccagctaatttttgtatttttagtaaagatggggtttcgctatgttggccaggctggtctcgaactccagacctcaggtaatccgcctgtctcggcctcccaaagtgctgggattacaggtgtgagccaccgcacccgaccagtcatcactctaagttcaaacttccatagatctctagaacttggacaccacatagccaagttctttgctaaggcataacacaggtgacctttactccagttctcagtaacttcttcatttccctctgagacctcatcagcctggacttctgtccatatttctgtcagcatttttatcacaatcattaaaccagtctcgacttaagaaatttcaaagtttccctcttcttcctgtcttcttctgagcccttcaaattcttccaaccgctgcccattacccagttccaaagccactttcccattttcaggtatctttatagcaacacccaactccttagtaccaattttctctattaggccattcttacattactgtgaaggaatacctgagatggtaatttataatgaaaaaaggtttacttggctcatggttctgcaggctgtgcaagcatggcaccaacatctgtttggcttatgatgcaggcctcaggaagcttacaatcatggcagaaagtgaagtgcgagcaggcacatcatatggcaagagtgggagaaagagagtgaagggggaggacccagtcgtttattattattattattattatttttgagacaaagttttgctcttgtcgcccaggctggagtgcaatggtgtgatctcggctcaccgcaaacctccacctcccaggttcaagcaattctcctgcctcagcctcctgagtagctgggaatataggcatgcaccaccatgcccagctgattttgtatttttagtagagatggggtttctccatgttggtcgggctggtcttgaactcccaacctgaggtgacccgcccaccttggcctcccaaagtgctgggattacaggtgtgagccaccgcaccaggcccccagtcttttaaataactagatctctaatgaactaactgagccaagaactcagtcatcaccaaggggatggtgctaaaccattcacaagggacctgctcccatgatccagttacctcccaccaagcccagcctccaacactgggaatcacatttcagaatgagagttagagggaacaaatatccaaaccatatcactatgtagtctgcaaaacctaaaatatttatcctctggccttttatataaaaagtttgccaatccctgccttagaacaataaagacttgctctattgggcatttttgagaagttaattgtatttctttagtatgtttcatagattcacagaactgggagggttcttagaaaccaattaatcactgttcccctccccctctttgttttttttaatagtttgagaaaacaaaattgagaaaggtgaagccaccagctcaagatcatactgctacttaaatgcagagctagaatttggattaaggaatatttgtgctaaaaagaacccaaaagtatagtttattttggatcaaatctctgttaatagcattagctgacaatgtaaattaaaataaaaataaaagattcttagcagagccattatctattttctgttcctcagaaatttcagaaaacacttagctcacaaaaacccgaaactcacacaataagcagtaaacacaaattgtttacactttgctagagagctcttaacagaatttagagtagtttaaaaaagttaaaacacacactaaatcatatgggaggggtgtatgtttcttatatccatatacatttttaaagtgcccttaaactaaattgctcatgttaagagtcctctggtaaactctgaattagcactcatagttgagcagaaactggagatggaagcaaatgaaattggaaacaggtgtgcctcccacaggatggtaataaagaggcattgaggctttggatatacatgtgtttatctattttctctgtaatatatggtgtcaaaggcaccagaaacactcagcagatttcacaaccaggttttaattccttttctttggtttcaggaatgtgggaagcaggtgggctatggatcaagccaagtataacctaattaatgaatattttctggtgggagttactgaagaacttgaagattttatcatgttattggaggcagcattgccccggtttttcaggggtgctactgaactctatcgcacaggtatataaaggaagggtttctttttaaagctttctttggtttggttttttggtttgcaacttgtaaatatgtgatttgaagtttcttcagtgaaacacaacagatagctccagaaaggcaggtatcttgtcggtttctgctcactattttcaattgagtaactgtgaattaggtgaaaattagaaggcactgtagaaatagtggaatgatacaaagtacagaaccagccatagaaatgtatggtattcaataatgccagatatcaaacattaggcctgtgtataagtcctgcctactaccattttgaagtagaggtgtgataggggaactgaagtatgcctaagccatgttttagcagcctcagccgtattatcatgtgtctgaaagtgataagctaattgtgtttttgttttgtttcgttttttgctattgcttgataagatgcagtcataggaactcttctccttgaggatgcatatgccctagcttctaacacataattttagagaatacagattatgagaaaatagaatacagtttgacaataggtattttatcaaaaataaactagtctcagagcaccaagcacttgagaatatagtgtgtgaggtgacagcctacactttactgtgtgccaatccttacattgactatttgacatttcattaagtctttactaggttaaggattaacattctaaaggactgaatcatggctctagtttgatcaaggctccgtttttacctgaattatataagacaattatgttacctgttcttaatgtgtcatattaaccacctcttcaaataaagaggcattgatcttttgtgtgttctccaagaattatttacctttcctttttttccccctttgtaagtaggaaagaaatctcatcttaggaaaaccacagagaagaaactccccactaaacaaaccattgcaaaactacagcaatctgatatttggaaaatggagaatgagttctatgaatttgcactagagcagttccaattcatcagagcccatgccgttcgagaaaaagatggagacctctacatcctcgcacaaaactttttctatgaaaagatttaccctaagtcgaactgagtataaggtgtgactattggattcttgaactaaaatttgaccctgtcttcacctttgttctcagctccacagtctggattgctgacagtaggtgtatatgacaatttgtattgagccaaattaggaaacagacagtaacgtcaaggaagtagatactggctggcattgtcagtgttctaagtttcaggcatttttatttttcctggctaaacgttggtgaaagttataacctcctgcctgggagaaaatatacatcacctaaaatgaacttatggcaggtctaatcaaaaggctaaatacaatttcagaaaaggttctgatactcttgtttttgataaagcattttttcaactaaccatgaattaagatgagtccatttgcctcttctgccttcactgagggtttgggttatacacctctactgaattgtgttaataactgtttggcagtgtgtactttgtttttgtgagtcatgtctcatgaaatttattggaatgtttaatcatatttgctaagaaatgtttctgctgtagttggatttgcccatatttatgtaggtggttttaattttttaaatggtgattagtgttaaaaatcaatttaaatcatgactaatatggtaaaaagataaagcatcaaagcagtatttctcattcctgcctcctcaatatctaatactgggaagatacttcaaagaatattgagattgtctgaagttttagttaagattttcacacattaatatcaaaaaagtaagtttagtatttgtttctccatgggttatttgtaaagctgtaaactgagatatcggtgactccgtattatgactccattagtgagctgtggtatgggtaggattttcctacttcttctgtacttttacctgtagactatttttactaaggtgctttataatgtgttttaaagcattgcatttacaaaacaaggaaaatgctgtaaatattgcatattttatgtatttggaccaaaaggttacaagtaattagacaaaagtggttttgcaccaattttatgtcaagtaaaaccatcagacctactgttcttgtatttctcatttaactttactgttaagacatcactgaaatgaacttcagtaagctttcaattttgatacacagttcattattcataacttgaggcagtaattacagtggaatgagtactggacaaggagtcaaaaaacttgatttcaggtcctagctctagcacttacagctgtgtgatcttgggcaagtcacttaacctctctttgcctcaatttcctcatcttgaaatgaggataataatacctgctgtacctacctcacagggctgttgtgaggattaaatgagatggcatgtgaaagcactttgaaaattgtaaagcgctatgtaaatgtaaggtattatagaaacatctttaacatatagtttcataccattcattttttaacaaagaaagggaaaagtctgcttgtaagctggttgaaaaagttaatcttgatataaatttgtgtttgataaatatcctctcagtgttttatcttccatgtttcaacaactattgaaatatgaaatgcctgtgaactcttaaagcttcatgagcagctgcttgagttcaggaagttcactgttagaaataggctttgttagctgactagggtcagggaaacttttctcttcaaatttgaaagctgtttctgttttcattttacattattattcagaaatggtagctattctatacctatggtttaagtaaatatttctgaataaggcttcaccatactgtaagcattttaggtagattgccttaaaggttatgggagggcatgagggaacacttcttatgagaaaacatttataaacaaaagaaacatttataaactaaagaaaaactaaaagaatgacagaacaatcatcttagcaccctttcctcacaataatataaaaatattaaaagaacataggcaggctttttttaaatttggcttttttctttccttttttcaaattgacttttataggtatttcctgaaagtgtatacaaattatttcctcgcccaaaataaagcaccacttcaaggtgtggtttgacattacatgctaatgaacaaacccagtatgcaagttattcttgcaccacatgctcaaatcttcttgaggtgcattaactcttttaggtaactagagcagtacttggtgaactagatcaggaggtcagtaaactttctgtggaagggccagagagtaaatattttaggctttgcagcccatacggtctctgtcacagctagtcaaccctgccattttaccacaaaagcagcaatagacattatgtaaacaaatgagcacagttatgttccaataaaactttatttacaaaaacagatgacatcccagatgcagaccatgggcaaccaaccattgcactggccaaatcattatttatggagaaatcctctttgtgtctctactctagatgcctaaaagagtttatatacttctaaaagctcctaacttatatccaaagaattgctttctgattcgtgtagtctctcccacagattcataaacttttatgacttatattgtttccaggtgggcatggtttatttcccagtttaacagttcagaataggggcatttattttatcatattttagggtgggttaggagtatcctttctggagactgagaaaggggtgtatttaattccatcaggtccagtacagtactaggagtcataatactttataatcaattaaataaatagaaccactgagacaataatgtatttttttaaagtggcaaatgtggttttcttttttcagcctttgcgctttttcagtattttgaccatagggagataatttttttataatacaaaagtaaccacttggaattttaaagataatgttatgtgtgtatgtgaaatatatatacatatatatatatatgtttatttcctaaaagaagaaaagatacctttctgttcaacttgtatcaactcctcttttctaattgctgtgaaatggcaactgttgataaattattgtgattgttttaaaatctaatgggaagtaaaatatattttgattttacccagcttaatctgtaaagtagcacttaaatatatctgatagcaacacttaagatattgcatggggattactttcctatcatccatatgcatttgtgcaacttcaaacatattgggtgcttctgaattcctgatgattggatttaagctattgaaaattggataatttaaacttaatgatttttataattttctgatcttaaaatttggttaatgcctataatctgttgctttttctcaatatgtgtcctattggaaattcctcaaatcgttggtgccatcagtgatttacaaacaatattttgatattgcagatgacttgcttactgtatttgcattgttagaaaacagtttgtagacaatgattcttttttaataaaatcaaataattctaaaagtgctagagaatttaactaaaagctggttcccaaatgcatagctggcattttaatttaaattcaaatctacatagagaacatctgtgtaaatcatctaactggatttttccattggtcattcccaaacacacctatggtcctagaatccttaagagaagcaccctgtaaccttttatgtggtttgcctttaagaggcccaggtgcttctcctttatgatttgagttggcctcttcataaattagtgctgtttactttcagaggaagcagagaagttgctgttatgtttttgcatccgtttaccctatgcaaagttgctgtatgatgccaactaaactactctttaggcagccttctgaggagaaaagcaaccctgtttcaaatccactgccaattcagctcctctggagtggagctttctgatttcttggagcaggaattttagagattgaaatgaatgatcatttagtcagatttatcctgtaatttcatgcagctttgtggcctttgcagtactatttataaaatggaccctgatggtgatgaactctttagaacgcattactgttaagcctgtgttgagacattgatgctgtctatctcattttttagacagtttttgtagctttctattgagagtcaggtatgtgagcatctctgaagcagtgttgaatgtaattttcggaaacatggattgtgtattttgacttttattttataaatacacagctcaacagtgccttttttttccctcatagtcctgttggaagatgctcactactttctctcttctctctccctgccctcccccactccattcagttgattcatttatgcaaattctgtttccaacttgaaaccattttgtcacatctgttggagagataatcactccttttccttaacattctgccagctttctgatgttgaagtgtttcagttgactacctgatgcaaaagctataaaataaacagtgggaaggggaaaaattggtgtcctgttttaatattttcttttgtagccttgacactgatggacattttccaagctgactcagtgttcagtgtcaacttaactctcagatagtgttgccatcaagaaagcatgcaacatcattggtttctaatgattttatggcttgtgacaatattttatctggactgacatgcctctgctgcttttgctttgtacttcattgctggtaataaaatttcagatggaaaacttacaaaatatatacttaattagaagaaaaaaatagagaaagggctattagaattaaaaaaatttgaaagtaacttaatctaacatttatggcacagtttggacatatccataattttttttgggaacacacatttctgattttttttttcccccttaaagaagaaagtctcaattccattgattttcaattcttagccactggctcattgctttgagcaatgcttgattgattctatttatattatatgatattgggttgataaaataccagttcaatgatgagttttcttaacagaatttggtttgtacttgcagtggctgaacaaagagcatggcttgagaatcaaagggatctgcatttagcaatgtgatgtcagtaaatggacataacaggattgttgtaaaggttgggcatgatgtatgcaaagtactggccagggtagactaataactgatggcatttatatgctgtgctggaatattgttaccaagctgatgtgccgttctcaccctgcagaatactggttttgtcatttcataaatgatatttttataaata

SEQ ID NO: 391 - DNA, 2060 bp, Homo sapiens
  source 1..2060: mol_type = genomic DNA; note = NC_000022.11:c16592810-16590751 CCT8L2 [organism=Homo sapiens] [GeneID=150160] [chromosome=22]
gttgagaggccccaagacccagttcctttacagaatcaaccctggggtggctttaggactgggctctttggagctcatccttggacccacagtggagtgctggtccgtgctgatgtcttcagataccaatcaatgggcatttggctccttgcttccactgacctcttgagtactttcaacgatcggtgtcaggagtgccccagctgctgtttctagagcatctctgcaacccacggtggcctctcctctctctgcgggccatggacagcacagtcccttcagccctggagctgccccagcggctggcactgaacccaagggagagcccgaggagtccagaagaggaggagccccacctgctgagcagcttggctgcagtccagaccctggccagtgtcatccggccttgctatggcccccacggccggcagaagttcctggtgaccatgaaaggagaaacagtgtgcacggggtgtgccactgccatcctcagggccctggagctggagcacccagcagcatggctcctccgggaagcaggacaaacccaggcagagaatagtggggacggcacagccttcgtggttctgctgacggaagccttgctggaacaggcagagcagctgctgaaggctggcctgcctcgcccgcagctccgggaggcctacgccacggccactgcagaggtcctggccacactgccctccctggccatccaatctctggggcctttggaagatccatcctgggccctccattctgtgatgaatacccacaccctgtcccccatggaccacttgaccaagctggtggcccacgcctgctgggctatcaaggaactagacggcagcttcaagcctgagcgtgttggggtgtgcgcgctgcccggggggacactggaggattcctgcctcctcccggggttagcaatatctgggaagctctgtgggcaaatggccacagtgttaagtggtgccagggtggctctctttgcttgcccctttggtcctgcccatccaaatgcaccagcaacggcccgtctttctagtcctgctgatctagctcaatttagtaaaggaagcgatcaattactagaaaagcaagtaggccagctagcagctgcaggaattaatgtggcagtggtgttgggggaggtcgacgaggagaccctcacactggcggacaagtatggcatcgtggtgattcaagctaggtcttggatggagatcatttacctgagtgaggtgttggacacacctctgctgcctcgtctgctccctccccagaggccaggcaagtgccagagggtttacaggcaggagctgggagatggtttggctgtggtatttgaatgggaatgtacaggcacacctgccctcactgtggttctcaggggagccaccacccaggggctgcggagtgcagagcaggccgtctaccacggcattgatgcctatttccagctatgtcaagatcccagactgattccaggagctggggccacagaaatggctttggcaaaaatgctttctgataaaggaagcagattggaagggcccagtgggcctgcattcctagcatttgcctgggccctgaagtatcttcctaaaactttggcagagaatgcaggcttagctgtctcagacgtgatggcagaaatgagtggagtgcaccaaggtgggaacctcctaatgggtgtgggaactgaagggataataaatgtggcccaggaaggggtgtgggacaccctaatagtcaaagcccaaggatttcgagcagtggctgaggtggtgctacagctcgtgactgtagatgaaatcgtagtggccaagaaaagtcccacacatcaggagatctggaatcctgactctaagaagacaaagaaacacccacctcctgtggaaacaaaaaaaatccttggattgaataactagtgataccctcaataaaacagggattgccaagaagggaacaatcaccccaaaaatgaatgtttgcctttattccgtgtttggtacttgattcactttctttaaataaaaacatgaaggaacataaaa

SEQ ID NO: 392 - DNA, 19239 bp, Homo sapiens
  source 1..19239: mol_type = genomic DNA; note = NC_000019.10:4304598-4323836 FSD1 [organism=Homo sapiens] [GeneID=79187] [chromosome=19]
gcaatgcgcgcggtgatggagcgctaaccgggggcgcggcggcggcgagggctcggcgggccattggctaccggccgcggcaaaggcagcttggggacccagcgtgcgcggggcccgcgggccgggccggggtgacctgggctgcagccatggaagaacagagggtaggacggggtggggcagggcgggcccgcaggggcgtcgggggcggggaaggggaccaggtgttgccgcagcgcccccactccctccccgcctccaccccagctgctctgcggctgaggccccaccccattcgcgaccccgcccggatctagcccccctaccccagtttgggacgcagcccccccacatcttggcttggggccaggcacgtgccttctacgcccccccaccctgcccagtatcccagtcccatccctgacccccatcccccacgccctccctcctggccgcggaccaggcgtcccggccccccgccccacccctggaagacgccccgccagctccgcagtgcggaccccaccgaccctgccccaggaaaaaggagcaggttggagcctgggtcagagcaagaggctcccgagcgggatcctccctcccagaatcccctgcccttccccaagacctccctgccccctccccgcttacctggcgcccccgcatccctggcccccaggttccacctttgcccaggtaatttctttctccttgcttatctttctcccccaggtaggccccacccctgttccgaggctagcccctatcccaggctatcccacctccctggggtttttccttccaccgagaaccctttccccaggttagcccattttccagcagacatccttctcctctggggttttctgtcctcaggctagcccctcacgccccaccttcaggatgtaggtatcgggttgtagcctttgtgctcaagcacgcctggttcggggccagggtctgtcccttcctgagaggttctctgtgagcctcagtttcctctcctgtaatatggggtagcttagggcgcccagctgctatgggtgaattgtatcagcccggagctttacctcctggctggtgcccaagctcaatagcgtggcagcccccacatctcctctctggatccctggaggggagcgcgggtcagggagcctggccaggctgacgggctcacctgcctgccgtgtgtgtgtgcgcatgtgtgtgcatgtgtgtgcgcacgcgtgtgcatttatgtacgtgtgtgcatgtgtgtgcacgtgtgtacatgtgcgtacacgtgtgtgtacctgtgtgcgcacatgtgtgtgtgcacctgtgtgtgtccacacttctggtggtgcaggaggccctgaggaagatcatcaaaacactggctgtgaagaatgaagaaattcagagctttatctactccctgaaacagatgctgctgaacgtggaggtgaaggcggtggggcagtcctggggaggtaaggggaggggaggaagctggagggtgcagccttaggaactggcccattgctgttgatgcctgtgggaggtctcaggttccctctctgaacacgggctttggccgattctggctgttccgacccaggcgaactcggcgaaggtgcaggaggacctcgaagcagagttccagtccctcttctccctcctggaggagctgaaagaaggcatgcttatgaagataaaacaggaccgtgccagccgtacctacgagctgcaggtgagggctgagggcatcttcctctccccccgcccctcctactcaacagaacgtagctgacctcggcaccttcctccaaaaactgggtgctctcgagtttctgatctctcccctgacccctccatccacctgtacactctctcttttttttttttgagacggaggtctcgctctgtcgcccaggctggagtgcagtggcatgatatcggctcactgcaacctccgcctcctgggttcaagcaattctcctacctcagcctcccaagtagctgggattacaggtacccgccatcatgctgggctaattttcgtatttttagtagagatggggtttcaccgtgtgggccaagctgacctcaggtgatcctcctgcctcagcctcccaaagtgctgggatgacaggcatgagcccccgcgcctggcccatctgtgctctctctgaatcccctctccatcacggcgtccccgagtctggctcagatcttcccctcctgtcttcactcagtgcctccggtttctcagcccttcccactggccccccagatctgaaggtatcacctccactcaaacaccacccatggctcccgtgggctgtcactcagactccaagctggagtcacacaggctgcatccagacctcctgggcaacttcctgacatcccagattcctgtcccagggggaatctagagccctggagctcggatgtggcctaggcatgtgagtttttggtttgttttgttttgagacagagtcttattctgtcacccaggctggagtccagtggcgcaatcatgcctcactgcagcgtccgcctcccaggcttaagcgattctcccatcttagcctcccaagtagctgggaccacaggaaggtgccaccacgcccagctcatttttgtattttttggtggagactggttttcaccatgttgcctagactagtcttgaactcatgggctcaagcgatcctcctgccttggcctcccaaattgctgggattacaggcatgagcctctgtgcctggctcatgtgagttttttttgttttgttttgtttttgagatggagtctctctctgtgacccaggctggatcagttgcacaacctcagctcactgcaacctccgcctcccgggttcaagtgattctcctgcctcagcctcccgagtagctgggattagaggtgcccaccaccacacccagctacttttttctatgtttagtggagacagggtttcactgtgttggccaggctagtcttgaactcctgacctcaggtgatcctcccgcctcagcctcccaaagtgctgggattacaggcctgagccaccacacccggccttacgtgtttttagggaagggattccccagggattctgttctgctccccgagcccagccccatttggtggggcgctcaaggctccaatctccatctctcacctggagttcgagaagggcatggtaccctggattctgaatggggtggggagccctcagggggcctgaggcagtggggtgagttgtcccctcctttggtgcctggtatccacagaaccagctggctgcctgcacgcgggccctggagagctccgaggagcttctggagacagccaaccagactctgcaggccatggacagcgaggactttcctcaggtgggtgcctctgatgctgccaggtaaagaacagtgtgcccagtcacgtttgcatttcaggtgaacaagcacatttttagtgtaagtatagcccacccatgcgatagttggcaaaagtacatactgataccaagaaagtgtccaggccgggcacagtggctacgcctgtaatcccagcactttgggaggctgaggcagtggatcacctgaggtcaggagttcaagactagcctggccaacacggggaaaccccatctctactaaaaatacaaacattagctggatgtggtggtgggcgcctgtaatcccagctacttgggaggctgaggcgggagaatcgcttgaacctgggaggcagaggttgccgtgagctgagattgtgtcactgcattccagactgggcaacagagggagacttcatctcaaaaacaaagaaaaaaagaaaagaaagcattcaggctgggtgcagtggctcatgcctgtaataccagcagtttgggaggccgaggcaggaggattgcttgaggccaggagtttcagaccaacatgggcaacatagtgaaaccccatctctacaaaaaataaaataattggccaggcacaggggctcatgcctgtaatcccagcactttgggaggccaaggcgggcggatcacgaggtcaggagatcaagaccatcctaacacagtgaaaccccgtctctactaaaaaaaaatacaaataaattagccgggcgtggtggcgggcacctgtagttccagctactcgggaggctgaggcaggagaatggcgtgaactcgggaggcggagcttgcagtgagccaagatcgcgccaccgcactccagcctgggcaacagagcgagactccgtcgcaaaaaaaagagattgagaccatcttggctaggacggtgaaaccccgtctctactaaatatacaaaaagttagccgggcatggtggcgggcacctgtagtcccagctactcaggaggctgaggcaggaggatggtgtgaacccgggaggcagagcttgcagtgagcagagatcgcaccactgcactccagcctaggtgacagagcaagactctgtttcaaaaaataaaataaaataaaataattagctgggtgtggtggcacacacctgtggtcccagctactcaagaggctgaagtgggaggattgtttgagctccagagttcaaggttacaatgagccgtgattgttacactgcactctagcctgagggacagagccagaccttgtctcaaaaaaaaagaaaaaaaaagtattcattgttgatctgaaatgcaaatgaataaatacttttttagtataagggtatatatgtgcacactaagaactgcatttgtgtgagtatatcccaaagagtgcatgggacatagtcatgatttatctgaaatgccaatttaactgggcatcctgtagttttattcagtgaatttgccagctgtatgggctgggtgtgggcaggaggttggggtggggatgggagcctgtcttggccatcctctgtcttcagggcacagtccagaagtgcagggacactttggcaaataccttcctcgagaggcctcagtcttcatgtctgtagagtggctttatgatttggtagaaacaaatctttgggccgggcgcagtggctcacgcctgtaatcccagcactttgggaggctgaggcgggccgatcatgaggtcaggagatcaagacaagcctggctaatacagtgaaaccctatctctgctaaaaatacaaaaaattagctgggtgtggtggcgggcgcctgtagtcccagctactcgggaggctgaggcaggagaatggcgtgaacccgggaggcggagcttgcagtgagccgagatcgtgccactgcactccagcctgaacgacagagcaagactccatctcaaaaaaaaaaaaacacaaaaaatgaaacaaatctttgggccaggcacggtggctcatgcctgtaatcccagcactctgggaggctgaggcaggcggatcacctgaggtcaggagtttgagaccagtgtggccaacatggcaaaaccccatctctctaaaaatacaaaaaattggccgggtgtggtggtgggtgcttgtaatcccagctactcaggaggctgaggcagaattgcttgaacccaggaggtggaggttgcagtgagccgagatctctccactgcaatccagcctgggcaacagagcaagactccgtctcaaaaacaaaaaaagaaatctttgaatgttgttctgttcctctctctaggctgccaagcaaatcaaagatgggtaagacactggggtctggcccccaccccactaccctgcccctggtgtgaagacaggggccacctggtgagggtgtctcatctcagagccctggacgggagccctggggaggggccccctcgcgccacggatgaccaggcctggtcccccacgcaacgcctgccacctccttcctgcagagtgaccatggcccctgccttccggctatcattgaaagcgaaggtcagtgacaacatgagtcacctcatggtggacttcgcgcaagagcggcagatgctacaggcactcaagttcctgcctggtgagaggggcacgcactagagggccaggacttccggggaatgacctgggaggctaggaggccctgaaacaggacctggagtatggtggacgacccggtgtctgaattccgcctgggggaggtggagctctgagaattccacgccctgtggggggtggagttctcatggagccccgcccctgggtggagccatgggaagaccccacccactgtgtagtgacatcctgggaaaactctgtacccaggggtggaactgtgagaataccatgtcctgtggggttggttgagtcctcatgaggccccgccctggggtggagccatgagaaggtcaaactcaccaggtgggaaaatcctgtccccaggggtggagccctgagaatagcacgtcctgtgggggtggggtattcatcaagtcccgcccatgggtggagccatcagaaagccccacccaccagggggtgaggtcctgggaaaactctgtccacaggggtggagccctgagaataccatgtcgttgggggagtggagtcctcccgagacctcctccctggatagagccacgagaagggcctgcccaccacatggtagctcctgggaaaaccctgtttccaggggtggagccctgagaaggccacgtccccgaggagaaatggactgagaacccagcctgtctatgatgcagccccaaagaaagccgcatccctcattggcagagattttggaataattctgcctgtaaatgatggaatcccaagaaagctcagccctcccccaacccactgatggaaccttagcgtctccatggccgggcgcggtgactcacgcctggaatcccagcactttgggaggccgaggcgggtggatcacttgaggtcaggagttcaagaccagcctggccaacatggagaaaccctgtctctactaaaaatataaaaaattagccgggccatggtggctcacgactgtaatcccagctactcaggaggctgaggcaggagaatcgcttgaaccagggagtcggaggttgcagtgagccaagatcgtgccactgcactccagcctgggtgacaagagcaagactctgtctctaaaaaaaaaaaagtctccaccctgccaaacatggaacccctttgtggccatgcccccaaaattgtccaacatgtggttgggcagccctgcagcaagccccctgccccctgaaccaggcacagaatcccgaccccctctcctttccgtcttggtcagtgcccagcgcacccgtgatcgacctggctgagtccctggtggcagataactgtgtgaccctggtgtggcgcatgccggatgaggacagcaagattgaccactacgtgctggagtaccggcggaccaacttcgagggcccgccccgcctcaaggaggaccagccctggatggtcatcgagggcatccggcagacagagtacaccctgacaggtaagggcagtgtgtgccagctccgcccagctgtgaacagccacctcttccagcctcccgtctcgccatcagtcactgggggccttggggacgatccccaaagctcatggggtctggaagcagcctggggaggtggatcagaaatatgagacagtggccaggcgcggtggctcatgcctgtaatcccagcactttgggaggctgaagcgggtggatcgcctgaggtcaggagttcaagaccagcgtggccaacatggtgaaaccctatctctactaaaaatacaaaaaaattagccgggcatggtatcgggcacctgtaatcccagctactcaggaggctaaggcgggagaattgcttgaacccggaaggtggagatggcactgagccgagatcgcgctattgcactccagcctgggcaacaaaagcgaaactcatctcaaaaaaacaaaaaataataataatgaatataggccgggcgcggtagctcacgcctgtaatcccagcactttgggaggccgaggcgggccgatcacaaggtcaggagatcgagaccatcctggctaacacggtgaaatactgtatctactaaaaaaatacaaaaaattagccgggcgtggcggtgtgcacctgtagtcccagctgctcaggaggctgaggcaggagaatggcgtgaactcgggaggcggagcttgcagtgagcctagattgcgccactgcactccagcctgggcgacagagcaagactccgtctcaaaaaataaataaataaataaataaataaataaataataataatgaatatatttttccagacatgggatcctgccatttccctaggctggtctccaacccctggcctcaagcagtcctgcctcagcctcccaaatagctgtgtactgtcctcggagcagggaacaaagcagacaataatcttttccctcctagagctggcgttctggattcaccctccaagtatttggggtcctccttggcagttacaagaaattgaaagctggccaggcatggtggctcaagcctgtgatacagcactttgggaggctgaggcaagaggattgcttgaggccaggagctggagaccagcttgggtaacaaagcaagagcccatctataaaaaaaaaaaaaatttaaagttacctgagcatggtggtccccgctaccaagggaggctaaggtgggaggattgtttgagcccaagaattggaggctgcagtgagccatgactgcaccaccgcactccagcctgagcaacagagcgagaccctgtctctactaaacaaagagagaaaaataaagaaaaaaaaaaacaaaacccaaggaatccacccagctggtggaggtagggtctgaagggggaaagcctcctgggccgggcgtggtggctcacacctgtactcccagcactttgggaggcttaggcgggcggatcttgaagtcacgagattgagaccagcctgaccaacatggtgaaaccctgtctctactaaaaatacaaaaattagctgggtgtggtggcgggcgcctgtaatcccagctactcgggaggctgaggcaggagaattgcttgaacccaggaagcagaagttgcagtgagctgagattgcgccactgagctccagcctggttacagagcgagactccgtctcaaaaaaaaaaaaaacaaaaagccatcctggccaggcgtggtggctcacgctgtaatcccagcactttgggaggctgaggtgggtggatcacttgaggtcaggagttcaagaccagcctggccagcatggtaaaaccctgtctctactaaaaatgcaaaaaaattagtggggcatggtggcggatgcctgtagtcccagctacttgggaggctgaggagtgagaatcacttcagcctgggaggcggaggctgcagtgagcagagatcgcgccactgcactccagcttgggcaacagagggagactccgtctcaaaaaaaaaaaagaaaaaaaaagccatcctgatccaggggaatcccggaggggcggggagaggctggctgacgggtttaactatcaccattcactagctgcttttgggctgtaatcagccagctagttatctgtaattagcatacatggttaatcatgagcacgctaactgcagggggaaaagtcatcagcctcaggagctgcaaacagccattggcttatcctttgcttgagaatcaaaataaacacaccccttttatttgttgtaaataggattcctcaaatccctcctccaagtgcccccgccttttggttttgttttcttgtaactttgtattttgaaataattatagatccacaggaagttgccaaaacaactaaaacaaaaagtacagtgaggacccatgtagtcagcataaaacccgggaaatggacacgggtgcagtggactcacattctaccttttttttttttttttgagatggagtctcgctttgtcgcccaggctggagtgcagtggcctgatctcggctcaccgcaacctccgcctcctgggttcaagcaattctcctgtctcagcctccctagtaactgggattacaggcgcccaccaccatgcctggctaatttttgtatttttagtagagatggggtttctccatgttgaccaggctggtctctaactcctgacctcaggtgatccgcctgcctcggcctcccagtgctgggatgacaggcgtgagccaccacgccccgccacattttaccagttttacacgcgctcattcgggtgttccacacagttttctcccatgtgtaaattcatgtcaccaccaacaccacggtcaaagtatagatctcttctgtcactacgaggcttccaggtgctacgctttataaccatggcttcctgcctttgacagacttcctagtgagtgaattcctcagggcagaaagttggattcatggaaagctgtgcaggagtaaggataccgatgaaagcagctgcctatgtggtcgtttgcaatccacctactgttttgttgattgcttggaaagatgggagggtttgggttattttcttctttctttcccttttttcttttttcttttttttgagacagaatctcgctctgtcgcccaagctggagtacagtggcttgatctcggctctctgcaacctctgcctcccaggttcaagcgattctcctgcctcaacctcccaagtagcttggactacaggcactataggcatgcgccccaacgcctggttaatttttttttttttttttttttttttgagacagagtctcactctgttgcccaggctggagtgcagtggtgctatctcggctcactgcaagctccgcctcccgggttcacgccattctcctgcctcagcctcccaagtagctgggactacaggcgcctgccaccacgcctggctaattttttgtatttttagtagagacgggttttcaccgtgttagccaggatggtcttgatctcctgaccttgtgatccgcctccgtcggcctcccaaagtgctgggattacaggcgtgagccaccgtgcctggcctttttttttttttttttttttgagttgcagtctcgctctgtcacccaggctggagtgcaatgatgcgatctttggctcactgcaacttctgcctcctgggttcaagcaattctcctgccccagcctccccagtagctgggattacaggcccccgccaccacacctggctaatttttgtgtttttagtagagacggggtttcaccttattggcgaggctggtctcttggccaggctggtctcgaactcctgacctcaggtgatctgcctgcctcagcctcccaaagtgctgggattataggtgtgagccaccgcgcctagccagttttttgtattttttagtagagacagagtttcaccatgctggccaggctggtctcaaactcctgaccttatgggttcctcctgcctccacctcccagatgtgctgggattacaggcgtgagccaccgcacttggccttttttttttgaaagacaggttcttgctatgtagcacaggctggagtgcagtgatgcaatcatagctcactgcagcttcaacctcttgggctcacatgctcctcctccctcagcctcctgagtaactgggactacaggtgtgcaccaccacacccagctaatttttttggagggggtcagagtttcgctctgtcacccaggctagagtgcagtggtgcgatcttggctcactgcaacctctgcctcccgggttcaagtgattctccttccgcagcctcctgagtagctgggattacaggcgccaccccccgcccccaccaatttttatatttttagtagagatgcggtttcatcatgttggccaggctggtcttgaacgcctgacctcaagtgatctgcccacttcggcctcccaaagtgctgacattacaggcgtaagccaccgcacccagactaattttttattttttattatttatttatttgagacagaatctcaaataaatgtgtcgcccaggctggagtgcagtcgtgcagtacaaatctctgaaacaatcactgtgacagggtcttaaagcatcctgattggtctacgtgggttggaggtggagtcaagtaattcatagcccctcagggagaggagggcaaggaatggtctcaggggtaagatgtttgtttattttttattttttattttttttgagatggagtttcgttcttgttgcccaggctggagtgcaatggcatgatcatggctcactgcaacctccacctcccgggttcaggtgattctcctgcctcagcctcctgagtagctgggattacaggcacacaccaccacgcccggctaattttttgcatttttagtagagacgggggtttcaccatattggtcaggctggtctcgaactcccaacctcagttgatccatgcgcctcggccttccaaagtgctgggattacaggcgtgagccagtgcgcccggctggataagatgtttataaggtggttcttagaatggcgttgggaatcactgtgggacatgacagctttaacccatgactcagagtctcagggaataatacacagtgttgaaatgcctctcttgcctaccaggtctcaagtttgacatgaaatacatgaacttccgtgtgaaggcctgtaacaaggcagttgcaggagagttctctgagccggtgactctggagacaccaggtgactggattccacccttgtcctacccctaactccatggccccttcctcccacagcccccagagaccatgagaatcctcgaagcagggttgccctggctgccaggaagctcaaagctccgtccacagttggcttccttagcctgagtgtctgctataaccctgtttttgtcctttgcttctgaggtttacccagtatatctcgatggtttttgtatacagccacacacactctctctttgccaaaaaatagataagtcctctatagagctggggatgagatttgagtagtgaagactgattccagagcctttcacagtgacaccttcacatgccctgctaggaagtccctctgaaatctagcctaactcccttgtgctgtagcccagccccttttttgggattagtcctccatggaagcacagggtagtgcaattggcttgaaaatgcctccagaggctgggcacagtggctcacgcctgtgatcccaacactctgggaggctgaggcgggcggatcacgaggtcaggagttcgaaaccagcctggccaatatggtgaaaccccgtctctactgaaaatacaaaaattagctgggagtggtagcgtgtgcctgtagtcccagctacttgggaggctgaggcaggagaatcgcttgaacccaggaggcggaggttgcaatgagccgagattgtgccacagcactccagcctgggcgacagagcgagactccatctcaaaacaaaaagaaaagaaaattcctccagacgtgggagggagacttttaggcaacaacccttggccttcgcgcttctggctccatgttctgtcccctctaccctttgccatcttgtctctcctgttgtccttctgcttgtccatctctatatctgtctctctccgaggcttcgtcagtctcttatctctgtcttggactcttatctccttggctctttgattctctgtccctgtcttggtctgtcttggtcactctctgtctctctgtctctctctgtgtctctccgggtttccccatctctgtgactcccacgtctgcccggccccagcgttcatgttccgcctggatgcgtccacatcccaccagaacctgcgggtggatgatctctccgtggagtgggacgctatgggcgggaaggtgcaggatatcaaggctcgcgagaaagatggcaaggggcggacggcgtctcccatcaactccccagccaggtagcctgccccctcccctccctaagtctctggtggaggagatcagtctggacatggacacagagcccagtgtggtcagagttggggtggagaggggacctggggctggtggaacccagagagggaatgaagggagaggaggttttgagtggagttttgatggttaaataggagtttcccagatgacggagggcacaggcatgttctgacataaacatgaggtgctcgatatatagatagagccaaatactgccagagattgacccaacatccacggtggctggggtggactagggtagccttaccgtgggagagagaagtgttgaactgagcctcctgagcctgcccactccctgcccaccacagaggtactccatctcccaagaggatgccctcaggtcgtgggggacgggaccgcttcaccgctgagtcctacacagttctgggtaaggaaggggagaagaaaggggagaggggagttttgggcaggggcctaatggtgggggttgagggagaacctttgcctttggctgcggaaacaggcagccatcagcaaagctgctcccggaataacaggttgttctggcactgcccaaatggaaatatttcgggataagggattgctggggaaagccagaatttatggagtgaaggaaagagactctggaccagacagtgcctgggcaggagcttgggggcaattttctggactccatggagtatctggcacttggggagtagctgggatttagggagtagctgggatttgaggagtagctggaaagaatcattgcctatagagcaactgggtttgtgggggagctgaagccaggcaggaattttgggggatcacctgagggtatgtggaggagccagagaaaacagtctgaagagaagtcaatagtagcataagaatgattggatcctgtgaagaagaagctggagttggtggaggatgggcaagggaggaactggactttaggggaattgctactgttcagaatagagctggagaaagaggctaaaagtatgaggaagtcattgtggtcaggaatatctagagagaaggaagttagggagtagctggggtcatgaggataagctagggcctaaggggaagttatggttctatggggatctaaattttcctgggtgcacctgggattggtgagagttttagggagaagcagaagatatagggagttgtcattggagttgctgagatttgagagagagagagagatcatccttgggaaaggacctggataatttgtggtgtggggagtagctgagatcagggaggagcagacctggagaagacgtgtatagaggttcatcttgtatctggagaggaactgagatataacaaagatcagttgtgatctgggaggggcgagagtatgaggagaagctgaagctcatggaatagctgcattgggtgaaggagtagctgagatggcaagaacctggatctggggcctggggaggatctcaactctggagagaatctggattgtgtacagagctgaagccaaggggtatcccaattcagagggttcctggagagtgtgatggaggtttgaggaacacctggattccaggaggagctgaggcctggagagtatctggcttggggaatgccttgggggaacttctggcctcagcagtagctgaggcctgggagaacctgccttccacgtggagttggggtctggatagaatctggattcagagagcaagaggagggagtcttgagtcctggggagtatctggactctgtcacagcaaggagctagagggagcttctagactctgccagagctgagaactagggggagcatctggaccctgccagagctgggaactagggggagcatctggactcgaggaggacttgaggcctgtgggaacactatgagtcttccaggaacaagggtttgaggatgatctagtttctgggaagaactgaggggtatttggacatggggaggaactgaaagaagtttctatggcttggaggagtctggaaggagtagcttgggcttgtagagaatctgaaaggagtaactgaggcttggggagtatctgggcttaataaatttctggaggaagttgataaagcttaggagtatctggggggaatacccgggaatcaaggaatatctggagggaatagctgggacttgaggagcatctggagggaatagctgcagcctgaggagtatctggggggaaaagctgggactgaggagtatctgggggaaacagctgggactgaggagtatctggaggggaatcgctgggactgaggagtatctgggggaaatagctgggactgaggagtgtctggaggggaatagctgggactgaggagtatccggggaaatagctgggactgaggagtatctggggggaatagctgagactgaggagtatctggaggggaatcgctgggactgaggagtatctgggggaaatagttgggactgaggagtatctggaggggaatagctgggactgaggagtatctggaggggaatcgctgggactggggagtatctggagggaaatagctgagactgaggagtatctggggaaatagctgggactgaggagtacctggaggggaatagctgggactgaggagtatctggggggaatagctgggacctgaggagcatctggagggaataactgcagcctgaggagtatctggggggaatagctgggactgaggagtatctgggggaaacagctgggactgaggagtatctggaggggaatagctgggactgaggagtatctgtggaaatagctgggactgaggagtatctggaggggaatagctgggactgaggagtatctggggaaatagctgggactgaggagtatctggaggggaatagctgggactgaggagtatctgtggaaatagctgggactgaggagtatctggaggggaatagctgggactgaggagtatctggggaaatagctgggactgaggagtatctggggggaatagctgggactgagaagtatctgggggaaatagctggatccccgaggagtatctgggaggaatggctcaagccagagaagtatctggagggactagcagagactgaggcatatctgaagggaattactggggcccaaggagtatctggagggaatagctgggacccaagtatttggagggaataactggagtccaaggagtatctggggggaaatagctggggcccaaggagtatctgaggggaatagctgggaccctgaggagtatctgggaggaataacttggatcccgaggagtatctgggggaaatagctgggtccccaaggagtatctgggagaaatagctgggtcctcaaggattatctgggaagaatagctgggatcctgaggaatatctggggggaatagctgggtccccaagaagtatctggcggggggatagctgggatcccgaggagtatctgggaggaataacttggaccccaaggagtatctgggagaattacctggggcccaaggagtatctgagaggaacagctgggtcctcaaggattatcggggggaatagctgggatcctgaggaatatctggggggaatagctgggtccccaagaagtatctggaggggatagctgggatcccgaggagtatctgggagggataacttggacctcaaggagtatctgggagaattagctggggcccaaggagtatctgagaggaacagctgggtcctcaatgattatctggggggaatagctgggatcctgaggagtatctgggggggcggatagctgggtccccaagaagtatctggaggggatagctgggatcccgaggagtatctgggaggaatagctggagcccaaggagtatctggagggaatagcaggaaccaaggagtatctggagggaatagcaggaaccgaggagtatctggagggaatagcaggaaccgaggagtatctggaggatatagcaggaaccgaggagtatctggagggaatagctgggtccgaaggagtatctggagggaatagctggggcccaaggagtatctggagggaatagctgtggcccaaggtgtatctggagggaatagctggggcccaaggagtatctggagggaatagctggggcccaaggagtatctggggggaatagctgcggcccaaggagtatctggagggaatagctggggcccaaggagtatctggagggaatagctaggaacttgaggcgtatctgaagggaatagctggggttcaaggggtacctgaggggaatagctgggaacctgaggagtatctggggggtacagctaggaacctggggagtgtctctgcagggagcagctgtggtgtaaggagcaccttgggggctggccctttgtggaagggcatctgtggcccagttctatccagttcccctgcccacccctcctgccctgcgccacaggggacacgctgatcgacggcggggagcattactgggaggtgcgctacgagccggacagcaaggcgttcggcgtgggcgtggcctaccgcagcctgggccgcttcgagcaactgggcaagacggccgcctcctggtgcctgcacgtcaacaattggctgcaggtcagcttcacggccaagcacgccaacaaggtcaaggtgctggacgcccccgtgcccgactgcctgggtgtgcactgtgacttccaccaaggtgaccccaagccccagctgccgtctctggctgcccctgcctgagtcccctccgtctgcccccatcccacttctgaccggtcccactgtcactctgccccccgaccccaggcctcctgtccttctacaatgcccgcaccaaacaagtgctgcacactttcaagaccaggttcacacagccgctgctgcctgctttcacggtgagctgccctccgcggcccagggggaggagagggtggtgctgggcgctggggtttgaagctgagcccctcccccctccccccgctgtccctcaggtatggtgtggcagcttccaggtgacgacaggcctgcaggtccccagtgctgtgcgctgcctgcaaaagcgaggcagtgctaccagcagctccaacaccagcctcacctaggcccccaggcacccacccagctggggtgtttttgggggagtcgccgccaagcccaggctgctggagccaggcaccctcctctgtcacttgctgcttggagccttaactccagatgggggggtcaccaagagggagtgggcaccctggcgggccctctccccacctcacctcttaataaaggtcagacactggc

SEQ ID NO: 393 - DNA, 18498 bp, Homo sapiens
  source 1..18498: mol_type = genomic DNA; note = NC_000017.11:c43546340-43527843 ETV4 [organism=Homo sapiens] [GeneID=2118] [chromosome=17]
gctcacaactgtctgctgcgcccgaaaaacaagtcggtgcgctggggacccggggccggggccgccttactccggcctagccccgcggccctcggtgcgggctccagggcatgctcgggaccccccgcggctccagcccagacgccccggcctcaggtgaggctgcgggagggaaagggagggagagtgtctgtgattccccgcctcgcctccaatgcacaccacactcactctcaccacccgcctccgcagattccagggcgggggtgggaggtgctgggattcagggttggagggggcgcgggagttgtgggcatgcgatggtgtgcgcttcgcctgctcctccgcgcgcgcgcgcgtacacacacacacacacacacacacacacacacacacacacacacacgttcttatgtaaccgagcccgggtaaagcagggctgcagaaagcagaaacggcgagcccggctcctgggagcaggtgggacctcctttggcctttggcgggaggggagtggtggtggcgctcggcctggcaggcggaaacctcgccatcgccccagtgagtcggagaagtttcgccgtcggacccagagccttgggactgccccctccccgcccccatcgcagccctccctggacggtgtgcgaacgcagccccctcccccaccaggtctcggcccccgcttggggccccggccgtgcggccggagggagcggccggatggagcggaggatgaaagccggatacttggaccagcaagtgccctacaccttcagcagcgtgagcgccgcgccggcctccacgcccgccccgccccgcacccagcccctactctcaccacagcccccctccccgcagtcccagcggagtcctgggctgccccgcccctgagtcacccgaggaccccaacctcgtcccccagactaagcgcctcagggtgactcgcgggcattctccccgcttctcgcagaaatcgcccggaaatgggagcttgcgcgaagcgctgatcggcccgctggggaagctcatggacccgggctccctgccgcccctcgactctgaaggtaaagagcaagagagacaaaccgcgaccctcctccgccacacacacacacacacacacacacacacacacacacacacggccgattctggaacccccgcctgtttccccaaaaaactcgccctccaagggattttggtcattcttctcggtccctactcccaaggcaggggagtcaccgggtcttgctagggccccttctctcttaccgtcccctccacctcacctccaattccactatttacccctcagatctcttccaggatctaagtcacttccaggagacgtggctcgctgaaggtgagtagttttgtgaccttttctattttgggaggctggacagggggacactccgtagcccctggtattccaccctaagccctacacttctcctctcccttccctgcctcaaggagttctccaaggccctctccccaggtcccttgccactctactcaccccagcacccagcgtggacacttatattgatatttattttctctaccctgagccaggcttgtgtaactaggcttgaggatgaatcagaccattgtgtggggtatttgcttatttgaatggaacttggccccaggcccattttcctggttgaaattttcatttgtaaagtttgttttgcagaagccgccaggccaaggtgcatgttggggtgttgttggtggggggtggggggagaaattaatttgtcactcatcctccagagttgcccaagcattgattcttatcccctgggtttctcttcttcccaacccccagcaccaaacaatttactgtccaagccaaaagaacaacaaaagtttaaataattcttttcggcagtcctttggcacagagagcccagggctccctccccaaatagccttgattgtaattctaatagcaagtgttcctccctcttccatcccgcttgaatacctctgcctccaggcaaattccccccttcctgtgtgctggggagttagctgtgagctggctggggtggggtccgtggctgggtccgtggctgggtctgatggggaagtggtgtgttcaggaggtttcctggttggattcttcagtgcgttttggtggggcctgagggtgtcgctggtggggctgcaggtgggagggaaaatggtggtttagacagtctctgagagggaagggttaactacccccatcttagggtttattttaacactatgaaaatgaagaagccaaaacactaggaactccttttttgaggtctttttgaggtattttccttaggatctcctcatccctccaccctgggtatctaatttttttaaagctcaaatccaactaccctggaactctccatagaagctcggagtaaaaagaaaatgacccctgactagatccttggagtgagactaggtctgtcttgcccactatgatattctaaaaatatatatgttgacagaatgactatttagcatagagcaagcactcaagacattttgtggaaataatggctgaatggctgtgtgagtgctggagggatctggaggttctgagggtattgtgtgcatcatccccgaccctgcaagtcctgcatgcccagctccaatttacaggcagagctttgccccgtctccccatccttcttctgaggttctggagctgggctagagctgaagaatgcagaggtgtcagtttccgtgggctctcaaagacttcctttcccagtgcctgatttctctctggctcaccgggcttcattccttgcctgtcagctgagagtccccacagtgggcagctcctagggctgtgagctaggggtgggctgaggttggcattttggcagcagctggtccatctgtgcctgggtttgagatgggagggggaggaaaatgctctcatctctctaccttggaagtcccaccccttggccaggggtctggagagggtacaaatgtctgtctgtgtcagtgtcggtgtgacagcaagtgtgtgtgtgagagagagagagagagagagtgtgtgtgtgttagttacatgctgctgccctgtacatttaaatccagtgggtggggaggtggggtggggattgcaaggcggaggtgaggggggtgggcgctgggatctccttggttccctctccttccttctgagggagcagctcaggttcccagctggtgatggatggccaggtctgagggggggatgctgaggccgatcgctccttctcactttctctgcggagacagatgcagctgccggggccctgtccccctgcaccatcccaacaccaccccagcctcctctcctgtctcttcccaccaggtcagtgaccccggcaacccatggggagctttggggtggcagggagggactagcttctttggaaacttgccagtggtgggacgcattaggaggaaaggggaccagagcccaacctccctttctcagtttggttttttccaaagccccaatttgaagagaagcagcaggggggtcctggtagtgtgggtgggtctgtgaagacagcatttggaggaggcacaggttggagccgggcagatacaggaagattccagtgtggttgcaggttcagtgtcctgcgtccgggcgttgaagggtgagtgtgagtgcggctttatggaggcagctcacatatccttggggttgggtttttgtacacaggggtgaatgatgtgaggctaggagggcgtgtctgatttgggggtgcctgggatctgttgagatgttggggaaagaatcaggctgctacagggagacccaggctcaggcaggctgagcccaatatgtgtctggctatggtaaaagatatgctggttttttgtccaaggttcctttccaggcttgtcaggagccctgaatccttggggaaaatgactttgttgtctatttggtagtaagggccattgactctaggccatgacccctttgtgtgaggctcaggtctgtggattcccagaagccctatggataggttgctgggatccttgatccctctgatactgtgtgtaaaattgctggaagtgcaccatacataaaggtgtatggatttttttaggaagagaatgacccatagcttttatcagattctcaaagggatcgatcgatctgcgctccccttttcacaggaatcactgctccccaaccctcctccaagggctccagtccctttgccctttggctgtcccaatcatatttgtaggtcaaaaaaagaccccatgtgtggagggcatgcatggagggcacatttcaccctgtgctgtcttgctgctgcaagagtgaagtaaaaggaattagggtgtgtgcatccctgaatatgcgtccgagtgcatgtacactggtgcctcggcatgtctgtggggagggatgaggttaatctcctccctaatctttcccagctacaatgcctccttctccatctttctgtctcttccccttcctgaagactcttggggacaaatatgtcccctccacaactagtgaactggttccttccagtacagaggctgccagggtgggggcagggtaagggacagcggtgacacaatggagcagaagctctggagaatgcctctacccccttcaccctatgactggatcctgggaagagggtgaccgagcatatgtagtgtgggtggctaacctatggtgagcttcagtgtatctctgttttaacctctcagttcttccagaatccagcttgggagaccccccaagcccctcctctttttttactaacccccctttttgaaaggagagtccctaaaattctttctctctctctgggcattatgctgtcttggcacttttcccaccccctccttaatcatctgcctcgtccccagacagataaactccatcttagtaccgggatggagctggggacagaccctggcacactggcttggcagccaagactcagccaagttaacaaataaataaagagagtggtgtacacttaagacgaaacatggtaattaaaaattctcctgctctccaggaacgcgaggctcagtgttcctgtttctatcctgttgacagtctctggatgactgagggccctggcctacccctttgggagaaggccagtgtttgggggaggggctgagctaggacagatttctcctggctctgggaagaggatggcaccacctcttttggggtgtggtctgtgtgctggaggaagcctcctcctggattccgggcctggaggggtccctggttaaactgtcaggcccgaggcaggaagaaaggcaagatgatgctgagggttctctgctctccagcaccagtgacgccagcaagagatacccccagcccattacctcaatggaaagtagcagttaatgaggccccaggggtggggccggaatgcgtcagccacccctgagttctgcaccaccctttcccttgggacccttcttgcctagtaggagggagggaaatgttggtcactctgctcccatcaccccagcttcctgccaccttgggggatgttgcctctgaatggaccagagggcacagtggggagcctggctttgcatccctgggcaggtggacagatttggcctcttaccctctatccaaatgtgcctatttttaaggttgtggtggctgaagtgaaaggattacctgagcccaggagttagaggctgcagtgagctctgattgtgccactgcactcaagcctgacacaggagacttccttataatagattttaaaatgcagatgcctgggccccaccccagtcctatggaatgggactctccggaggaggggactgggaatcgtgtttttattttatttttattattgttatttgagacagggtctcactctgttgcccaggctggagtgcattggtgctatcttggctcactgcaacctccacctcctgggttcaagcgattctcctgtctcagcctccagagtagctgggattacaggcgagaaccaccatgcctggctaatttttgtatttttagtagagatggggtttcgccacattggccaggctggtgtagaattccagacctcagatcgtctgcctgcctcagcctcccaaagtgctgggattacaggcgtgagccaccacacctggctgtaatcgtgtttttaacaacgtcctggtgactcttgaatcaggccagtttgggaatggttgtctttttgccgtgtttgtgctcctgaaaagatgtgtgctggctgtgtgtttctgtttgttcttgccagcggatttcatgtctcattgatgtctttggtcacttcagaccaaagtattattatgttgacttgtcctaagttctcgtttagctgctggtggcttgtgattgttaaactccctctccctaatgcttctgtcaagaaatcaactatctattaatataagcctatgtttataaacacttggcacctctgatatttaaagcaaattgttgaagaatattcttgccaagcaacatatcacaacctaaaatatcccctgtgagatgtgctttcctggagaggacctgcctctagtgttgccttgtgtgtggagagggggagcctgcagggaagggctaggatggtcaggatctcttcagtgcatgccctcaggcccacagtgctgacttctgccagcctgaggacaaacgattattgcatgtttattcatgtagtcaagaaataacagcactgagcgtctactctaaccctgtgctgggtgctggggcatcagatgacaaaaaagataaagctcttgccctcacagagcttaacttcctggtggaggagataggtagataacaaacaggtaaacataaattaatatattcaggtggcaatatgtgccagggagaaaacaaaacatagatgcaatagagagccaggaggaaccactttggtttaggggtggtcagagaaggcctctccagagatgtcaaagtgagctgagactctgatggtcaggaaaaaaagaaaaaggcaagaaagcatctggggaagaaggaacaagctcagcagctttgagggctagaaaggagaccagagtgctgcagattcacaggcaaggagaggcaggtcagagaggtaggcaaggccaagtcatgcagagccttggaggccaagggcaagcgtttggatttcatgctttaaataacagagagaaatgattttatttctgttgtaaaaagatcactgtgacacctaggtggagagcaagggaccataggaggtaagaatgaaaatagggtatcctggtaagaggccgtgggtgaaatccaagtaagaaatgatggagccttagcctagagagaagcaaaagagatgggatatgtatttgtataggccgggggtgtggaggttttttctagccatctcatacccctcaccagccattttgacctctctgggcattttatcagtttccccattgtccaatctgagagcagtctccagggaaggagagagcagtctccagggaaggagagtccagcctcctcgggctacaggttccactgcatcaccctagaaccactctcttcctggaataatatcaggaagttcttcttggtgtctacatttcctgctgtgatccatttatttttgagagaggggcaaaagtgggccaagactctgggatcaagggagattcttagctgtataaccacctgagaagccccgctctggggaggccagaataagaactagaaatcagagtttgatgttcaggttagaagccatggatgagctgctgctgtatttcagttttcctgcctattccccaacccagctccacccatcctggcatcctgggagagctcttcggatcaccaaccttgggaatccctcccctccttagctgcacattaaggggatgaggcacctatgtactcagccagtgtcctttgccttctgcagtggtcccagtcaccagcctcctgctctcccactgtcatcctccttttttattttatttatttatttttgagatggagtcttgctctgtcgccaggctggagtgcagtggtgtgatctcagctcactgcaacctccacctcccgggttcaagttattctcctgtctcagcctccggaatagttgggattacaggcgtgccaccacgtccagctaatttttttttttttttttttgaaatggagtcttgctctgtcacccaggctggagtgcagtggcctgatcttggctcactacaagctccgcctcccaggttcacgccattctcttgcctcaggcatactcctgcctcaggattagctgggactacaggcacccgccaccacacccggctaattttttttgtatttttagtagagacagggtttcactgtgttagccaggatggtcctgatctcctgacctggtgatctgcccgcctcagcctcccaaagtgctgggattacaggcgtgagccaccgcgcccggcctaatttttgtatttttagtagagacaggatttcaccatgctggtcaggctggtctcaaactcctgacctcgtgatccgcccaccacggcctcccaaagtgctgggattacaggcatgagccaccatgcccggcctttatttttcattttttggaacagagtctcactttgtcacccaggctggagtgcagtggcatgatctcagctgactgcaacctctgcctcctgggttcaagcaattctcctgcctcagccttccgagtagctgggattacaggtgcccaccgccacgcctgactaattttttaattttttagtagagatgggagtttcactttgttggccaggctggtctcaaactcctgatctcaagtgatcctcccacctcagcctcccaaagtgctgggattacaggcatgaaccactgcgcccagccacccccctatgtgattttatttattatttaattttatttttcttttgagatggagtttcactcttgttgcccaggctggagtgcagtggtgcgatctcagctcactgcaacctctgcctcccaggttcaagcgattcttctgtctcagctcctgagtagctgggattataggctcccgccaacacgaccagctaagttttgtacttttagtaaagatggggtttcgtcatgttggccaggctggtctcgaactccggacctcaggtgatccacccgccttgacttcccaaagtgctgggattataggcgtgagccaccatgcctggccgcctcctatgtgatttttaaatccacaggatcccactgcttataatgcctgcccatcctagatatgactgttgtgagctttaagggagttttgtaaactctgaggggcgaggctgtttcacttcagaaaaatggaggaaataaagacaaagcatctagaagaagaaagactggaatctgctcagacaggttctgagaacagtcttccctcctgggtcttagtggagcccagaggtggaagacactaggacctagggtggagcagcctttagtctcaagcaagcttgtccaacccgtgggcctgtgggccactttcagcccagggtagctttgaatgcggcccaggcccaacataaattccttgtaaaatttcttaaaacattatgagatttgtttgtgattttaagttcatcagctatcgttagtgttagtgtatttgtgtattttatgtgtggcccaagacaattcttacaatgtggacacccctgatctaaaggctgttggtcctttcttggctgttgctaatctgcagggctgtaataatggagcctcccaggggacaaccagggctccgccccaaactcacctctgacttctctctgcagctcaggtaccagacagtgatgagcagtttgttcctgatttccattcagaaaaccgtgagtagaggtccctggggagagggtatagggagtggaggatggcaggaagtgagtcataggatagagaatcacaagagagcagcttgttctctcctaaaacacagtggggtttgatcttaaagaccaaggcaataactggaatgaaaaccttggttgaaatctggggcttgacatgttcttgctgtgtgaccttagagcagacactatccctctggttctccattgccttatatctgaagtgaggggcctgggccagttcagcagagtccagttctagtgttgtttgtttgtttgtttgtttgttttccccccaagacagagtcttgctctgtcacccaggctggagtgcagtggcacaatctcggctcactgcaacttccgcctcccgggtttaagccattctcctgcctcagcttccagagtagctgggattacaggcatgcacaaccacacccagctaatttttgtatttttagtagagatggggtttcaccatgttggccaggatggtctcgaattcctgaccttgtgatccgcccacctcggcctcccatagtgttgggactacaggcgtgagcccagtgcgcccgcccccagttctagtattctaagtcacttccataaactggggacaattttgcctcccaagagacatttggtaatatctgtagacatttttggttgtcacagttgagggtggggtgctactggtgtctagtggatagagaggccagggatactgctaaaagcatcctatgatgctcaggaccgctccttacaatattattaataaaacactatctggcccacaggtcagtagtgccactgttgagaaaccctgctttaggctgggtgtggtggctcacgcctgtaatcccagcactttgggaggctgaggcgcgtggatcacatgaggtcaggagtttgagaccaacctggccaacatgatgaaattccgtctttactaaaatacaaaaattagccgggcatggtggcgtgtacctgtaatcccagctactcaggaggctgaggcatgagaatcgcttgaacctgggaggcggaggttgcagtgaggcaagattgagccactgcactccagcctgggtgacagagcgaggctccatctcaaaaaaaacaaaaaccaaaaaacaaaccctgctttaatgtcagatactttgctgtcaactgtcttcaccagtgaaacaatggggcacaaagaatcaaaaacagcagagaatagttggttacaaacggcatttgactggactgcggttaaaactgaatctcacaccggcttggaaccaactctttgctgctcagcctcgtggccagagtttgggaaccccgcaggggccacaggaaaggccagtgttcttcacagataagtaggagcatgtgtataatgttagtcagctgacattcaagtgggccaatatccaacctcaaccagaaaaagaaagattcttttatttatttatttagagacagagtttcactcttgttgcccaggctggagtgcaatggtgtgatctcggctcactgcaaccgctgcctcccaggttcaagcaattctcctgcctcagcctcccgagtagctgggattaaagggatgtgccaccacgcccggctaatttttttgtattttagtagagatggggtttctctatgttggtcaggctggtcttgaacttctgacttcaggtgatccgcccgcctcggcctcccaaagtgctgggattacaggcgtgagccaccgcgcccggccaagaaagattctttatatcctcaaataagaaaacatgtcactcccctggaattttccagggcactcaggaaaactacaggccctaggttggaggtgctcactccttgaaagtgttttctggggcctggggttgcattaaatgtttttgttttttgtttctttttgagacggagtctcgctctgtcacccaggctggagtgcagtggcatgatctcggctcactgcaatccccgcctcctgggttcaagcaattcccttgccccagcctcctgagtagctgggactacaggcatccgccaccatccccggctaatttttttttgtatttttagtagagacagggtttcaccatgttggccaggctggtcttggactcctgcctcccaaagtgctgggattacaggtgtgagctaccgtgcccagcctaaatgttgaactttagatggtttatttagtcaataatcagacactagtctgatgtataaactagacataatgtaaatagccaaaatgttcttgtctcactgcgggtctcagaaaattgatacccagagagggaaggaggctgtaccagtcacccagctggtcctcaaagctcagaaggtatcagaagccctgcctgcctcttgtgtgacaggctctggccttgctctgtcccctccacccccacagtagctttccacagccccaccaccaggatcaagaaggagccccagagtccccgcacagacccggccctgtcctgcagcaggaagccgccactcccctaccaccatggcgagcagtgcctttactccaggtgagccccagcctggacctggtgaagggtaggagaagggttccagaggagggaggcagggggcacccatgagcagaggcagcagctgagatgcaagttagacaacagaaaggattttctagcacttgtaaggaagcaatacagctaaggatttcctctgaatagacggaaaacgcagcagagggcctcaggaatatatactgaggccagagcagattctgtttccaccaagaggcccactgtcccacctaaaccattgctctgagcaacaaatcccccctgtatgaatcccaggggttcaagactagcctgggcaacagagggagactgtctctgaaaaagaaaagaattggctagggctgagtctgtggctcctgccgttcccttctcagccccctctatccttccttctcctgtaatccctgtgacctcgctttcctaggaatgaagggttcaaagatgctttccagcttctctgccccctcacccctgtctccttctcaactccagtgcctatgacccccccagacaaatcgccatcaagtcccctgcccctggtgcccttggacagtcgcccctacagccctttccccgggcagagcaacggaatttcctgagatcctctggcacctcccagccccaccctggccatgggtacctcggggaacataggtaaggagacagggaaacccactgctcatgggcccaggtgttttttcaattcctgagtgttctccataaagacttgagctgtggggtggtagaggcagggggcagtggaatagaaagggagaaatactgacaccccaaccccctaccccccattccggagcccactctaaaagcctaggagtaacaggctcgaggaaggattaatttaaagttctcttctcttccttctccatccaaccacatccagctccgtcttccagcagcccctggacatttgccactccttcacatctcagggagggggccgggaacccctcccagccccctaccaacaccagctgtcggagccctgcccaccctatccccagcagagctttaagcaagaataccatgatcccctgtatgaacaggcgggccagccagccgtggaccagggtggggtcaatgggcacaggtacccaggggcgggggtggtgatcaaacaggaacagacggacttcgcctacgactcaggtaagagactggggtggggcagggtggcatgtgatcaagtgttcagttaagcccagaatgtctcccgagtttttttacattgctgtttaccatttcatacatccaacccacccacccactttttttcttcataatttcaaaagaatgttatttttctttctttttctttttttttttgaaatggggtcctgctctggcccaggctagagtgcagtggcacgatctctgctcactgcaacctctgcctaccgggttcaagcgattcttgtgcctcagcctcccgagtacctgggattacaggcaccagccaccgtgcccggctaatttttgtatttttagtagagatggggtttcgccatgctggccaggatggtctcgaactcctgacttcatatgatccatcgcctcggcctcccaaagtgctgtgattatagacatgagccacctcacccggacaaattattacttttcaatgagcaaacctatattcagattaaaagataaggggggcccccggggcatggtgagtcatctgtaatcccagcactttaggaggccatggcaggaggatcgtttgagcccaggaattagttcaaggccagcttaggcaacaaagtgagacctcgtgtctatttataaaaaagtaaaattaaaataaagggggatgtagatcctgccctcaggtagcttgtgacttaatagggaagttaaggcatttatttctatttaacaggtgtttgaggttttaattacctattaagaccaaactactgtgacaggaacacgagtgtgcagagttgggaaatacaaagatgaataggatgtgtctggtccctatccccacagaggcttaaaaatacaaagggatttgaatgaagagaaacatgaatttgaaactagccaggctcatggttcttgctagttctcaataggagggcagggttttcttgttttgttttgttttgtttgttttgagacagagtcttgctctgtttgtttgttttgagatggagtcttgctctctcgcccaggctggagtgccactgggttcaagcgattctcatgcttcagcctcccgaatagctggggttacaggtgcccatcaccatgcccagctagtttttgtatttttagtagagacggggtttcaccatgttgatcaagctggtagaagcacaggttaatatgtggcttacatatttgagcctcccaattgatgtatgccctggccagaggcaagggcagaggaagtagggacttctttaaattctagttccacctggctgttgactggagtgagatgcactcacctgtgttcataaatagctatagttcaaagcctcaagggccgaaggagggccagtcccaggaagggtccagaaaaccctgccttttcttctttcctcctggcttttgttacattagtagccctagatctgagtttattagagtaggcccagagctagctagaactttagaatttccctttttgtggtgcccacaaccgttcaagggcagggggatgaaccacaaccccccaggctgtccaactaagaaccggatggtgctcctgtcctcaaatccagggcataagcctgagccaggcttggcagtgagctggggagaggaggagggaggcactcttgccgctgaccttcaaaggctgtagaccggaggggattgtgttacatgcccttgaactcctgcccctccccccagctactcctgaatggagtcaggaattccattcacaaaatggaggcatgaatgagcccaccctcccgcctcctcccggaggtgtcatgtttcaccatcttctcattcataggtgggagtgcagtggggggagggcgggaaggggttggaacttgaacgggtggcttcacacagccgccttcccgatgtggagtgggaaggttcctatcctatggaatggaatgaaacgaagtggaatgtgctctgttagacctgaaaaaacaaggcccagtgcccactgcctcttccccaggtgcatgcaggcgcacgctctgtttctgtcacacacacacacacacacacacacacgcgcgcgtgcacagggctgggaacctgacctgctgaccggacatttttgtccattctgagggagtcttaggcgtggacaccgaactctttccccggacgttcatctcaccctccctcctccccctgaactcgcaggaaacagctgctccctggcagcttgggcccttcagaacagcttgcccagcccccgctgctgccttccatggcctcagccgcagccctcaagttgaggaggggttccagcatcacactccctctgggtgaactttccctgggattttgtggttggcaggcaacctgggcaaagaacagtcaccaggaagcaggctggaaggaagaaattcttgaatgtggataggacttcctcctcccctgccctcgagctccaccccaagccacttctcacatcaccccttcttcccccacagatgtcaccgggtgcgcatcaatgtacctccacacagagggcttctctgggccctctccaggtgacggggccatgggtaaggcagccccccttcccctgccaagccctccatgttgggggagggagcgctgccatgggggagggtctccctggccaggagtccctctggactctctggggtctcatcggtgaacccccagatctgagcaacccccaatttcctccacaaggctatggctatgagaaacctctgcgaccattcccagatgatgtctgcgttgtccctgagaaatttgaaggtcagagaagtgactgttgatgggagggtcaaggtcttatcacgctgtgtccctgcaggagtcacatcacgtttcattgttgcaagagggtgggacccatagaaaagtacctggggagaccccttcgagaaatccctcgggtgggaggcggttgcttgggggaccaaaagacacaaaccccacacctcctattttcgtgttccccaggagacatcaagcaggaaggggtcggtgcatttcgagaggggccgccctaccagcgccggggtgccctgcagctgtggcaatttctggtggccttgctggatgacccaacaaatgcccatttcattgcctggacgggccggggaatggagttcaagctcattgagcctgaggaggtgggcctctcggatgttcccagccctcctttccaaagtttacagcctggaggtgggagaacctgggaaatggtggcacgtgcctccatcatgattcttgctttacctaacctgaattcttgccaagcctaagtctgtgggctgatgctttgttgcagagctagcttggcactttgcaccaagaatctcaagtgctctttctgaccttacccccattttttcctctgccaaggtagcatctctaccccaaaactgttttgttcccaggtcgccaggctctggggcatccagaagaaccggccagccatgaattacgacaagctgagccgctcgctccgatactattatgagaaaggcatcatgcagaaggtgggggctgtgggtctagggacaaggtggtggggggcagtggctgtgagaagctgactggggagagggtcagcagggcagttctcagcaactttgtaggatcagataatgaatcagtcagagagacaagaaattgtggagaatcccaaggttctcctcccccaaaaaagtgcaacactgtaactgagaagcccaagcatggagaagttgagatgaaaaaggagtaagaactgtgaagggagagtcagcttctcaggaaccagcatgggagagaaatgccccgagcatctgcctgtactggtagaagggccacattccccactcccccaccttaccccatacaaaggctgggcggctagccaggctgaccagaccttctctctccccataggtggctggtgagcgttacgtgtacaagtttgtgtgtgagcccgaggccctcttctctttggccttcccggacaatcagcgtccagctctcaaggctgagtttgaccggcctgtcagtgaggaggacacagtccctttgtcccacttggatgagagccccgcctacctcccagagctggctggccccgcccagccatttggccccaagggtggctactcttactagcccccagcggctgttccccctgccgcaggtgggtgctgccctgtgtacatataaatgaatctggtgttggggaaaccttcatctgaaacccacagatgtctctggggcagatccccactgtcctaccagttgccctagcccagactctgagctgctcaccggagtcattgggaaggaaaagtggagaaatggcaagtctagagtctcagaaactcccctgggggtttcacctgggccctggaggaattcagctcagcttcttcctaggtccaagccccccacaccttttccccaaccacagagaacaagagtttgttctgttctgggggacagagaaggcgcttcccaacttcatactggcaggagggtgaggaggttcactgagctccccagatctcccactgcggggagacagaagcctggactctgccccacgctgtggccctggagggtcccggtttgtcagttcttggtgctctgtgttcccagaggcaggcggaggttgaagaaaggaacctgggatgaggggtgctgggtataagcagagagggatgggttcctgctccaagggaccctttgcctttcttctgccctttcctaggcccaggcctgggtttgtacttccacctccaccacatctgccagaccttaataaaggcccccacttctcccatta

SEQ ID NO: 394 - DNA, 17092 bp, Homo sapiens
  source 1..17092: mol_type = genomic DNA; note = NC_000019.10:c4559684-4542593 SEMA6B [organism=Homo sapiens] [GeneID=10501] [chromosome=19]
agaatccctgagccagaaggccagggcagggctgggggatacccctgctgctcagacaggaaaatgggctcggagcttgcccaatacttcccagaaggacgaggctgctgaacttctcattcggggctccgggacctggactgtacccctttctggtagggggtgctctgaactgggaccttcagcatggagggcgggggttcagagggtgaattccgctgctatgtcattacctggatgggagagtgtctccactccacacacctagaagtttctgcaaagttaccttgaatgggagtgggaagcagtcccccgtgagaggtagtgaggtgcctgtcatggaggtgtgcaagcggagaatgaaaaggctggatttgggaaggaggtcagatctaccagggtcacagaggcccttggcatggggaatattctgtgattctgtggttatgtagtactgtcattcccagcttgtggctttttttttttttttttggatggagtcttgctctgttgcccaggctggagtgcagtggtgcgatcttggctcactgcaacctccacctcctgggttcaagggattctcctgcctcagctctccagtagcagggattacgggcacaggccaccatacctggctaatttttgtatttttttgtagagacagggtttcgctatgttaggcaggccggtcttgaactcctgacctcagatgatcctcccatctcggcctcccaaaatgttgggattacaggcgtgagccaccacacacagccagcttgtggcttataaaattccaagagcctttgactctttttttttttagcctttgagtttaatatttttgtgttttaattctaagtatttttatgcatgtattttgcgattgcatttttaaatatatgttttaggatatttgtatctattattataataattattattagttttaaattaccgaatgcagttttgtttgaagtcgtttcctgggctttcacgcacacgtggccataaagttgttctgataattaaatcagtgctgtgtattattattattattgccattattgtttttattaattattatccccgtgaggaatttttctgggatttgaaggagcgtctgctgctctcgcccgccgtcttgtggccacgagcgggactgcaggccgctcacctcgccgccccttgcccgcaggcgtcacctcctcctgtcgcctggccctcgccatgcagaccccgcgagcgtcccctccccgcccggccctgctgcttctgctgctgctactggggggcgcccacggcctctttcctgaggagccgccgccgcttagcgtggcccccagggactgtgagtctgggggtgtctttgggcgggggtggagtcccgtgggagtatctgggttcccagttgggtctgctgcccccactgggggactcaagcagtccaggagccacccctagaaggggcatgacctcaggccaccctctcttcacccccagcccttgctcacacccctctccaccccctcactcagacctgaaccactatcccgtgtttgtgggcagcgggcccggacgcctgacccccgcagaaggtgctgacgacctcaacatccagcgagtcctgcgggtcaacaggacgctgttcattggggacaggtattgctggggacagcaaggaggcctgtgtgacgagcagaatgagcgagggggagagagagaggaggcgagggcagggaggggatggagcaggtcgtgcagggcctgttgggccattgggaggacttaggctttgacccggaggaaggtgggagccacggagggttttaggtaggggaaggactggacctgactcaggtgctcacacgcgcccgccctctggtggctgcttctgggagggggcgagaatggaatccaggggaccagggtggaggggactgggctgtccaggctggctatgattgaggctggaccaggtggaagctgtcgtggggagaagcaagtgtgagattacggggcttctagggatgggcttcccaggaaggagagagaccggacagatcaaatgctttggagaggatgaggaggatgcggaagtgaccactgggcttaactacacgaggtcaccaatgacgttgagcagggcggcttcctcggcaagggtgtgaggggagagagcctggtgggcgcctgggaggcgccgagtggggcacctgacctaaggccatgggacatggtgttgggggcagtccgtggggcgtgccgggcaggaggtggagtgcaggatatgaaggcctgctggggcccttgggggggtgtggtcggcgctagagttgctcgtgtcagaggcattggcatggccctgcatgcccccgtgtgcacaccacattggcagtgggaaggatggaacgggagagggtggcggagcccccagttctcactaactatgcccctcccccagggacaacctctaccgcgtagagctggagccccccacgtccacggagctgcggtaccagagggtgaggaaggggtgcaggtgggagtggaggggtagggccagggggacgcggcactgcgccggggagctgggtggattcggcccagcacggcggggtcactcagggctgctgggacccgttaccccctcaccagctctctctgtctgcagaagctgacctggagatctaaccccagcgacataaacgtgtgtcggatgaagggcaaacaggaggtgagttggccctggctcggtcccggcccctgcgaatcagccctggcattacccatgccccgccccaatcagaccaggccacgcccaccccgccagccctggccacgccccaacccacccccaatcagccctggccccgcccaactgccagccctggccacacccccaaacagccatggccacgtccacgtccccacccaattggtcctagcccggcctccagcctagccacaattatccataaccacgccccaaatagttctggctatgcccacacttctgcccctgtcagtcctaccaccacccccagcctcgttccaacaagcccaggccatgttcacacgccacccaatagctcactccccacccaatcgatcaggtccccatcccgacccctcccctatcagtcctgccgccccccacgcccccggcccgccccaataagcccaggccacgcccaccccaccagctctggccacgctcccaacttggccccaatcagctataaccgtgcccaccacgccccagttagttctggtcacgaccatgccccaccccaatcggccgtgaccacacccagggcggatccttctcctccatcccaggttaggactctgctattgccatggttatgcccacagtctgacaatgcccaccatcctggccttgcctgcgttgctgatacaaagtgtttccctgtctgggtcgcaccgtgtccccagccagtcctaggttcagcccctgccttggccatgcccacaacagaccggccctccacccacacaactcaggttctggccacgcccatcaccatgaccacgcccacatcgcgctccccgcttcctcctgtccccacctcagggcgagtgtcgaaacttcgtaaaggtgctgctccttcgggacgagtccacgctctttgtgtgcggttccaacgccttcaacccggtgtgcgccaactacagcgtgagtcttcagactccctgcgccccaggtccaacctccaggcctctgctcgcccgacctccgctggccatggcttttccccaggccgtgtcacctcctccaggaagccttcctggatatactctccctgcctcctccccctgagctcaagaggagtcagcgctgtccaaacgaggcctgtacagggggccggggaagccgtagctacttaggtaatgagccagttacaggtctaactaggcattgactcttaaacccatttacagatcagtaaactgaggccctgagaggttaagtgagtggccaaggtcacacagtaatccgtggtggatcaggattccccctggagtggggggctgagggagccaggggctgctaggtggggtcaggagatctgtcactcaggccccatggtccctgcagatagacaccctgcagcccgtcggagacaacatcagcggtatggcccgctgcccgtacgaccccaagcacgccaatgttgccctcttctctggtaagtacccccccaacctccatctgatcagccccagccacaggcaagacctggcattttctactccagcgtctgggttgtttagaaggcagctggacgaccacttgtcccagctgtgacatgggcagactctcagcccaggtttggggctcagctgggattgaggctcagcgggatttggggcttagccggggtcaggggctcagttaaggtcagggcttggatggaggtggggcttggatgggatcagggctcagcctggagacaggggctcccctaggctcaggactcagtctcagaaaatcgagtttcgacccacccagcccctggcctctgcggtctcatctcttgcctgccttccccacccaccccatccagacgggatgctcttcacagctactgttaccgacttcctagccattgatgctgtcatctaccgcagcctcggggacaggcccaccctgcgcaccgtgaaacatgactccaagtggttcaaaggtgagaccaggaagggcagtgggcccagacctggcagggcccagaacctgacattcatcaaatctccccaccagaataagagtcccagaggagcttggtggagagatttccaccacatctttggaatctgttggcctttttgaagactagaaagctagaggaacaagtttagttggatctaaagtagaacccgctggaagtgggtggcttagaagcccaaaatggaaccacagaaaagatatagcaggactcagctcttcaacacatgagggaggaagataacaaaaaatagttgatgttgccatttgcagcaagagacacagcgattttaggcttctgacctcccttcccctgcaaaataccaaactttgagtctgtttcatattgtctgggtaaccagcctatgtccccccttcaccataaaagccagtgagttcttagccccagaaaccccctttgtcatgtcaggggctgagttctgacccctcctgtcctgcagagccttactttgtccatgcggtggagtggggcagccatgtctacttcttcttccgggagattgcgatggagtttaactacctggagaaggtgaggccggtgcagtggggcatgaagttgagaggctctgatcatgcgaagtgagggggcagaggtggatccatgaatccctgcatggggtgagagggtcctgccctccatttctggtccccagggcctcctttccagccatgatcaggccctgaggctgaagacatctacggagcagccgtggagcactcagccctgacgagggacttgagttggaagtcagatacacctggtgctgttgctgttcacctgtccacccacccacccagccacaatcacttatccatccttcatcccctgtccatccgtctacctgctcaccctcccacttacccatctgtctgttcttcagcccacccacactttcatgagcccattaatccatctactcatctgcccacccactcactcatccacccactaccatccatccgtgcactcatccatctgtccatgcatccatccacccatcgattcatctagccacccttccatcctatccatctatcagtccatccacctatccatccatctatccatcatctgtccatccatctgccaatccattcacccatccattcatccatccatccatcccatccacccatccatccatttatctacccatccaccaacacacccacccacccacccacccatccatccatccatccatccacacatccatccatccatccagctgccaatccatccacccatccattcatccatctacctatccacccacccatccatccatccttcatctatccatccatctgccaatccatccacccttccatctcatctatccatccatctcattcacccactcatcatctatgcacccacccatctatccatccatttatctgcccatccacccacacacccatccatccatccatccatccatccatccatccatccatccatccactcacccatccaaccatccacccatccaactcacctatccatccatccatccatccatccatccatccactcacccatccaaccatctacccacccaactcacccatccatccatccatccatccatccacccacttatccatccattcattcatccacttattcacctatccatgcatccatccatccactcacctagctttctctctatccatctgttcatccatccacccacacatccatctacttatctaccaattgcttgattaccttgttctccttcaccatctcttccattatctatcatccttcttcagatgtatttatttatccatccacctactcatccctccattgtaatcgtccgtccatctactcatccactcatccgtccatccaggcaaccaggcagtgctgaagtgcacagactgccactaactactattgtgaccttggaccagtcacttccttttatctgtgcctcttatcagtgtccccacatgtacaatggggggatatcagtaggcccccctcgggaagagtgtaagagatgtgagaataaaatgtgggtcttcgtggaaacagtgatgattatggttgtcactgttgctattatcatcattgacattcccaccgggaatttctgccagggaagccggtgcccagagaggaacggtgactggccggggtcccaccagagccagggtcagactcctccatcacagtttgggtggtgagtggcacagcctgtgaacaggccttcctgggacacagagctcaggcccccgtccgtccactgtcacgcccaggtggtggtgtcccgcgtggcccgagtgtgcaagaacgacgtgggaggctccccccgcgtgctggagaagcagtggacgtccttcctgaaggcgcggctcaactgctctgtacccggagactcccatttctacttcaacgtgctgcaggctgtcacgggcgtggtcagcctcgggggccggcccgtggtcctggccgttttttccacgcccagcaacaggtcagcgcccaccaatgggagcaaactgggagcatttggtgggcatgggtagagagggcctgtattcactcctcaggtatgccctgggtgctaggttgggcaccactggattagacctctgagaggcctcggccccaggctggggtgggacaagctgacactgaccctctaagtccctttggtcagaactgggccaaagatatcctcatcctctgcctttggggagaggagcagggagggcttcctggaggaggggacattggagctggactttgggtgtgagatggaggaagagggaagggtgttcaaagttggagaaacagcatgtgcaaaggtcctgaggcttcagtgagttcagtatacttaagtaatcgtgagagagtctgtgtgggaagggaactaggggagaatgcacaacaggaaagcagggaactggtaggatggatcaggcaaggctttgtgggctgcaggcagaaacttggactttttccctgagagcactggggagccatggaagagtgaagagcaagagggatgagatcaggtttgcattttttgtttgtttgtttgtttgtttggtttggttttttttttgagacagtttcactcttgttgcccaggctggagtgcagtggcgcgatctcggctcaccacaacctctgcctcctgggttcaagcaattctcctgcctcagcctccctagtagctgggattacaggcgtgcgccaccacacccagcttattttgtatttttagtagagacggggtttctccattttggtcaggctggactcaaactcctgacctcgtgatccacccgcctcagcctcccaaagtgttgggattacaggcgtcagccaccgcacccggccaaggtttgcatttttaaaaagcctgcttgtggactgggcacggtggcttcgcctgtaatcccagcactttgggaggctgaggagggcagatcacttgaggtcaggagttcgaaaccagcctggccaacatggtgaaaccccatctctactaaaaatacaaaaattagctgggtgtggtggtgggcacctgtaattccagctactcgggagactgaggcaggagaattgcttgaacctgggaggtgtaggttacagtgacctgagatcacgtcactgcactccagcctgggcgacagagcaagactcggtctccaaaaaaaaaaaaaaaagcctgctggggagtgggctctaacagtgacactgggcaggcaggacatccagttaaacagggatgggggcctggacaggggtggcctcgtagaccctgaactgtggcccaatctgagatgttattcaggaggagtggctgcattcgacagatgcgggagggacaggggacatctctggcctaggaagactgaagattcactggctcctgcagacagaggctcctgcacgcacttgtccgagatggggcctcccaccgggctcaccaaactctttcatcccaacccctcagcatccctggctcggctgtctgcgcctttgacctgacacaggtggcagctgtgtttgaaggccgcttccgagagcagaagtcccccgagtccatctggacgccggtgccggaggatcaggtgcctcgaccccggtgagaaccccctccatcctgagtcacatgcccggatgaggtcctgatccccagggccgagggctggggcttccgggtggttatttagctgatgctgagttcagctgtacccgttatacagttgggaaaaactgaggcctggtgtggtggctcacgcctgtaatcctagccctttgggaggcggaggtgggcagatcacctgaggtcgagggtttgagaccagcccgaccaacatggcgaaaccctgtctctactaaaaatacaaaaattagccgggcgtgatggcacgtgcctgtaatcccagccactcgggtggctgaagcaggagaatcgcttgaacccaggaggtggaggttgcagtgagccaaagcactccagcctgggcgacagattgagactctgtctcaaaaacaaaacaaacaaaaaacctgagggtcgttgggcaaagcaatgggtacctctggtgaatcaggcccctttatgagaacctttacgttcgtcctgaccacacccttgtcacccccaggcccgggtgctgcgcagcccccgggatgcagtacaatgcctccagcgccttgccggatgacatcctcaactttgtcaagacccaccctctgatggacgaggcggtgccctcgctgggccatgcgccctggatcctgcggaccctgatgaggtcggtcctggagaggcagggcatggcgaggggagacaggatggggtagatggagggtgagaggatccagatgctcaacacagatgagcccatggcttccggcgctgcccagagagctggagacacagagagacagagagggaaagatggagagacactaggaaagagagaacaaagagagagacagagggatcaagaggtgacagatggggctgggcacggtggctcatgcttgtaatcccagcactttgggaggccgaggctgccagatcacctaaggccaggaattcgagaccaccctggccaacatggagaaacctcgtctctacttaaaatacaaaaattggccgggcatggtggctcacgcctgtaatcccagcactttgggaggccgaggcaggcggatcacgaggccaggagatggagaccatcttggttaacacagtgaaaccccgtctctactaaaaatacaaaaaattagctgggcgtggtggcaggcgcctgtagtcccagctactcaggaggctgaggcaggagaatggcatgaacccgggaggcggagcttgcagtgagccaagatcacgccactgcagtcccgcctgggcgaaagagcgaaactccgtctcaaaaataaaataaaataaaatacaaaaattagccaggcgtggtggtgggcgcctgtagtcccagctactcgggaggctgaggcaggagaatcacttgaacccgggaggcggaggttgcagtgagccgagatcacgccactgcactccaacctggggccagagggagactacacctcaaaaaaaaaaaaaaaaaaaaagaggtagacagacagacacacaccaggagaacaaagggggaaagagacagagagacagggagagagacaatcagagacagacagacacccagagagacagagatagggaagagagacaaagagagaaagagactgaaagatacacagacacacatacatatcaggagaaagcggggctgggcacagtggctcatgcctgtaatcccagcactttgagaggctaagacgggaggatcacttgaggtcaggagtttgaaaccagcctggccaaatggtgaaaccctgtctctactaaaaatacaaaaaaaagaaaatcagctcggtgtggtggtgtgcgcctgtagtcccagctacttgggaggctgaggcaggagaatcgcttgaacccaggaggcgagatcgagccactacactgcagcctgggcaacagagtgagactctgtctcaaaaaaaacaaaacataaacttgccaggcgtgatggcgtgtgcctgtagtccctgctactcaggaggctgaggcaagagaattgcttgaacccgggaggcggaggttgcaatgagctgagattgcgccactgcactccagcctgggtgacagagtgagactccatctcaaccaaagagacagggctgaggagagcctggtttggggttatgtttcaaaaaagggcgagtgtgcccacgtgcctgtgtagtcacgcatgtccccggcatccatgcacacacgcatttattgctgtcacatgtgttggtgtgtcagtgtctgtatgcacccgtgtaactatggccatgcccgtgttggtggcatgtggtgatatggggccagcctgaccctcccctgccctgtcccccaggcaccagctgactcgagtggctgtggacgtgggagccggcccctggggcaaccagaccgttgtcttcctgggttctgaggcggggacggtcctcaagttcctcgtccggcccaatgccagcacctcagggacgtctgggctcagtgtcttcctggaggagtttgagacctaccggccggacaggtaagtctgggcaaaggtgggaaggggtcgccagcaggaggggagatgggctgagatgcgctcagcctcaccactctgcttgtccccaggtgtggacggcccggcggtggcgagacagggcagcggctgctgagcttggagctggacgcagcttcggggggcctgctggctgccttcccccgctgcgtggtccgagtgcctgtggctcgctgccagcagtactcggggtgtatgaagtgagtgtccaccccaggccagccgtgggcgggaagcaagggaggatgggcacagggagggacagctgggttccagtcaaaagcccaatgatgtcctggtcattgagctgggcagagggcatggcccgtgcaaaggcccgcgggcaggaccactcctggtgtgttggaagaacagcaaggtggccggtgtggctggagcacagtgagcaagggggagtgagggaggaggggaggacggggaggggatgggagaggacgaggcagtttgtgcagagctttgtgagcctcggggaggacttgggctttgaccttgaaggagatgggagccatgtagggttgcaggcagaggagggactggccctgactcaggtgcttacaggtgccctctggtggctgctgccaggaggagactgcaggggaaggagaaccagggaccagggtggaggctgtttccccgtctctaaaatgggaggaaagctaggatgcatgccagtgctggcacacgcctgcactccatgtgagccgtcaatgcggaggaccctgcttcctgcccgccgttattgcaacaatgacccagtagctccgagtccaagggcacagcctctggcacgatgcctgggctcccatctcagctctgccacttgggcaaacatttactttctggagcgtcagtttgcttatctgtaaagtggggagtgaacagtgccctgcacacagatttgttctaaggactccagaagttgctattaagaagagggactgggcttggtagctcacgtctgtcatcccagcacttgggaggccaaggcaggaggactccttgagccgaggagttcgagaccagcctgggcaacacagcatagtgagagcctgtctctaaaaaaaaaaaaaatgcaaaaatcagctgggcgtggtggcacacacctgtggtcccagctacccagaaagctgaggcaggaggatcacttgagcctgggaggttgaggctgcagtgaactatgatcatgacactgtactccagcctgggtgacagagcatgaccctgtctcttaaagaaaaaaaaaattaaattttaatttaaaaaaatttttttaattttaaaataagaaaacgccagccgtggtggctcacacctgtaatcccaccactttgggagtccgaggcgggtggatcacttgaggtcaggagttcaagaccaacctggtgaaaccctgtctctgataaaaatgcaaaaattagctaagtatggtggcgcgtgcctgtaatcccagctactcggggggctgaggcaggagaatcgcttgaacccgggaggcggaggttgcagtgaaccaaaatcccgccactgcactccagcctgggcgacaagagcgaaattccatctcaaaaataactaaataaataaacaacaagagcgaaattccgtctcaaaaattaattaattaaaataaaaataaagaggcaggtgcttggaacagggcccacaggtcaccatcaccattggggttgtgtaagtgacttggacacttgtcccattcggtccctggtctgctctaggaactgtatcggcagtcaggacccctactgcgggtgggcccccgacggctcctgcatcttcctcagcccgggcaccaggtactgcgggagagggaggtgggtggagggtgtgtcagacccgcccatgatcccagatccccctgatctctgactgtgagaggggcctctgctgacggtgcctcctctccccattagagccgcctttgagcaggacgtgtccggggccagcacctcaggcttaggggactgcacaggtgagttggggggacggcaggctaagacccccatcccccactaccatgggggaggggagggaggaggctggaggaccctcgaatcctctgggaggtgggtggggaaactggactccatcagagaactttagaaaggcatggggtgggccgggcgcggtggctcacgcctgtaatcccagcactttgggaggccaaggtgggtggatcacgaggtcaggagatctagaccatcctggctaacacggtgaaaccccgtctctactaaaaatacaaaaaattagccgggcgtggtggcgggcgcctgtagtcccagctactcgggaggctgaggcaggagaatggcgtgaatccgggaggcagagcctgcagtgagccaagatcacgccactgcactccagcctggacgacagagcaagactccgtctcaaaaaaagaaaagaaaggcatggggtggtctcatctcatttattggggagggagataggggaagaacagagacaccaagaaacaggcaggctttggcaaggacgaagagacaacagaaggcagacagaccaacttcaacaggacagaaggggccaggcgcggcagctcctgcctataatcccagcattttgagaggccaagacaggacgatcacttgaggtcaggagtttgagaccagcctggggaatatagtgaaaccctgtctctaaaacaaaaacccaaaaataatccagacgtggcagtgcatgcctgtagttccagctacttgggaggctgaggcgggaggatcgcttgagcccagggaggtggaggctgcaatgagctgtgatcaggccactgtactccagcttgggcaacagagtgagaacatgtcttttttttttttttttgagacagagtcttgctctgtcacccaggctggagtgcagtagtgtgatctcagctcactgcaacctccacctcccgggttcaattgattctcctgcctcagcctcccaagtagctgagattacaggcgcacaccaccatgtccggctaaaatttgtatttttagtagagatgggtttcacttgttggccaggctggtctcaaacttctgacctcaggtgatctcctgcctcagcctcacaaaatgctaggattatgggtgtgagccatcatgcctggcccagatcctgtctttaataaaacaaacaggtagctggaggcagggttgcagtgagctttaccactgcactctagcctgggggactgtctcaaaacaaacaaacaaaaaaaattaaaaaataataaaaataaggccagtcgtggtggcttatgcctgtaatcccagcactttgggaggcagaggtgggcggatcacaaggtcaggagttcagaccagcctggccaacgtggtgaaaccccatcctactaaaaatacaaaaattagccgggcgtggtggtgggcacctgtggtcccagctactcgggaggctgaggcaggagaatcacttgaacatgggaggcggaggttgcagtgaatcgagatcgccccactgcactccagcctggcacacaaaggaagactccttctcaaaaaataaataaataaaaaaaaataaaaataataaaaaagaggacagagggccccgaggaggtaggagggatgcccagggccaccccgccggccccactaacccccctgtgctccccggccaggactcctgcgggccagcctctccgaggaccgcgcggggctggtgtcggtgaacctgctggtaacgtcgtcggtggcggccttcgtggtgggagccgtggtgtccggcttcagcgtgggctggttcgtgggcctccgtgagcggcgggagctggcccggcgcaaggacaaggaggccatcctggcgcacggggcgggcgaggcggtgctgagcgtcagccgcctgggcgagcgcagggcgcagggtcccgggggccggggcggaggcggtggcggtggcgccggggttcccccggaggccctgctggcgcccctgatgcagaacggctgggccaaggccacgctgctgcagggcgggccccacgacctggactcggggctgctgcccacgcccgagcagacgccgctgccgcagaagcgcctgcccactccgcacccgcacccccacgccctgggcccccgcgcctgggaccacggccaccccctgctcccggcctccgcttcatcctccctcctgctgctggcgcccgcccgggcccccgagcagccccccgcgcctggggagccgacccccgacggccgcctctatgctgcccggcccggccgcgcctcccacggcgacttcccgctcaccccccacgccagcccggaccgccggcgggtggtgtccgcgcccacgggccccttggacccagcctcagccgccgatggcctcccgcggccctggagcccgcccccgacgggcagcctgaggaggccactgggcccccacgcccctccggccgccaccctgcgccgcacccacacgttcaacagcggcgaggcccggcctggggaccgccaccgcggctgccacgcccggccgggcacagacttggcccacctcctcccctatgggggggcggacaggactgcgccccccgtgccctaggccgggggccccccgatgccttggcagtgccagccacgggaaccaggagcgagagacggtgccagaacgccggggcccggggcaactccgagtgggtgctcaagtcccccccgcgacccacccgcggagtggggggccccctccgccacaaggaagcacaaccagctcgccctccccctacccggggccgcaggacgctgagacggtttgggggtgggtgggcgggaggactttgctatggatttgaggttgaccttatgcgcgtaggttttggttttttttgcagttttggtttcttttgcggttttctaaccaattgcacaactccgttctcggggtggcggcaggcaggggaggcttggacgccggtggggaatggggggccacagctgcagacctaagccctcccccacccctggaaaggtccctccccaacccaggcccctggcgtgtgtgggtgtgcgtgcgtgtgcgtgccgtgttcgtgtgcaaggggccggggaggtgggcgtgtgtgtgcgtgccagcgaaggctgctgtgggcgtgtgtgtcaagtgggccacgcgtgcagggtgtgtgtccacgagcgacgatcgtggtggccccagcggcctgggcgttggctgagccgacgctggggcttccagaaggcccgggggtctccgaggtgccggttaggagtttgaaccccccccactctgcagagggaagcggggacaatgccggggtttcaggcaggagacacgaggagggcctgcccggaagtcacatcggcagcagctgtctaaagggcttgggggcctggggggcggcgaaggtgggtggggcccctctgtaaatacggccccagggtggtgagagagtcccatgccacccgtccccttgtgacctcccccctctgacctccagctgaccatgcatgccacgtggctggctgggtcctctgccctctctggagtttgcctcccccagccccctccccatcaataaaactctgtttacaacca

SEQ ID NO: 395 - DNA, 15742 bp, Homo sapiens
  source 1..15742: mol_type = genomic DNA; note = NC_000016.10:c71489324-71473583 ZNF19 [organism=Homo sapiens] [GeneID=7567] [chromosome=16]
aaccgttctcgctagcggtgcgcttctggcctgttttgagtccgcgctcaaaggtgccaaagtgcaaggacccacagttgggcggagcttgggttgggagtgagacagcatagcagtccaggctggtcctttgagcgcagctcaaagaaggggacggggagggcgtcactatacaattgtggccgggtgggacctgggctgtttgctcttggaggctgtacagctgcaagctttgccgctcacgaactggagctggagaaagagccccccaaggatgggaggatgacagaagtgtctgcagatggcactgcctgggcaccaggagaggcaaggactccagctgattcctacctcctagggaagccatccccactcttagttggggccggcttaagtctttaaccaaggctcttgcagttgcagtgtctgtttcttttgaagaggcagatttggagacctgtgtccaaacaaatgccattgtcccatagtgtttttatgtttttgttagtttgttttggtttttttgagacgaagtctcgctcttgtcacccaggctggagtgcaatggcaccatctctactcactgcaacctccgcctcccgagttcaagtgattctcctgcctcagcctcccgagtagctgggattacaggtgcctgccaccacacccggctaatttttgtatttttagtagagacggggtttcaccatgttggtcagacgggtctcaaactcctgacctcaggcgatccgcctgtctcggcctcccaaagtgctgggattacaggcgtgagccactgtgaccagtctgaactcacttttaattttaggagcttgttttgtagattctttgggacttcttatacagataatcatgttgcctgcagatagtaacagttttgttctgagtttcgaatctgtgtgtctttcatttcatttctttttctttttcttttttttttttttttgagatagtctcgttctgtcacccaggctggagtgcagtggcatattctcagcttactgcatcctccacctcccgggttcaagcaattctcatgtctcagcctcctgagtagctgggattacaggcacacaccaccacacctggctcatttttatatttttagtagagatgcgatttctccatgttggccaggctggtcttgaactcctggcctcaagcaatccatccaccttggcctcccaaagtgctgggattacaggtgtgagccactgtgtctgacctatgtgccttttatttctttttctggccttgctcttgctaagactcccaatatgatgttaaatagtagtggtaagagcagacatacctgccatgttcccaatcttggagggaaagacattctgtctttcatcattaagtatgtttgcagctgcaaggagagaataatattgaattatatgtcagtatagatactgcagcacaatatttagcttaactacatatttttttgcagccaaggcaaaaatgactttgtgcatgaaacttaagttccaccacagcctcagcctatttgtggctgggattttcagacatatgggagagaagttagtattttcaagtcaggattaagtaacagtaaatatgccatgatcatacaccatactctgggtatcatgatctgatattacttatagcttcagttaaagatactgtaggagttagagggagagctggatagttaggctgtgaggtgaccagaaagaaaggtggttcccattggaatctaaggaatggtcaaagcttgaaagtaattatgtttgatggtagagattgtgacagacatgagtatgagtattgtattagtccgttgtcacagtgctatacagatatacctgagactgggtaatttatggagaaaagaggtttaattggctaacagttccacaggctgtacaggaggcatggctggggaggcctcaggatacttacaatcatggtggaaagcaaaggggaagcaggcacaatcttcacatggccagcaggagagagacagcaaaggaggaagcgcaacacacttcgaaacaaccagatcacatgagaactcactatcacgagaacagcaagggggaaatccgcccccatgatccaatcaccttccaccatgttcctcccccaacactgaagatcataattcaacatgagatttgcctggggacacagagccaaaacatatcaagtatacatttccttagaggtgatacattggctgggaagacaggtcagtgtgaattagctattattattaatgatcttgaaaactctctgggagactttccagacaaatgagagtggaaattttcttcctttccactccctgcaaaacaaaaataagttattcccaactctttttgtttttaattttagtgttcccatcttctggccaagaatatactcaactcttcaccaagtaaacatacgggttcccatgtttctaaaaaccgataaaattaacaatagagacttgtttttgttttatatccagacttaatggtcatttatgtaatgtaaatatccagaataggcaaatctataaagaaagtggttgtctagaattgggggaagaagagaggtatgtacatgtgtgtctattaattttctattgctgctgtaacaaattgccatgagtagtggcgtaaaacaacactaatttatcttagagttttggaggtcagaaatccaaaatgggtcccactggtataaattcaggatttagactaaggagagaatctgtttccttgcctttttcatcttctggaggccacccactttccttgacccttggccccttcctccatcttcaaagccagtgaggttgggccaagtccttcttgtgctgtcatttttgtgattctctttcaattccctctttcacgttcaagaactcttatgattacactgggcccacctgaataatccaagataatcatctttttttttttgacagggtctcgctttgttgcccaggctggagtgcagtggctcaatcaaggctcactgcagccttgacctcccaggctcaagtgatcctcccaactcagctagtagctgggactacaggcgtgtgcccacacctggccaatttttgttcctttttggaattttttttttttttttttcggtagagacagggttttgtcatgttgcccaggctggtttgaactcccaggctcaagtgatctgcccacctgggcctcccacagtgctgggattacagatgtgagccactgtgcctagccccaagataatcttaaagttggctgactagcaatcttaattccacctgcaacctcaatttccctttgtcatgtaacttaatgtactcacaggttctagagattaggacatatacatctttgaggggaacaaaacaccattctgcttaccagagggaaaatggagagtgactgctgatggttatgaggttcctttggggagatgaaaatgtcctgaaactgattgtggtgatgtttgcgcaagtctctgaacacactaaaacctatttaattttatactctgcattgatgaattgtatggtgtgtgaattaaatgttaataaggcaggtgtgtgtgtgtgtgttcagtatttttgaaactaaattctttcaccttcttgcctgaaaccagctcctcttcttcaattcctgatctcagctaatggcaccttcatctatcaggtcatccaaaattcatggctattatagattgctctggctgccttgtattcagtcattaaaaaaaaaaatgtccaccgttttcacttcctaaatagttacttaatatatccctccttagacctggtctttctttctttttgtttttttttgtttttttggttttttttttttttgagatggagttttgcttttgtcgcccaggctggagtgcaatggcacaatctcggctcactgcaacctccacctctcgggttcaagcaattctcctgcctcagcctcccgagtagctgggattacaggtgcccgccattacgcctggctaatttttgtatttttagtagagacgaggtttcaccacgttgaccaggctggtctcgaactcctgacctcaggtgatctgcccgccttggcctccgaaagtgctgggattacaggcgtgagccaccgcgcctggcctgctgacctggtctttcttaacgtgtctgggtctttacctctaaggaggacagcttttttgtgcaaagaccctttggcagtctggtgacaccttcaaaaccaatgaacatacaattaaacagttttttagaatttgtgatacagaaatataagtgcagctttaccaacgtgatgaaatgtaatgacaagacttgaggtgggcccgataacaacaaggacaatttcaaattagtgacgagaatagccatattctgagatctgcatcaactgtaatgtgatatgaaaatatctgtgatttctatcggtgacagtcacagatacggctgatactacagtagtttgttgccaacatagaagaaaatgctaaatttcggttagagattagcgaaaacaatgatatactttctttcctattcaaggtctctgaggatccccgggtggaaactcctcccgggagtaaaaccacacaaccactgagaagaccgctccggcatcctagagagtacgcgtgtgagcctgggtgcaaggccaaagtagtgacgcacttccgttcacgcaccgctttctgtttttcctgaggtgagtgttggggtttgtcgcctaggagtccttgctaggctcaggcactgcacctctagagaaggctgtcggcttcgtccctgctgcctcagtggagggagacagggcggcccctccgggaccggggagcggaggctgctcgcgggccggtcccggtctccctctggtgccttcgctcccccacgcctgcatcggcgccttgggaaatggaggctgtggatatgggcggctggatggaagggacgcctctgttctcgacgccgcccaaaccccatctgctcattgggccacagctgcttactgagcagctatgtgccagttcctgctctagattccggggatgcagcggtgaatgaggcggggcgtgggccccgcccccaggaagctttccgcccaatgggaaagtcatgtattaatcaaatctggttatttcactccacctgcccgtgacttagtgcacgtagatcgaagaccaagttcttgacgtgcacaaagtgtggctttgtcccttgtgacttcttcagcatcatctaacagcacactctcctttgactgctactacagtgttcttgatccttcactactagaacatggcttttgcgtatgctgttacttttgtaaagatttccttcataccttagttaatttattttcttaagcttcccatccacgttagtttcccctggcagtgatttaaattgtggacttaaaagttatttgagagaatcttgattaatgtgtctttcctttagactaagctctgcgagggacaggatcatgccccttctctctctacttcatctgttgtgtgtcacacgtggccttgcatgaaatatgtatgagataaatatttgttgaatgaagaaagcacaaatcaatatataatttcaaactggattaagtggtatataggaaaaggagtacggtgcgagtggagtgtttaacagagacacctgacctggtctgtagagcgatcatgatctgaaggtgaagggtggatagattactggagagaatggcggctagattactggagagaatggcaggcagagaatctcagttgtaatggttctgagattggagaagagtagttcatacagaagaaacagcaggtatgaaggtcctgagttagcacagaggaaactgaaagaaggccattgtagctaaactaagagaaaagagggtggcggcacaagatgaggctcgcagaaaacagcatcatgcattaagtccctgtagggaagatgctggctttttatagaatattgctgtttaactagaatacaaagtgtctgtaagagatgatatagttaaaacaataacccagatgttttagtgtgttgagttggcccttcagggtcctttggtaatcagtttctggttttcatggcccttgagtggggcaatgaacaaaaaagatgcctgctccaggtccaagtaaaggaagacttgctctgagatttttttcctgagttttcttggccattcttgtctattattttatgttaaccttaaaatcattttgccagttctaaaagcattcctgttaggattactattggaaagaatttagtgtagttattaaaagcaggaggcggtgcctcacgcctgtaatcccatcactttgggaggccgaggtgggtggatcgctagaggccagtagtttgaggactagtctgggcaatatgatgaaaccctgtctctactaaaattacaaaaatgagccaggtgtggtggcacatgcctgtaatcccagttacttgagaggctgaggcaggagaattgcttgaacctgggaggccgtggttacagtcagctgagatcacgccattgcactccagcccaggtgacagtgagattcttgtctcaacaaacaaacaaacagacaaaaacatgacctttgaagcctggcagatctagtgtgggatccgagttcatccattcaccagctgagtgatcttggtagaagaaattattctcttagccttgtcttctcatttgggaaaaattaaaggttcaaaagattgttgtgaggactaaataagagaatatgtatttttcatccaaaagcatgatacttgctatttttaaccttttatattctcagtcaaatttatttttaaaaataaaggtctgagattcttcttgttaggtttcgctctgagtttattggtgtcttttgcttgttttgctcttcatttagcttggtgttggtgaggacaggctctggtgtcctaggacaagttacttattctttcaaaatctgtttcctcagaattacaaacctcatggtatgatgtggattaaaaagtacatatttatgcaccactaacccagtgagcatttagtaagtgaatgctgcttgctattggcaaatttattgctctaaagagagcattttactgggctgagctcactgttggttctctctgtttcttccctcagcctttgcctgctaagagggagaccaggtcatggcagccatgcctctgaaagctcaataccaggtgagctgtggatccctgaggtcagctctatggaggtctgagttgaaggaaatgaggtggataaaggtgattctggcaagtcttagagccaaagcagtaggaaaacccctgctgattccctccagtaggactgggtgctggggaaagagctaggggcagtgaagatggaaacaggagagagtgatctggaaagctgaagtacagcctcctgaatactgagaatctctcctgggccagaggatccccaggttcagtagctgtccctctgcagagggaattgtgagaacgagggactcaggctggtgatgtagggatccaggataggatggaagtgactaagatcagcaagggcacaaggtttttgggaagtagcagcagagggacagcaggaagaagacaagaaagagggggcctatctaatttgtcctccaaaagaaaggaggaagtttgggcttcagaatcaggaaacatatgtccttgaggtcagtactgctggcgaagtgaggcaatgggctgtgataggaaaagtctacactcccaacaggacacctgaagttagggatctgttaggcctcagtggcatcatagccttgagccagtcacataattgctttgcatcttaactggattcatttgtaaggtgaacataagtaccttacatttttgggacagagaattgatttcttgaattacatttcactttttgagacggagttgctgctttgtcatttcttttctcctggcacttatttatccagtaacttagtatccatgaaccatatcccaaatcataatctcatatttctcacatccttcagttttctctacctgactgtgtcactgatatatcagcttccttggagctcccaccctcttctggtttttccacaagtgtctgacatcacactatattgcagtcctgatcactcagtttctaaattgctgtgtaattgttgactatgttctcccctgataccatttccagagagacacaaagtcttgttgtttttccttctctctctgccacttgtgccatctttcagattacatttagagtttgttgttccttctctggaattttgtttgcagcgcttcccggatagattctctgtgtatagttgtgcacctttccatcactttgtcacctaatacagctcagtttcctgagtttggattttatcctccaatccagggttctcagacttcagtgtacatcagaattacctggagggctcactgaagtatggacttctctcagagtggggcccaagaatttgcctaacaaattcccaagtgttgcatccgctactggtggtggtctggagaccacactctgaataccactgctctagttagtggtgattcattcaagaggttcattcaggagttgatgaagtcaggttgtcagctgggcagaggatagattcagtgtgggacaagactggaagtagagctaaagtgtccccagctgttgacctagtttactgattgtaccacagtgaagaagagtcagattccagaaataacgtaggtaataaaattggcaggacttgagtattaactgtcagcaatgagtgatgatgggggttagaatgtctaggattaatctgaagttctagcattagagactgggttgaaattggtgttatcaacagagagggaaaaatattgtcacactgccacttagtttatataaattagaaaggaagccattttggggaagatgagtttggggttgcttggtgagtcagtgtgttgggtcatccagagagtctgaggcagtgctgggatgagggggatgtggatatgtgcaaaatcagttgaggcattggaaggtcggagtgtattccctgagcactccggtaacgaagttcaataccaacatctgaggagtgaatagaggctctaaaccagatgccagaactttgtggaaaggtagagttgaggccagcagggagggagaagggtgtctgttgaaaaagcatgaggggctgggcatggtggctcattcccgtaatcccagcactttgggaggccgaggcagacggatctcttgagtccaggagtttgagaccagcctggggaacgtggcaaaaccttgtctctacagaaaatacaaagattagcctggcatggtggtgtgcacctatagtcccagctactcaagagtctgaggcgggaggatcacctgagctgggaggtcgaggctgcagtgagctgagattgtgccactgcactccaacctgggtgacagagcaagacactgtcaaaaacagaaaaaaaagagaaaaagaaccaaaaccgaaagaaagaaagaaaaaaaaacccaagaagcatgaggcttggttggcagaagctattacagattgtcttggagctataaagataaggagctaaaagagctacccagcagcagcaatttaattctagaagcatggttttctaggaaaagccatcaaggagcagagtggattgtgccaggagactctgagctccctctacaggatgctcttgagcacaggcagcccagtcctttatacaagaatcgaatgggagtcggatgagataggcccatcagtgcaaaccatgactctgtgcttgtttcatgggcataaggtttggggcagggtgaacacatgtggggaacagatagattggctgagaatagggagtacctaataggaataggtgggtcctgagataccatttgaagcaaattgtccacctgtaggtacaaaagtaaaagactgaaaatatttactaaatcaaagagatttttgccctaggaaggttaactaataagagactttttttcctagggtttaaaaaatgttaaatcacattttatgacagtcaattttatatcctaatggaatctcttctggtagtgagagaagttccagatttttcgttgtaaaaatagtcatataatggtctaatatccagttctgtcacattttctcattacctatccctcacaggactttccctcaagtccctacctgtcccctctgccccacactctggcccggagccagaggattggctctggggcagcaggaacctgttgttttaggagatggtgaccttcgaggatgtggctgtgcacttcaccaagacagaatggactggcctttctcctgcccagagggccctgtacagaagtgtgatgttggagaattttgggaacctgactgctttgggtaaggccattttcctcctaggactcagatctgtacttttccagtttccttccttcttttacagcctggggggaggagtgtggagtggagaggagaggttgtctcttgtgtcctccactgagtgactgcagagctgaggctcagtgaccaacttcaaagattgctgggtagggagaggtcttgggtcactttggtctcccaatgaagggaattactgtcccctggtaagagtatgttccatcttccaagaggctctgcacagtaaggaataagtagtagttgttgtctggggaagggcatgtccccttccctgtgtttgctcatgccttgtggatctcactgacttacttatccttgagtgttttttttaggaagaagtcacaaatgctcagtttcctgttgatcggaatctctttggccttctccagtcgagaaccctcttctgtgggtcttattcttactgagactcctggggttttccttcttttgacacagcagatacagggctgaaaagtaccattttcttcctgttttcagggtacccagttcccaaacctgcactgatctcacttttggagagaggggacatggcttggggcctggaagcacaggatgatcccccagcagagaggaccaaaaacgtctgtaaaggtaggtgaggcagatttagaaccaacaattgtagcgttttatggagcactgtattttaaaatgaatcatgctgggcaggatttaaataaaatagatgatttcacctaataggtaaaatatgaaacgtttctcaccaatcttaactcttaccaacatgtaatcactcagtacgtctcatctgcaatccttgaatccattgttcctttctgagtttcaacattgcctaccttagttgtcctccttggttgggatggatttattcaggagcagtttttgagcaacttgccatgtgctgaacgttgtttaagaagttctggcaggtacaagttatggagacagatgtaaaaagcgaaaaagaaaagtattaagtgctgttgggagtgggacggagaatgtgaaggtaaaatgggccagatcttcccaaaagttggccataaatggggagagctgagtcagataacactaggaagtcatggcatgggaggagctttttgaattcataggaattcagagctgagcacagggcgtgaggtgcctttagaataggcaagtggatggctagagcaggccattgagaaggtgggtggagagtctgagataaaaggcaggtctgaaacagtactctaacacagctgggttgaaacgatccccaggaagaaaaaatgaaggctgaatcttaaccattaagggatatttaatttcagtgagagaaggaagagaaagtagacagtcaaatagatgggggccaccaagagcaaacagtgaaattgaaggcagaggcaggagtttcagtgcaggtggtttgcagagagcaaatacgtggaaaataatgaagctagcacagcacttcagcctcttattctaagaatctgaaaaagaatcatcaagacaattgagaacctgttggtttgttctcacacgcttcctctgtctggtgattattctttttcagactcttggttaccttgtttacttcaatctcagattactctcctctgaacattctccttcggagttcccttactcctttaactcacactcataggatgaacttgattaaccatcacatgagtcccaggtaacccacattaatgttaaaaccaagcccatcatttcatataaaatggattgactttaactcatttaaaatgtcatccaatcttttggaacacaaatgccattttatgggctgtttgtctcctttttgctgataggagaaagaatactctcagtctgggtgtgtctaagtaaactgttcatcccttttcaaatagagagtctaggacagtagtttctctgcatgtttgaggttcagcagttttagggcgtttcctcatcgtctatagtccatgtgtggttctgcagttaagaacctctgaactaggtaatcttacaacatattgggaataatactctctaagcacttctgtgattttctttctctctgtcttgccacaacccagtgtctgtaatgttcagtgtcttaagtcttttgggacatctgcagggtatgagtttttaaaaagaacaacaattcatcctttgcctttgctttctgatactgttctgtttcactttctgattctaagtcttgccagccccgatgtcactacttgttcttaagacctgtgccttctttggcattttgtaggctgtaagtagcatcaattcaaaagatactagctcatgccagggatgaccagacatcattcaaatattagagtagaaaagcttaggaagcagtctcgtgtgttgtgtccactgataccctgttccacctcaatgttctctgcctgtgtgatatttggcactttcactttaacagccttttcttcccagcatgctgatgtgaaagttgaaatgatctcttttaaagccttatcattttcaatgctctattatttctagtatagttctcaggtggcattatttgtgttttctatctcttatgtcagatgttgagaccaacattgacagtgagtccacattaatccagggaatttctgaagaaagagatgggatgatgtcacatggtcagctgaagagtgtccctcagagaactgacttcccagaaacacgtaatgtggaaaagcaccaggacatccccacagtgaaaaatatccaaggaaaggttccaagaatcccctgtgcaaggaaacctttcatatgtgaggagtgtgggaaatccttcagctacttttcttactatgctagacaccagagaatccacactggggagaaaccttttgagtgtagtgagtgtggaaaagcctttaatggtaattcttcgttaattcggcaccagaggattcacactggagagagaccctatcagtgtgaggagtgtgggcgagcctttaatgataatgcaaatctgatcaggcatcagagaatccacagtggggacagaccctattactgtacagagtgtgggaatagtttcacgagtagttccgagtttgttatacatcagagaatccacactggggagaaaccctatgagtgtaatgagtgtggcaaagcttttgttggtaattcacccctacttcggcatcagaaaatccacactggagagaaaccctatgagtgtaatgagtgtggcaaaagctttggaaggacttcccatctaagccaacatcagcgtattcacacaggggaaaagccttattcttgtaaagtatgtggacaagccttcaattttcatacaaaactaactcggcaccagagaattcacagtgaggagaaaccctttgactgtgtagattgtggaaaagccttcagtgctcaggaacaattaaaaaggcatctgagaattcatactcaggagtcttcctatgtatgtgatgagtgtggaaaagccttgactagcaaaagaaatcttcatcagcatcaaagaatccatactggagagaaaccctatgagtgtagcaagtatgagaaggcctttgggacttcttcccagctaggtcaccttgagcatgtctactctggagagaagcctgtgctggacatttgtcgttttggcctcccagaattttttacccccttttactggtaatagtacactccagtgaaatgtactgagtggattccgtcttctactcaggaatggaatgtgtgacacaggcctgactcagcctctgatccatccctcaagccacagttaatgattcagatgtcagtagatgaccaaagatggttcaattagagtcccaggattgcaagagctaataggaacaaatactctccccccgcccacccccattggttttaatgctgagaagaagaactagactcttacagaggtgagaatgaagtccacacagcaaaaatgcatctgagaattggagagcagtaaaagactgaagataatgtttgaacagccacatacaccatgcctgaagctaaaaatatatacgggtttttgaattgcagcagccaataaattccatttttgtttggttggttttggctttggcacacctgagttaggttttcttgccttggaacagaattttgacttaaacagtgttgtcattgtagcagttgtttgaagttttcagggataacatacctgatggagaaatgttttgtgtgtatgatatatgggaaagtctttagttatagtcatggcagctcctcaaccccatgattgtgatgagattgggaagcccactgtaacactggagagcccaggttatatcagacaccactagtagatagaagttctaacaacttgagctctgtaacaaaaatctcattgtactacaaaattatgtctgcaccagtgaatccattctcaagaaaagtcttaactaggaaactaaaagctttcactcttaaagctttcattttctgtttattcagttttttatttggaatggatgctactctaggccttaaactgagaaatgccaggctattgtagctattatatcttggtatttgccattttaattcctaggacagcacgcccgctttgcccttgacctggctagggagccaaggaaatgccatggttcttggtcataagacacactgcagagatctctcagtaggaaaacagggctggcccttttctttggtgatgaacacaaactgcaccctttttttctcccacgtgtccttccgctgccagccagtgttggaatctccctacccaattccagacttaattgcttactgcgtctagcacctgggtggcttcaccacctcttccttacttgtcagcagatgaatgagcagttgtatcatgtgcttgggttgaccaatgaatgatagacttggggaattgagtaaacaccttttaattgaagtataacacaaacataaaaatgcatgagtcagccaggcgcggtggctcacacttgtaatcccagtactttgggaggccgaggtgggcgattcatcaggtcaagagatcgagaccatcctggccaacatggtgaaaccccgtctctactaaaaatacaagaattagctgggcgtggtggtgcatgcctgtagtcccagctgctcaggaagctggggcaggcgaattgcttgaacccgggaggcggaggttgtagtgagccgagattacaccactgcactccagcctggtgacagagtgagattcctcaataaaataaaataaaaccatgaa

SEQ ID NO: 396 - DNA, 55396 bp, Homo sapiens
  source 1..55396: mol_type = genomic DNA; note = NC_000012.12:c10674318-10618923 STYK1 [organism=Homo sapiens] [GeneID=55359] [chromosome=12]
atcgtgactccgttttcacctggactggagtcaccgtgatacctgacatctagcaatcactagagtaggaaatgagtatagatcagcaacaagtccagcctttacagttgcagcagaggtttcctgtggctcgagtgtggcgagtcccggaaacctcggagcccgcagacttcccttcgcgggagcccgcccgaactccatcctttgccggcagccacgccccgcagtgggaaggagggactgaaaagcatttccttgaggctggcacaccttgccctacccaaccctgtcattatttcccctccgactgggccggtgccatcggaaaccggagtgaccagaggagggacacggtagtgaacggggtatggggggcgggcgcggcggggagggtaaagaaggtgggaagggaatggcagcgaggcagctgggggaggactttgcagttggggagggagaaaaagggaagaggctgggagcggaacgggtgtttatgtgaacaaacagaaatcaccaagtgaattaacctgtgtttcttcggaaccagcatcttgtggggtttggcttctgtgtttctatatgataagggagtaaacctgactcagcagatttggtgcagagagaaacatgagaaaacccaggaatgggggacctctgtttattcctggagagggggccatcaggagagggggaagggaaagaatgaggttacaggaattacttgtcagaggactgcatagcctttcagaccatggaatcgttgctttcagcttcggcttcctcatctgcaaagcataaatacggtaattactttccagggttgttgcgatatttaaatgagatatcaataaccatgctttaaaagtgtacagcctgatgtgctatcccttgttgactgaatctctgttttctttccttctttttatttggggtggggagtgggggagggagtcttgctctgtcactcaggctggagtgcaatggcgcgatctcggttcactgcaacctccgcctcccaggttcaagcgattctcctgcctcagcctcccaagtagctgggattacaggctcccaccaccacggccggctatttatttttttgtatttttagtagagacggggtttcaccattttagcctctgttttcttttcaatgtcttttttcctctttcatttttctctatcaacccttcatcccccctttctttctttcatttatgcgattgttgcttccttctgtaatgggtcctctccacattggagtttcttatacctatgagaccacacttccttcccactcggtgggaagtagtggcaataaaggagtcgagttactgtaatgtgcagcacagctcaactgaaatacacctggaaacagaactctgtgctgtctacctggtttttccccctcaatgcaccggaatctccactgacagctagctagggggcagctaggtctttcaatgagacatcatgaagtatttgcttcaatgaaaatcatatactttttcgttcagtgcctccattactgtgtgagtttgctagggctgctgtaacaaggtaccacaaactgcatggcttttggcaccaggcaccagggactgattttgtggaagacaatttttttcacagatgccgatgaggttggcgggagatggtttcagaatgaaactgttccaccttacgtcatcaggcattagagtctcataaggagttcgcaacctatatccctcacatgagcagttcacaatagggttcacgctcctatgacaatctaatgctagtgggcacggtggctcacacctgtaatcacaccactttaggaggagttggtgggtggatcgccctgagttcaggagtttgagaccagcctgggcaacttggcgaaacccatctctaccaaaaatacaagaggaagaaaaagaaagaaaatctaatgtcgtggcttatctgacaggaggaggagctcaggaggcaatgacagcgatggggagtggctgtaaatgcagatgaagctttgctggctcacctgcctctgatttcctgctgtgcaccccgtacctgtcggcgccccgggtgttggtgacctctggcttaaacaacgaaatgattttctcacagttcagtaggctggctatccaaaactaacatgttatgaagcctgcatctattccaggcctctttctttggcttgtagatggctgtcttgatgtttatatggtgttctccctgtatatatgtctctgaatttcccctttttataaggacactagtcttattggattagggtccatcctaattacctcattttaattgattatctctgcactatcatctcccaataaagttacattatgagttactgggggttagaatgtcagcatattaattttgagagggtgtacagttcaaccctttaacaactaatgtctttaattatgcacaagttagttgagcattgcatgtatttcagttttctctggcagaaactatttcccacctgtcccaaaccctcacaaccagtcccaaccaacatgtgctccgaagatctgccaggagttatgtgattctgcagctctgttttcttttaacctgagtgtgtacatttcctgttgccactgtaacaaattaccacaatggtggtggctttaaacaacataaagttttatcttacagttctgggggtcagaagtaaaaatggatgggcaggtttccaaatggatggttctttttggaggctctaagggagaatcaatttccttgcctccttcagtctctagaggctgctacagtccttggctcatggacccttcctccatcttcaaagccaggaatggccggtaaagtgtttctcatgtcttatgctgacgctcacttttgcctttctcacacttaaggattcttgtaattgcactggactcactgagtattccagggtaatctttctattttaaggtcagttgattcattccatctgtaaccttaattccccttcgctatttcaacgctattaaaaatcaacatggccaggcgtggtggctcacgcctgttaatcccagcactttgggaggctgaggtgggcggatcacgaggtcaggagatcgagaccatcctggctaacaaagtgaaaccccatctctactaaaaatacaaaaaattagctgggcgtggtggcgggcgcctgtagtcccagctaatcagaggctgaggcaggagaatggcgtgaatccaggaggcggagcttgcagtgagctgaggtcgcgccactgcactccagcctgggcgacagagccagactgtcaaaaaaaaaaaaaaaaaaaaaatcaatatattcataggttctggagattaggacatggacatctttgggaagccattattctgcctactgtacctgagctttcccaactgggtattctttatttttattatatgtatatttaaaatttatgtttaattaaaaaaattaaaaattatatatatatttatcatatacatgttgttttgaaatatgtatatattgtggaatagttaaattaagctaattaacatagtattatttcacatatttttgtgatgagaacacttaacatctactgtcttagcaattttcaagaatacaatacatagttattaactgtagccaccatgttgtacaatagatctcttgaccttattcctcctaacaaggaggaataaggtcataccctttcatatcctttgacgtctttctaacccctcgaattcccccaacctctggtaaccatctttctattctctacttttatgagttcaactttttcagattctacatataagtgagttcctatgatatttttcttttcgtgcctagcttatttcacttaacataatatctcctgggttcatccatgttgtcaatttccatttttcaaaaggctgaataatagttcattgtgtttatactgtatgtatttatactttattcatttatccattgatggacatttacattgattccatctcttggatattgtgaacaatgctgcaataaacatggcgtgcagacagcagtatgtgaaatcagacacactgatttcattttcttgctatctatacacagaaggcaaaacattgagccttcagaataaaagtaagataatatactgaataaagaacattatatacaaaagtcagatcactattggatgtataccgaatagtgggattgctggatcatatagtagtttacttttaattttttgaggaactttcatactgtttccctaacggttgtactaatttacattcccaccaacagtgtgcaagcattcccctttctctatatcctctccaacacttatttttcatcttttcgataatagctattctaacaggtatgaggtaatagctcattttggttttaacttgcattttccctgatgatcagtgatgttgaatattttttcacatatgtgttggtcatttgtgtgtcttcttttgagaaatgtctattcaggtcctttgttcatttttagtacagttatttgttttccccctattgttttagttccctatgtattttggatattaatcacttaccggatattaatcacttctcagatatttctaccattccatgggttatctcttcactctgttgattttttccttggttgtgcagaaattttttagtttgatgtaaccccatttgtctatttttgcttttgttgcctgtgcttttgggtttatgtccaaaaaaacattgcctagcctaatatgatggaccttttctctgtgttctcttctagtactttcacagtgtcagatcttacatttaagtctttaatccattttgagttgatttttgtacatggtgttctttattgagtatattatctatttttattctgaaggctcaatgttttgcctgctgtgtatagaaagcaaagaactttaaatcttttttctgaagaaaaacaacctgcttaatgatggaacaaaaaatgtgtccctatcgaacagaaacctgggtaccatgtacttgctatatatactgttaaaaactactccccattcccccttgtacttttagtattatagcttaatcctttatgccccattagtttctataggttatttttctataaaaatttcttgcagatccaatgctattttcatagatgaattagctacttatttattcaacaatcatatgaattctgatatatgccagacactgctcttggtgctagggatacagcaatgaacaaaatagctggtccctaaacttttattcccatgaaggtttcatgctttttcttcttcctttgccagttcatttttgtcctccccaccagcccaggctcagccagtctctagttctccaacatgctttctgaatttagatgtggctactgttctgtgcctacttctgggctgggctaatgagggacctaaagaagctgactgtgctctccaggaaattaaagtcttgttgggaagaaacagataataataggcaaactggttaagtactgaataagtaggttgggtattagatatcatgtcttggcatagtgtctaactggagaaagtgaaagtagaagggaacgaatgtgcacaaaggtaaagaagctaattacggctgggtgcagtggctcacacctgtaatcccaacactttgggaggctgaggcgggcggatcacctgaggtcaggagttcgagagcagctttgccaacatggtgaaaccccatctctagtaaatatacaaaaaaaaaaaaaaaaaaaaaaaaaaagccaggtgtggtgacaggtgcctataatcccagctactcgggaggctgaggcaggagattagcttgaacctgggaggcggaggttgcagtgagccaagatcgtaccactgcactccagcctaggcaacaagagtgaaactctgtctaaaaaaaaaaagaagaagaagtagaagaaaaaacagcagcagcagcagcagcaaattacacagacagacagtgtagagtggacagagtcctctctcagtccgggggacctgaaatccgttttaagctctggttctctctttgtgagcaaacagcaaggcacctacctcaggggtccttagttgttttattattatttttattccttttgaaaaatggagggtagagtttgactgggaaattgctggagattcttccaggttaaaaaaaaaagtattttattgttgaacttctcagaatttctttgagatttctaaccagaataataataagatagtttagagtttagaagagacagtcacctctggatacagaaaggataatggggatggagtaaggggtttctatccatccgttggcttaaagcctcatttcctgcagttgttctcacctcctcagcccaggtgtccttcttcactagcttttcttccctataccttctgctgaattgggcagttagagttcagccctatcatattgtgaatactacctcctaagggtgagtcttcaggaaacataaacatttcctgatgctcactctttccttagcccccagcagtctaagtcgtatccaagcttctgagcattatgtgcttccctgaaagccatctcaatcagttttctcatatttctcattcataataacccttcttggcatagtgacaacaaggaatatcaacagttaatttgttttgttttgttttttgagatggagtcttactctgttgctcaggctggagtacagtgggatgatcacagcttgctgcagccttgacctctcaggctcaagtgatcctcccatctcaacctccccagtagctgggactagaggcatgcaccaccacgtccagctaatttttgtattttttttttttttaagagacagggtcttgctgaagaccctggctaaccaggctggcctggaactcctggcctcaagtgatcctcatgccttcatcttccaaagtgctgggattacagaagtcagccacggaggtcagctgacagctaattcttaacaattgacatggtcagagcaaatcgaaggtagtgttttaacttttatgaccccaaatttatatttttatgctttaaattactggctaaaataaaaaatgaaaaggaaacctgttttagttttttcctctgtagctgttaacctttataacctcaataactagctccatctttatacatttaagggtatttttaaaaattgttagataacagtatataggaatatggtatttttagaatattgatctaaattaaaattatgtatataattctaggctaagttagaattctagtaagacacagtagtaaatgccaaaggtttaagggaaaaaacatgtttcaaactatgcattgtggttatagaaaaatctcagtaatacacatgtgtactagtcctttctcacactgctataaagaactgcccaagactgggtaatttataaggaaaagaggtttaattgacttatagttcctctgccttataagtttcctcaagaaacttataaccatggcagaagaggaagcaggcacgtcttacatggtggaggtgagagaaagcatgtgaaggaagcaaagggggaagagccccttataaaaccatcagatctcgtgagaacttattcctatcacgagaacagcatggtggaaaccgcccccatgatccaatcacctcccacccggtccctccctcgacatggggggattacggggattacaatttgagatgagatctgggtgggaacacagagccaaatcatatcaacatgtaatatccacatatgaagtcaggtgcctttctggaaaaagccttgaaatgattggttttagttgtacactcagacattgaatgatttaaccagatgtactgtgttgtgggagatgaatgcagggtttgtgttggacaactttaggagacagtattatgttatattcatattatgctaccaaataagtggtgaaaaatatttgccaaaggtgctaatttggtgtttagagaagttgatctcaagtgcttattttttctgacaatagtcagctatcaggaccaattgtatgtcaagtcacccctagtttgtgtcagtgaaaaaaggcttaaaatcaacttctccaaagtctctgttaagtcagatcaggctggcttcacttagacaggaaaagctcctggttgaccctcacctacatgctctttgacacctcttcagcctgggcccaaatttagtaccacttctggccagtaagaagctataacagcaagaaaggacttgtttagtggtagaattaacaggtttggcttaaggaaggaggagagaggcaaacggaatgctgaaaattgatcctgacttccctgtggtgagatttattctataagacttattcgcagattccacaaatccagcccatctgatgtgaaaccacatggcttccctgactcctacttctgtggtctttcctcacagggctcaaggcctggctcctttaacttaccttggggctgatatcttagtataagtcagagtgagttctggctgaggaagaaaaaagaagcagagtattaattagaatattcttaaagctccatcaatgaaaacacagctgggatataaatattgtagccttcatgtatctggtagagattggcagaggctagtctggacacatgtgcatcccaaagttccagaagaaactgtgacagtgtatgcacattgtgaattgcaagggccaggatcttcttcctggttctcatccctacaaaactcaactgaaaaaaatagatggaatatccagtcagccttatgaagggtgggaaagtgtagtgggaagagcatcagatggagattcaacacacaatgcttagctgctaattaactgctgggaggtgtctgaactctgtgccttaattcccccaccagtaaatttggaagttaggtttttgttgttgctttcaaagcacccttgtacacatagggcattctacggcatttgtgaagcatgctctgcatttcatagtgtatttgtcaaagagatcaagaaatagacagcagggttgctgttcttacattttttgtttctgtaacagggaggtgtgatcatagtggtacagaaggcatgggatggttacctcatttacagcgtgtgaacggcatggctttctgacactgagagttgaacctgctgtgtttgcgttctttcttgaagcccaagcagctcccataaccccaagtgaccttgatttcactctctgtctcttttcctcacccatatttcatacttagggacagtctaattaatggattcatgattggaaggtcccacatctgattagatctctgattcattttctgacttatgcatgtcaccttttcacttaaacttggtttccacatgcaatatgaagttggtaaaatagccatgaattattatgaaatgatttcctattacaaaaatggggataatttggaaaaatattccagttttgcagcattagaaaaaaaggagtgtaggtaaacctaatgtgatttataactacaattataatctcccctcccacaccaaaatcatttttctaagtctgcttttttgggggctaacattaaaacaaattattcttaatttgctgagttaacatttactaggaaatagagacaggctcacttgaactaaggtcataaaagtatgaccttaggatatctacaaacagacggacaataaagatttggcagtatcagcaagacataactagtgacaggttgtgggtttataaatattcagatagtgtgtgagatcgattgctcacaaaaagaagttcattgatccttggcatagaactctctgttctgtgctagatgtactagcatctttacacctgagtttagggtttagaggtgatattgggggctgcatctttgtggacttttactagaatctcagtcagacatattttgggtgcctagggagcagtggtctctgtaggaggatggataaatagaagtatttatattaataggaagttagggatgtgaattctttggacacactctcttgtccctgcaattcatgacaacctgagaaatttagatcatcccttgtggtctgtcaggggaaaatgagctgggttctgacaccaagacaactacagaacgtagtgccctatattctgtctacttatccaggtatgagaaggatcaacagtggccttatattacaccatgctgcttcacatagaatgcatttctggctagtctctgggactgggaggcatttgttgcccgacctgttctaggacagattctttcggagacagaacattctgtggtctcaccaaatcacacacaaattctggtttaacctttaaaggccatggaactataaagtttattatcaacaaatgttacttgtacaccaaaaactacaaaacatcccaagtatccttgaaagaagctaaagaagacctaaatgaatggaaagacatatagttttcttaactgggatgacttaatattgttaagatagtggtacgccccaaattgatctacatccttaacataatccctatcaaaattccagcctttttttttttccgaaatggtcaaagtgattctaaaatttatgagaacgcaagggagtcagaatagccaaaacagtcttgaaaaagaacaaagttggaggaatcacacttaatgatttttttttttttttttttttttttttttttttttttttgagacagagtctcgttctgtcgcccaggctggagtgcagtggcgccatctcggctcactgcaagctccgcctcccaggttcacgccattctccttcctcagcctcccgagtagctgggactacaggcgcctgtcaccgcgcctggctaattttttgtatttttagtagagacgggtttcactgtggtctcgatctcccgacctcatgatcctcccgcctcagcctcccaaagtgctgggataacaggcgtgagccaccgcgcctgtaagttttaatgattttaaaacttactacaaatctacagtagtcaagattgtgtgggctgggtgctgtggcacgtgtctataatcccagctacttgggaggctgaggcagggggatcccttgagtccagagcttgaggctgcaatgagctctgatcacaccattgcactccagcctgggtcacaaagtgagacattatctctagtaataataaggctgaaaagactatctttaatcataataaagagcagaaaaagattgtctttaacaaattatgctgggacaattggatattcacgtgcaaaagaatgaagttggacatttacctctaattcaaaatgaaccaaagtcctgaatataagaactaaaactatgaaattcttaggaaaaacctaagtgtaaatctttgtgatattggttgggcaatggtttcttagacacacgtcaaaagcactagcaatcaaacacaaaactgtcaaaattagaaactattatgcttcaaaggacattatcaaaagtgaaaagacaacatacagaatggaagaaaatattgcatatgatatatctaataagggtttagtttctggactatatactgggtacttacacaataaaaagacaaattgcccaatcaaaaaaaaatggtaaaggatttgaatgtacatttcttcaaagaagatatacaagtggccaatgagcacatgaaaagatgttcagcattatttatcatcagggaaatgcaaatcaaaaccacagtgagatatcatttcataccaactagttgggctacagtaaaaaagacaaaaagcaagaagtgtttgtcaaggatgtggagacactggattccttataaattactggtgggagtataaagtgatgcactcactttaaaacacagttgtcagttcctcaaaatttaaacatagagttaccatatcagcaatttcactcctacatatataccaaggaaaaagtaaacatgtccacacagaaacttgtatgtgagtatccacagcagcattttttataaatgtgaaaaagtgaaaactatccaaatgcccacccactgataaatggctaaaacagaatctgtgtatatccatacaatgcaatattatttagcctcaaaaaggaacgaagttctcattcatgctacaacatggataatccttgaaaacatttgcaagtaaaagaagccagccagatacaaaagtccacatactgtatgagtcaatttatatgaaatgtcctgaataggtgaatccataaagacagaaaataattcatgattgccaggggctagggaagggagcagagtagggaatgattgctattgggtaggggtttctttctggggtaacggaaatattctaaaataaggtagtggtgatggttgcatacttttgtgactataataaaaccactaaattgcacactttaaaaaggtaaattttatggtatatgaattatatctcaatttataaaacacaagtaatattaaaggtaattctaattttgcaaaaaaatactagtttttgagaatttactggacaaacagtataggacagatttttaagccaaatgatctgggttggaatccatcttcactgcttactagctgtgtgatctggagcaacttacttaacctctctctgtgccccagtttcgtcatctggtagaattaaatgactaaatatttgtgaagtgcttggaagagtgcctaacacatgactaccactatataaatgtttgctgttataaccggtgccataaactgtactaggtaatagtgggaatcaaaaccagtatcaaggaagtttgtgttaaagacaaatatcagttaaggaatagcagagcagggtggattccaaagcagattgcttcacttggtttattggctggactgtgctccatgcagatgtgtgaagagtctgggttttgtgcaagaggaggaagagatgacacggatcaagaatataacatctaaattttgccatcttacttgggtcctgggaaaaggcccaaaattatgttagaggggacatatggaggagtagcaaggaatggttaacagcacttaatatatatttgttgtttaatgtaaataaaaattaggcaaaaacttttcaggattttcctctggaattttgatcgtaaactcatgatgtttctcctcctgttctgatttgaagattacttttttcttgagacgtttttattatttcatttcaaaaagtaaaggtcagactgttaccagaaaggggtcccaattcagacccccagcagaaggttcttggacttcactcaagaaagaattcagggctagtccatagagtagagtgaaagtaagcttactaagaaaggaataggcagagcagcggtgtgggttacttgactgagtatatttatagttatttattgattatatgctaaacaagcagtggactgttcatgagttttcagggaaagggatgggcaaatcccagaacggagggtttctcctctttttagaccatatagggtaacttcctgatgttgccatggcatttgtaaactgtcatgacactggtggcagtgtctcttagcacgctaatacattataattagtgtataatgagcaatgaggatgaccagaggtcacttttgtggccatcttggtttaggtgggttttggcttgcttctttgccacattctgttttatcagaaatgtcactgtgacctgtatcttgggctgacctcccatctcactctgtaactaagaatgcctaacctcctgggaatgcagcccagtaggtctcagcctcattttacccagttgctattcaagatggagctgccttggttcaaatgcctctaacatatttccctcctcccctttacaaggggacccttaatcctaagggttgtagagggatgacgatccatcttctgtaacttcttctagctgaatagtggcaatgatattgatacctaactattagtgttttttgtattcagggtagagagaagcttggtcagaaagtatcagtatggagagggccattcataactcttgatttcccacaaaaggtaatatctggaagattaataagtgttcaatttaagaaaacattcagtaagcttatactgcattcctacacaaagggtacaaagcaatatattctgcaagagtagagcaaaataagcaaaactatcctaagtaaactaacaaggctttttgtgaagtgggcaactgttagaaccaagatgatatgtggtcactaactgattccagtacttgcccagaattagaatactgatccagatctttatattacccatccatcttgtttcttctgagctgcagtcagagatcactggttgatttacaggaataagcagggtcagtctaaattgcagaaaaaaactaaaaactgatgggactagaatctaacaacaggtgtaccatagttcttgaaacacaatttttctatctcctcatttttactaaagacaaatcataatagaactgatttgtttgcaaaaataagctttactattatacttggcctgattatttatatgaagttcagcaagaataattatttttcacataggttctttttaaattagctctgatgaaactttattccataagtaatttcagataagacttttaaaaaactccttgagctcagccatggttttgtaccataaaatacctaggagttggataaattctcctcctcttgaggtcacaagataacttgcctcctgggcccatcagaaaatgacattcttcacttacaggaaccctgtacagggactacatagacaaggtatgaggccagttttcctaaggagcttttattgactctgtaagtcaagtttgattcctcaaaggaaagcactctatttcagtcaaagacttggtaataaaaacagtttatccagttgtgtcctgttgcaaaagaaagcattctttttgcaattatgcaaataactatattccgtaagttaagcatactcacaaatagtttccaaattctggagaaatcagatagagagaaatatgctctaaaattttgtttacaggagtattgccacaagctacagataactcaaaaatgttcttgactctgaaaaacaaagcaaagaattagcaatgttttaagcaaaaagtcataaaaggattatttcagtctttcattagttcagtccatgcagttaactcctgttctgtttgatattcatgaacatttcagctctccgtgagaatcatgaaagttttcgcctctatcctaatgtcacaatctccaaagttatcagaaacctgcattcaagagcacctgtcaaatcctgttactgactataaggcacctttaaaagaggatcaaaacaagacaacagttgtctgtgaatgacagaaagtcttagggcagccacagtcagacatgattaacaaggaaatatggttacctctgtggcacacaataatattatgtaacaattataattactaataacatactaagtcatattagaattataggagtttcccataattttgggacacataaccaagaacatatttattcaaatacagcccaaagaaagccaaacacaattttatattttataatgcttcctgtatgatttctacagatttttataccacattaagccaaatatgtctcttctggactttaggggacctaatacgaaaagattaattaggtcagaaaaagacataatttaccatttgattttggaaagtttgtcaaatattgaaggtttaaccacttgattattagaaacatagaatctcaggtcaccgtaagtcattcatttagccaaaacgataactcaaaaattttaaaaagacaaaaaactttactcattaatagagggaagacagctttccacacaatgtctcttttccttcctttctttttcttatagtttattcaaaaggcaaacaaaatttcgtttttaaaaatattacacaaaaatcttattcaagagagaaagccagattttacagtgtactgttaatgtcaatcccaattcttaataaaacattatagacaaatctattcaatcgtaagcagttagaccaagaggtaagattcccataaacctttttaaactctttacaaatttttgttaaggagcagatcactgctctaagaacaccctgttgtgcttttattccaatgttcaatttacagaaaaactgaataagacccctttaactttagccgatatgttcacacagaatttccttcacaagattaatttttcacaaatcttccacaatttgctcaaattttcagcttcatcctaacttttaagtgaggataacttaacttagaaccccttagccttctaaactaggctaaaaaaaattcacattcccatgccttcttataatcttttaccaaaaacacatttcactttccttacacaccttgcatgttaaaactgtttttccagtagtctcaattatatgttacaatgttaactcttagcaacttttatttttggtgcaaaacctggtaagtaagtgattttaattaggtactaggtgtgaagcctaggacaccagagagaagtacaagataaggtctgattctttccagcattgccagggggcatgtctaattctacatatccccaggacttatctagaatctaatggctctaaagcaggtataccaaacaattttcaaaagtcaaataagcagtttatgaccttaaagtatttagcaaatctaattatctgatctgcctaatttagaccaaatgtctaaatttggaagacatttttattttaccaataatctttaaaactgtctttatttcccaaagcttcctaaagtcacatgaactaaaaagcattacagtttttatttttctgacaaaatatttaagtgcttattatttttaaaccaattaatcagagctctttcatatataaatgttacacatacaacacatatgactacacaacagacagaagatccagtagttgtaagatttttcatttgccaatttttaagtttcttaattgaattactggcttcagggaggagccctttgaggaacagggccaggaaagcatgcaatttctagagcctaataggcaggcacagctggaaggcaaaacagatttcaaaaatttaagggtcccatttttataccagatcttggatcccaaaaaagaggaaatcagcccacctcctatggaactcttatctctcagtgtggcaatggggacacttccagtatcttccaggtggtcaagagtatgcttctctgatccaaacatgcaaagagttaagtatcccccataacttccattagccatccctaaaagtatgtttcctacctagttattacaaaccaaagctctctcataataagaagtaatttctgatacccacaaaagtcaaaactgtcagataacacaatacaaaatgaaacaaagcattagattttgagagggatttatttatcccctttcaattctagtggtttcataaggaaaacagaggcttttttccaaaacaggatctgtggcaactcctctgtttttcccaaggagtctcaagctgttagaaattatcttagatcccctcatgtgtatcaagagtggcaagaagataaaacggagaaaaacaattgtattaatcccttgtttttttgttttttgttttttgttttttttgagatggagtctcactctatcgcccaggctggagtgcagtgacgtgatctcggctcactgcaagctccgcctcccaggttcatgccattctcctgcctcagcctcccaagtagctgggactacaggtgcccaccaccatgcccagctaattttttgtattttagtggagacagggtttcaccatattagccaggatggtctctatctcctgacctcgtgatccacctgcctcagcctcccaaagtgctgggattacaggtgtgagccaccgcactcagccctgtattcatccattttcatgctgctgataaagacatacctgagactggacaatttacaaaagaaaagctttaatggacttacaattccacgtggctggggaggcctcacaatcattgtgggaggcaaaaaggaggagaaagccatgtcttttgcctgtgggcgacaggcaaagagagagagcttgtgcagggaaactcccacttttaaaactatcaggtctcacgagacttattcagtatcacaagaacagcatggtgaagatctgcccccataattcagttatttcccactgtgtcccttccacaacacatgggaattatgggagctacaagatgagatttgggtggggacatagccaaaccctatcaacaatttagtcaactgagaagaaaaaaactttttcctcagagaaataagatccaagaagagaaaaaacataaaaaccttttaaatatacgtatagctcatatatcttcttttaattaaagctgacttttaaccatagcacttcaaaaatgcttttaaatctcttattacctgacttcagccaggccacacaatccatttttctggcttttaagctttaccaaaggtaacctcccagatgaaaccagtaagctttcactaaggttatgacttaatcacaagtgtaccagtattttaaaagagatgattagcagtttttacaagatttagagtctacaaggtgcctcagagaaaggaagattcaagaagggaagatagaagttgttcatggggggaggggataaaatcaacaaatggcaaagatcacaccaatatcaacctgaaagtactcattccctaaaccagaaattgaacgctgaaccagggatgccattgtgaaaaggcaaagccttagctactaagctacagcattgggaagtttccattgccttctcagaaagagcctggagcagacaattttgagccaatgaaggcttttaactgctcaaaacaatttttagagctaactttgtcataaactccaaaattgctgtcctctggatggcagaaactaagagaaagtactgccacatggttacaaggtcaagctcccaaggatataaaacaagatgagagagaaaccctatctagcttatggagtcccaagcctgtgttctatcccaaggtacctcccctttatgacagaataacacagaaagacaaattcaaagcacaaaatacaccagattcactacagcattaagactagcctcatgaatccttttattcattaattaaaacgttgcaagagagtgatttctaccattcctacaactggtttgtacagagagggaggaaagggaagggataaaagtgttgcctacagtggggtggggaaggcaaggagctcagagagactaggtagtgaaggatcttttctagcagtccagtcagctctcaagtttcccactttggggagaaaaaagctccccgtgtctggtgatcctgtacatgcctattcctgtcatccatatctgtcagcaaagagtgcaaggcagattaatccaaagagaatagcagttaacatcccatagtgtcaaatccacttttaaccaagaaggactttactgagaggggcctctaatccctaaatcttaggaaggactctaacctttctaaattgggcctcaaactcaagtttcattaagcatccttgccttttattaggaggggccttaaccctctctgtcttaggagagactctcctaagttggacctctaacccaatctgatcctttacctgggcaaaacataccccgccccttacctaaagtctgccaattggcagtgctgtggtctatttcctttgggtccataggattctcctcagtatagtcccttcatggtttccaggaagatgttattggaaaggggtcccaatccagaccccaagagagggttcttggatattgctaaagaaataattcagggtgactccatagagtaaagtgaaagcacatttactaagaaagtaaaggaaaaaaggaatggctactccacaggcagagcagcagtgtgggctacttgactgagtatacttagttatttcttgattatatgctaaacaaggggtagattattcatgagttttctgggaaagggttgggaagtgaaggttccacccttttttagaccacatagggtaacttacagatgtttctgtggcatttgtaaactgtcaggacactggtgggagtgtctcttagcatgctaatgcattataattagtgtataatgagcagtgaggatgaccagaggtcactttcatggccatcttggtttaggtgggttttggctggcttctttacttcattctgttttatcaacaaggccattgtgacctgtatcttgtgttgacctcctgtttcatcctataactaagaatgcctaacctcctgggaatgcaacctagtagatctcaaccttgttttaccaagcccctgttcaagatggagctgctctggttcaaatgcctccaacaaggccagtctttaaacattaatgcagtgccacgtttttgttcccaggacaagtcaagaatccatgagggtagcaggtattgctagcaatattcatatacctttgctttaaactgctttctgtatcagtcggagcacatctacacttcttgatgttcctgtagctctgactctttctgtcaacatacaggatgtacagattgtactaaagggactggaaggactggattttgaggaaatgatataaggtattaaatttcttgcttaaaatgatagagaaaaactcttatccaccttttctcaggttttacacttctgaattctcatatgtaaatatattttatatatcttagtttcattatagttctactttcttgggtactcctcatgaggtatcaataaataatcataagatcttgtatttgtactgattgttatacatctcaaatactttacatgcaactctctagaaaaggtatgttaattgggccaggcatggtggatcatgcctgtaatcccagcactttgggaggccaaggtcgagaccatcctggctaacatggtgaaaccccgtccctactaaaaaatacaaaaaaaaattagctgggcatggtggtgggcacctgtagtcccagctactcgggaggctgaggcaggagaattgcgtgaacccaggaggcggagcttgcagtaagccgatatcacgccactgcactccagcctgggcaacagagtgagactccgtctcacaaaaaaaaaaagaaagaaaagatatgttaattgacttgccaaaggtcacacaggaagtcattgacccagtgtcataattgagatctcctgactcctttccctatttcaggagaagtttcttccttttcaccaagcatttctcctagaactttccattgagaaataatttaggtgaggaaaacaagatgaatttcagagcggagggaagttgaagccaaagtgaagattactgtcaggacctcatcgtactggagactatattggtgcaaatatagcattattctaaagttcatttatcttagattttttccagagtgcatctcatattacctctccttagactcgttaacctttttctttctaagaactataagtagtgatctaagacaagataaaaagtgtggtcaacaaatgatacggccttgagtaaagttggcttgaaagtctgtgaaagaaataccaaagcctgaaggatttaacagatcctcaagttattcagcatagaaaagctttacttcaggaagcaagggtacttcagaagagatggccttgcgcctgtctacatgacaggagagggaaggatgtggggaatatgataattcttccttggatttctgaaatacttgtattctaaaactttaaagtactttcatatgttttatctcatttgtgctgtcaaaacatctctgattacattgcgcaattctatgacccgttattttacagattaggaattaaaacccagggaagtgatctaacttgctgaagattacatacaaatgagggagaaatgaatgaagggaggagggggagagaaagaatgtgtgtgagagagagagagaactagaatagtggctgccaatgtagaatcttatctaataaattagagtctggtgaattttctccggattaattaagaaaaggagataacaagagtttaaggcggggttcccaaacttggctgcatattggaattatcttaggagttttacataaatctcaatacctggttcctattcccagagtctgattctgatttaattggtttgagatacatctcagacaatgggatttttaaaaagctcctcaagtagaaccactggcttaagtcttcgttgttagagcctaggaaaagaatagtacaaaatctgctgcatccactttaatatgcctatgaccttttaaatttgaaaactatgaagcaatttacaaaaaaaaagaatagaacaattgacaatttaagacttaaaaaagtagatacattgcagaaggatggtaagaaaactgtactgaagcataagtaagattttctgtaaagtcaggtgtcaggaaataattatcttattcctgtggaatatacagaaatgcgagtggtattatgttatcatattgatgttacatagaatgaagttcttacccacaaggtgaggtcgttcaacaatgtcataatttgaggaattataataatgatatagtaattattataggaatattcttattattatagctatcataggaataattagtaacagctactgcttactatgtactaggtgttgttctaagtgcattatcatgtaaaattgtttaattattacaatggctctttgtgttagataatattgcaaacccaatttacagatgagaaaactgagcattaggagagattaagtaatttgcttaagagtacaaaactaattataacagtaggagaggtgggtatactggatttcagaaacgggctgggctatgcttctgagacttgtaagaaaactggaaactgagctgaaacctaggagtctgaataataaatatgcctttatcatggcagatataaaagaccataaggaaagaagtgagtgagcccagcatttcgctcatgcatacaagtttagagcaggaaaagtgcaggaccaaggcaggaggctgttgggctccagcgtggtcctcttaagataacaagctagctgcagtagaattgcaaacttcaacttaggaaaatacacacccctgcatacacacctcacacacccaaaaccacacttgcacacacactgctcccacacttttttttttttttttttgagaaggagtctcgctctgtcacccaggctggagtgcagtggcacgatcttggctcactgcaacctccgcctcccgggttcaagtgattctcctgcctcagcctcctgagtagctgagactacaggtgtgtgccaccacgcccggctaattcttgtatttttttttagtagagacggggttctgccatgttggccaggctggtctcgaactcctaacctcaggtcatccgcctgcctccgcctcccaaagtactggaattacaggggtgagccactgcgcccggccctgctcctgcactttcagttcactgaattggtttcccaaatttacttaacatttagcaagtctttgggcaactctcattttattgtgtctgtgctaagaagaaagaaattttagctacatttatgctaatgcgttgaaggaaagccacactctcttcagaccactggggtggggcagtagtaatcaaaaagggaagcttgatcaggagcacaaagttggaaccactgatttgaaaagtaattatgttatacaaataaattcttgctagaagaggcacttttagctactatcactgaagaacaattttactttcttattaattctcactagaatcctctgatgtaagcaggcagaattatctcagctgtataggttagtaaaccaaggcttcaatagattaagataaatccacccctaactctgacactggttcttttattctttctcctttactacagttggatggagatgatacattaactttgttcctgggagtcccaacttggctttctcccaggtcggcaagataatgcctttagcaagcaacaatgaagcttgttaaactcaagatttttttttttttttttttttttttttttgagacagagtctctctctctccctcagttgcccaggctggagtgcagtggtgcgatctcggctcactgcaagctccgccttgggttgatgccattctcctgcctccgcctcccgagtagctgggactacaggggcccgccaccacgcctggctaatttttttgtattttttagtagagacggggtttcaccatgttagccaggatggtctcgatctcctgacctcgcgatccgcccgcctcaacctcccaaagtgctgggattaccggcgtgaaccactgctcccggcctgaagccattaatcttgatttaacggttgtactttgtctttaattctaaacactagttctttaggaagattgttttccctcttggtctttttttgttaccatcagccaattttcttttgtatttctgctatcaaacttttctgccttgtagcctttcttcctttgcatgttcttattataaaataactaaggcttaattcattccatttggaaaatagaaaatagaggaaaaaattattaatagtaaccatcatcactgttgctgtaacattctaatatatttttctttgggcttcccctacacaggtgtttttcccagtcaatttcattgtactcttgccatatatacctcattaaaatgtgcctttttacttaacccactaacattacaaattgctgtttattaaacatttttgtgaacgtaaatttaataaatgtgtagtattccatggtccaactgtataaaaataatttgaaacatccctccttttgatgaaaattagttattttttctatttttaatttttttccagaaaatttcaaatatgtacaaaagcagcaaaaatagtacaatgacttcccatgtatatcccctgaatttggcaattttgaacacatggttgatttttttttatttacatctccacctatttctcctccttcaagtccatgaattatattttgaagcaaatccctatttatattttcaaaaaaattaaataagggtcacagattttcttgtgtgttcagaaacatcttccatttttaaaaaacatacatataattgacatttgggagagaaattacagagtcaaaattatgaatgccattcaggctctcaattttcatagtgccaagttatttttcataaatgtagacattcagattccttgtcagtcttacaagagtcatttttaaataaaactatttagggaataaacattagttttcaaatcttcttttctgctgggtgtggtggctcacacttataacctcagcactttgggaggctgagggtgggaggatcactcaaagccaggaattttacatcagcctgggcaacatggcaaggccccatctttacaaaaaaattaaaaattagccacccgggagatcaagtctgcagtgagccaagatcacatcactgcactctagcctggacaacagagtgagaccccagctcaaaaaatttaaaaataaataaataaataaataaataatattttgtcttaaatggattggcaaaaaatgtatcttgttttattttaaagtatttttaaaattactagttaagataaaaatctttcatcttagttcaacatgcttccatatttgttaaacattttgtttcagtgaactcatttacttttgtttttcacgtttttgactatttatttattggcatattagtggttttctcattactataaaagtactatgtttttatttgtttattgattgatgtttccattgtgatttttttttctgttggaagaaagttttttgtttaagcttaggaagttatcacaaacccaatataatttataatgttaagttttttatgtctcttaaagcatctagcttttttcccaaaatttattttgtgtacaggtgaatcaaaaatataatttttgttatcaaacaagtagtccattgcctaaattccatttgatgaataatctatcttagtacttctcaaccccagctgtatgttagtatctcctgggaagcatttccttgattgaagctgatatctgaagtcataatctatggggtttataatcatcataatctctaagaggagtggtgtattagtccgtttttatgctgctgataaagacatacctgagactgggcaatttacaaaagaaagaggtttaatggacttacagttctgagtggctggggaggccttacaatcatggcagaagacaaggcagagcaagtcacatcttatgtgaatgatggcaggcaaagagagagaactgtcttgtgcagggaaactcccctttataaaaccatcagatctcgtgagacttattcactctcacaagcacaggaaagacctgcccccatgtttcaattacctcccactttgtccctcccacaacacatgggaattcaagataagatttgggtggggacacagccaaaacatatcattttactcctggcccttcccgaatctcatgtcttcacatttcaaaaccaatattgccttcccaaccgtcccccaaaatcttaactcatttcagcattaactcaaaagtccacagttcaacatctcatctgagacaaagcaagtcacttccacctgtaagcctgtaaaatcaaaagcaagttagttatttcttagatacaatggggatatagacattgtgtaaatacagctgttccacagggagaaattggccaaaacaaaggggatacaggccccatacaagtctgaaatccagcagaccagtcaaatcttaaagctccaaaatgatctttgactctatgtctcacatccaggtcatggtgattccagaggggggttcccatggtcttgggcagctctgctgctgaggcttgacagggtatagccccactcctggctgctttcatgggctggtgttgagtgtctgcagctttcccaggcacatggtgcaagctgttggtggatctaccattctgggttttggaggatggtaaccctcttctcgtagctccactaggtggtgccccaatagggacattgtgtgggggctcgaccccacatttcccttctgcactgccctagcaaaggttctccatgagggccccgcccctgcaggaaacttttgcataggcatctgggcatttccatacagcctctgaaatctaggcagaggttcccaagccttaattcttgacttctgtgtacccacaggctcaacaccacatggaagctgccaaggcttggggctttcactctctgaagcaacagcccaagctgtaccttggcccttttagtcacagctggagcagctgggacacagggcaccaagtccctagattgcacatagcagagggaccctgggcccagcccatgaaaccattttatcctcctaaacctctgggcctgtgatcagaggggctgcctcaaaggtctctgacatgccctggagacattttcctcattgtcttggtgattaacatttggctccttgttacttatgcaaatttctgcagctggcttgaatttctcctcagaaaatgggattttctattctatcacattgtcaggctgcaaattttccaaacttttgtgctctgtttcccttataaaactgaatgcctttaacagcacccaagtcacctcttgaatgctttgcttctgagaaatttctttgtcagataccctaaatcatctccctcaagttcaaagttctacagatctctagggcaggggcaaatgccaccagtctgtttgctaaaacataacaagagtcacttttgctctggttcccaacaagtttctcatctccatctgagaccacttcagcctggatttcattgttcatatcattatcggccttttggtcaaagtcattcaacaagtctctagggaatttcaaactttcccacagtttcctgtcttcttctgagccctccaaactgttccaacttctccctgttacccagttccaaaatcacttccacatttttggctgtcttttcagtagcaccctactcctggtaccaatttactgtattaatccattttcacgctgctgataaagacatacatgaaactgggcaatttacaaaagaaagaggtttaatggacttacggttccaagtgactagggaggcctcccaatcatggtggaaggcaaggagcaacaagtcacatcttacgtggatggtggcaggcaaagagagagaacttgtgcaaggaaactcccccttataaagccatcagatcttgtgagacttattcattatcatgagaacagcatgggaaagacctggccctatgattcaattacctcccactgagtccctcccacaacatatgggaattcaagatgagatttgggtagagacacagccaaaccatatcaagtgggaaatgaacatcaggattgatattttttaaaaatgcctcctaggagattctaatgtgctctctggtttgagaaccactcatctgcttattttgattcttgctgacttctttatattaaagtcctaaatatgtgtctctttttctgggatacttatgtgttctattaatctatctctctgtttttcagtgtgtgtgggtgtgtgtgtttaggctttgtaaaacatttatgcctgatacaggcctctccataccaaactttgctttgttttttttagaatgagagattactgcatgttggggtattaccagttccctttcttatcttgctggagccctaagtttccaaagaaatcaactgtgaaatctctctctgaactcctcttttcagtcctctcattcatataggtcgcaaagatcatagaagagccccctaaacacattttctccacatcctcaccacctattcattcccagaaccaccctgctctctggccactgcactatagctattctttctatgatgggtgacctccatgttgcctgtatctgctacttattgttttcctgacctgtcatcagattttagcccagctgttgtccatgcccctctcctttgcttccacaacagcacaaactcttggttccccttttacttctctagtttttccttcttaggccctctttgagtttccccctggaccccaattcctcttccttcatgtagcccttatccgttggaactccatggattctttcctaggccctcttttcctctcttctctttttcctttttgttcattttttcctctttctctcttattcactttcaagctttcaatattatctaatgactcccaaatatttatctctggtccagacttcccttatgaatcctaagaactgtacaaccaaatgcttttttctaatattctacttaaaagtcacactggcatcttaaatcaaaatgtccagaacaactcatcatctcctcttctttgatttctccttctccttcttaccttctacaaccactgtgtcctgttggttcaatctcctcaaggtttccaatccattatttttcttttttttactgtcactactgtaatccaaaaaatgattatgaaattattagtttcacaattgatattctcgtatgtatttattatcacctgcaatttattactcaattgctgcaaaactaatactcatttttacttttcaatttgaaatgattaaaggttcacaagtagttgcaaaaatagtatagaatccaatgtaacaattaccaattttcccaatgggaacatctaaataactgtagtaaattatccaaattatgaaactgacaatggcacagtataatgaactagaatgtagagtttcctgggatttcagtttttgcattcacacattatctttttcctctctgtgcatagttctttgatattttatcacatgtatagactcatgtaattttcaccacagtcaagatacagaattgtctgtcaccataaagaaactccctcatgctaccccttcaaagtcacaccttctccctgttcctactggtaaacactgatctattttctgtctctctaattttgccattttggaaatattatacggatggaaccatacagcatgtaaccttttgagactggctttttccactcagcataaagtccttaagttccatctaagtgttgcatgtaggaataatttgttccttcttattgctaagtagtattccaaataattttttttttctaaaatacaaaatggaccatgtcactctatttaaagcacttcagtgatacttagaataaaacaagcaatgtttagcatggcctaaaggctcattatgatctgcctctcgcctacctgcacagtgccatctcttcgtgttttctcctctcttgttactgtccaggcccactgaccttccagttatgagaatgtatcaagctctgttcccatccaaggcctggatattcctcctctcttgccttgtggctgtgcccacctttatctagtcagctcctacttatcatttgcttaaatactgtttacttaaagaaactttttttgacttccttcctattgccccgtttttatagcaccctaaacttctccttcatagcaaaacatatttaataatttttatgattaattatttaacatctgagtgaatgacttggtataaggctggccccccaaggaatgatgtgagataaactaactagattgtagaagtggaagaagtagagctgtcttgaatggacagttcagttacagagcaaaattcaggcaagaattagcaactcaggttttcagtgtggccagcagaacataaaggtaatgggttcaggggtgtgaatgaaataggaatgaagtagagtggagcaggatgatggtcagtaaagaggcattcaaccattgtggttgcatttatctgggaggcttttatattagtagcaagagctcagtaatcagagtataaagtaaaatttcaatctcacttaggattgatttaggcaaagagaggacaacacggccccatcgacttgtgtggcattcaggtgagggctccagatttgagagggttttgttaataggcatgagtaagtgggcagatttggggaagtggataaaggctacatcttccccaaattggagagtatgtaagataaataggatgaagaggactgagactgctgatctccgtaatgcccccgtcagaattggttcaggatctgggtggaaattagccagcatataagtgatatcagcggaaccagtacaaggagctgaaaaatttagagacagaagaaatcaggcaggtgctgatatattttccctgatgaataccataccactatctagcattctttccatttctgtaccttactttacagcattatgctatttgatttatctggtttaaatctctctttctcaacatgattgttaaattcagatatctactggcagctgtactatttctgctatcaaatgacacctagttgaagtataaaaagttttaaatcctgcattaactttttgattactttaactccctctctgtgcatagagtatacttacatgcacaaatattataaatatttagataaaagattttttgtttcattttgttatttttggttatacatgtttacctgattgatacagctatgtgactatttcccaactggaaaggcagatgaagaaggaagggaggaagagggagactaacacatattgatgatcgcaatggctctggtaatgttctaggcattttacagaaattatgctgcatagctctcaacaaccctggtaggtagttatcatcagcagcactttacatatgggaaaacaccttcacaaagttaaaatacgttatacaaagtcatcatgaatgataggaatgagattcaaatggaagccaaactccaaagtcttaccattatagcacaggaaattctatgcagggtaagtgtaggaatagatatccatcagattccagggctgccatgatatgggtaggaagatgtggatgaaaggaagcctccaaaatttgggagctcttgcagggacaaggagaggtagcataactggctgagggtacttattgattggcatgcccgttttccagttgataaacttcctactgctctctgcagttctttattacccttaggagacatgcacgtttcctgctcactaaactaggaaggcaaggaatggcaaggtcaggtgacatgcttccggatgctgaatgaatcacccaccaaaccagaactagaacttccaatctctcactctgttattacagcactaagtcagggctgactccacttcccttaattcctggactgctcagctctgaaccatgctgacccactccctagggaggggaaactgcccttggatcctggctgtacagaatgaggcaggaggttatgtgttcccagaagtgtctttttcctctcgccaggagtttgttattgtttacctggaattacattctacatatagaaattttatagtgacacactgtatggcacagcactgaggtaaacaggagctgagttagctttctgatggtgaaacctcatgtccacatctctctgcctgggcctgggactcatttatcagagaatgagaaagtgtgtgtatgtatatatgtgcccctacagcctgttgtagcctgtcttccttcagtcctcctcagcttgggccctcctctctgccagagggcagtgtgttagacaggctggaagagtggccagaaaacaaaacagatctcctcacttatggggggagacttccaagagagttttagagaacccaaaatctttcttagaaggaaaaacccagcaggctgaataccaaagaagaggactgatccttggaaatgcaaggtcactgacaacagtaggaacaaggtatttgaaagcagccccaacccatcttctggtgcattaatcaggtaggaaaaggagacacggatggattagagataatcctgtgctgagtgggggtggcgttgtgagttctcagcttttccctctcactgatagcccttattctgagctggggaaactgaggagctgggaaaattgttattgattaggaatctcaggaagagaacgtaatcagcaggagaatatttaatttaagatatgctatttctgggcttttctttgaaactggtagatgaaggattatggaattgggtacatacaaaatagcaagataattataataaaaataaactgttttgaatttgtataatacctcaaaggaaataaaatgtgtttatctgcgaaaccatatttaaaatctgatgctgtttgtaagcatctgtgagcactgcatttcttacctagatgttatggggcctgtcttgcaatcacttttctcctctacaaagtaaacttttgtgaggtaccaggatatagactaagcttcctcatctcaactgtatatcacatatgtttcaggaatctctggagacaggtaaaaatagaagcaagaaaaactgatagccctcagatttcataatttggtgagtaccagtgagtcaaaagatctgttgaaacaggcgcaggactcctaggcaccatggtggaaaggggttcccctttgagaacccatttgaaacactttctctagtgttcatttcgatccctgggtctctaggaaatgggggagggcaaagatcagaaataagcacaatttctcaatatctgagaagagtgagaggacgagataacctctcttagataacctcctccctgcctcacccacactaggagatatcacagggcataaggcaagttatctacacaaatacgcttctctggatttaaaaagaatcacctctccagtgtgcccttccatgcactctgtgtcctctcactggtttgtttccctagaacggtagagcctggggcactgagagagacagcatgaagaccctaattcctaagccagtgccctgtcccctgcaatttctggcctctttctgaccctcatgctcacagtgaaagatggctagtcctaagaaccgggactttttactcaaaaagcagaagatagaaataggattggggatcagacccaggaaaatgaacaaaggaaacaacccaagatgacataatctggtgaatactaggaaaaaaattctgattctacttctattttcagaatatactttaaagacagacatgcagatgtcatctatgtccctatgaggttcctatatggacacccttacaggcagattcaattcatccattctttccaaattgagtgtatgttagtaaaatttggtttcagccttgtggtttccatgattcttttggattccaatgtaattccttcttgaccttgttggtctttctcatttgaaagacaagtatatatgcacaacaaagtagtataaagaacattgggtttgtaagtaaaagacctgggtgtgcaaccttgctctgccatttttttttaaaaagtggctaatttggtggggtacagtggctcacgcctgtaatcccagtactttgggaggccaagtcaggtggataacctgaggtcaggagttcgagaccagcctggccaacatgataaaacccatctctactaaaaatacaaaaattagctgggtgtggtggcatgcacctgtaatcccagctatttgggaggctgaggcaggagaattgctggaacctgggagacggaggttgcagtgagctgagatcacgccattgcactccagcctgggcccacaacagcgagactccatcagaaaaaaaaaaaaagtggccaatttataacttaatcactaattcataacttaatccctcagtttctgccttgccttctttgtatgaaagtgcctagcacaatacctggcacactgtagttgctaaacacaggtttattagatctgaaaaccggaagcttgtttcataggatgttggtaacaagtaattctcagattctctagatctgagcattgttctctatctcacttccaaattaatatattcagcccattaaacatgttttttgtttgttttggttttgttttttgtttttgttttttttccagatagctcaagggtaagaatgaaacgctaactatacaagaaggcagactgtttcaggctaggggctgctacctccatatattttaccctcctcacttttagtctttgagtcctctgccccatagcccaaagccattaataacttccttgatccatgtggcagccacctgggagggtggatcacttgtctatctaaaaagaacatggctggaagatccacatgtgttgataagcaagcagtaaggttgaaggtgaggctggcacaacagatttaactgtaccttactggaacagggccagatgttatactgagttcaatcatggaatttttcatcacacataagcaggcagagtgcaggaaatctgattttagaagtcttatatctaggtatattttggtaagaaaagtttactctggaaagtcatgggtaaattgcagattgtgtccgggagactgtattgtgctaactgaaaagaaatgccacttattaagagttgtgttatggttgcaaatagaatatagtgtgaattaaaatagatgcctaaatgcagtgtgacactatgcttgtattgtatgtgtaaaagtttagaattaatattactatttagttcaatttcgttatagttatattcatgagcttttatggtcttcagactatagtcttgtaaagatttagcatggactttactcctcatttcactttcattctcctcccttttgtatctccttcattgcactgtttcttctcaggattctcaatgaaagaggggagttaaacctttaacatgctaagagaaagtctgaagcaactgataagagaaattaaggaatgataactacaagtgaggcaatattatggttctaactagaaccctgcctgaagagatttggctctgtagatataggattatgtaaactagaggcaaagtatatacaaacatattttacaactatcaaacatatttatcagaatgaaatatattacaatttcactagacccttgattccaatgccatggatttcattattcataacattaaatagagaactgtggataatgctttacagttcagctaagagaagaagcagtagcctacatatattttttgacatagtgggaaaagtatttagagataatgaaagggagtggagtattggtcagattgaacaggaatcttggccagaagtgtccttctagtagtcaggtgggccagagttgaacccatcgaagagtcatcctagaggtttttggcattaaggcatgccttttctcagcttgacagagtggacaggcaaagccatgtggtttctgagtatgaatttcaagctaaaaagtgatctagagaggaatattgctgttacaagtaaatataagcatcctctgatgtatgagctttggtggcctctgtgtggtgaggtttcccacattagctttcatggatatgtgggtatgcccagtgtgtatgccttaaaaatcctagactcggccaggcgcagtggctcatgcctgtaatcccagcactttgggaggccaaggcaggtggatcacgaggtcaggagatcgagaccatcctggctaacacagtgaaaccccctctctactaaaaatacagaaaattagccgggcgtgcgtggtggtgggtgcctgtagtcccagctacttgggaggctgaggcaggagaatggcatgaacctgggaggtggagcttgcagtgagcagagatcacgccactgcactccagcctgggcgacagagtgagaccccgtctcaaaaaaaaaaaaaaaaaaatcctagactcatctggtacactccatatgcctctacctaaataaactgtaaccattagaaagggtttattgtatacacatatggaaagcaatttcattgggtggacctcatcattctatacatttatctccttgctctagcatccaatttcactgggctgcaagatatcaataagccttgcctctttaaactacttatgtacaaataaaagtgatggtgagaacctggctcaggaaatgcagtagcaggccatattgcatccaaaggtgagtgctctgtaataggtgtgatagttagtgtaaggatataagcatgagtttgagttatcagggatttgtgtgtttggccaggtgcctatagttgagtatggatggccctccgtgagcagttcactgtgcccatgtgggggtacacgtacacatggctttaaacgactcccttcagtatgtattagtgggtgtgtagtttgttttctgggccgagctcatgagtctgagctagctgctgactgacccttttttccacctgtgctgtggtaagagagagtgtgctgagaacctcctcctcagaaagccaaactggttaaactggctgctccctgaatgaaaacaattacttctgataatccactaaaaaggaggcaaaggaaaggaaaataagaatgataatagcagtgatcacttttctaatagccttcctgaattcaccgtgctgatccaacgttttatttttcagaacttctcctttgtgccactctcttaaggtctgttttttgaaagtttcatcactagtgctagtccttccatgtggcctcatgaattgtggaagctttctcagccacatttctccttgccattttggtttacacactggatacagtggactttgctatctaactattcatcaacttcttagatcccattctaagaataagaataaggataagaagttccctcttctgtgccaattttccgcccgctggctacttggctgtttacctgagcttctgtcaaccaactgcacagttttgtttctcttgagtcgtaagggaattgtttaactattaaacccatatacaagttcatggtgctccaggaagagtggaacacaagtaaggcagaatctgggaggcttctttacataggtctttcaggcactgagagattctgcctcagtaagtaacactgtggttattagtatcagtattaaaaacaatgcataatgtaatgatagaggacagcataatatggctaatgtaacacctgtacaacatagtagcatattatataagctatacttctgatttttgttttatgtttttatcaagtcactacaaaactggatcacatatttagacttatttagcagaaaatcatattttctttcaagttaatcagaattaaagaagtaggctttgttgactatagaaccatgggagtgtcttgtcaagcaaaggcaaaatataaatttaggagaggtatgggacagtggtaaacatgagttctctttggaaagaaagaaccaagtttctagggctgttatttgaaatatgtactgattatattatatagacttaacagtgatacacataaagaatcccttgccagacaaacaagaaactaataactagagtctacttggaggagactggaggagagttaagaactggataaatggagaagaatgggggggagaaatatttttatgctatacaattttacactactattttttgaatcatatgaatgtattttctttttatttaaaagagaaagagaaggtggcttggtactgatacttcctttatatccttgtagcaatgagtgtccgtgtctatatctgatatgagcagaggaagcaccttgaagctctgagggatgaggaattaaatagtttttattgataaatgctgtctgttcactgcttgtgagggtgtggatatttcagagaaacaaagcaaatgtgtaactcatatccttcgacatctgtcaattttttatttgttatctgaattaactgtgtgtaaaaatgaaattaaatgttttctttagagctagaaatggtagctcatgcctgtaattccagagactcaggggattgaggcaggaggattaattgagcccaagagtttgagatttaaatgagccatgcatgatcacaccactgcactcaagcctggctacagagcaagatcccaacttcaaaaaatgttttgcttaaaaaatatgatgcacagctaaaaaaaatatattagacatgcttaatactgtaggggaggtagatcatgcccacataacccatggatcacagttcagatggatgttttgaatctgtacttgatcatgggagcagaagtctcgggtgggaggggagactttaaaataatttcagtaacagttgaatgaaaggacaagagcagatcagagctctttgctgtataatagagaaaagagaaacgctgagaggaagagaaggttgggagggttcttccaacctgaatatcagctaggtagatagagataaacggatgactcagagaggtagccatttacttaactagtgatctgtagaggcggtttaaaattctgtgtgtacttcatttattttttttcattcattttatttttttcaaaaaccactcaatccttaggaattactcacagctgtgctgtgtgcattctctgtgggcctagcagggaaggggacagccctgtggcaatgggcatgacacggatgctcctggaatgcagtctcagtgacaagttgtgtggtaagtacggattccacagatgtctatcctctgattttagaattatgaaggctaaggtctcggtagattctagaaggaggatgatttgatttccagtagaaatgaagacagtggtgataaaaggatggggactagaggccattgtctttttggggagagggtaagtgctaatcagtgatccagatgctgcatcttcaatcttggtaagaaactgccagaagcaacgtcatgcacatttgatgggctaagaaacagagtcactggggtttctggttagagagttgctcccagcagtgtttctgttgaatggaagtagaggagatggtagaagagatgaccttttcatgtatgatgagctgagagctggcgggtaggggaaattgcatgaacaccaggttaggcttcttcattctcttctcttcctgtgtgatcgcctacccagtcatccaggagaagcagtatgaagtgattatcgtcccaactttgttggttactatcttcctcatccttcttggggtcatcctgtggctttttatcagagaacaaagaactcaacagcagcgttctggacctcaaggtaaagctcaaactttggggctgggcaggggcttaaagaagatggagattaggaaaaagtatggtctaagtttcaatgagcccatgtctagaagtctaggtacctgcaatgagagaggcatgggttccctcccatggagttgagagggggatgatctcttttctaggaattcccgagttggaattcaacacgtgcttactgactgaaaaaagagtgtgcaagaaaaacctcatataacctgtttctattcctgttggactatcaaaactttgactatatgagtgcctaaggacctaggagaaagacctaagggggtaaagtccaaggctttatgaacatcctaggaggatgacatatcaccctatgatacgttccattcctaatctttgcctccaggatatatgatggaaaggaggggcctttatattataacagtctttgaagtgctaagtagatgataacagtctgttctggagttccactgagcatataataaaagggaatcaattcacagatgaaactcagggtaaaaagaaggaaaaagaaaactctcataatgatatgaaactctatagtggctaatccttagtttttctttaaattttatcccaatagtcttatacttcacttttatagaaaacttctcaaacaagttgtctaaactcactcctactacttctactcatcacattctcttttgaacacactaaaataaggttttcatctctaccacttcgccaaaacaagtctttccaaggtcatcaatgacagctgcattgaaaagtccaatgatcaattcttagtcttcgtcttacttgatctgtcaaaagcatttgaaacaattttaaactttctctttcttgaaatactgaaaaaactaaagccacttcctaaatgctataatttttagtcttatggattcaaatacattttctattccaatgatagtcccttgaactcaattctcatattaaaccacctactgcacagtttcaatggaatacaaatctcatatgtaatatgaccaaaacaaaggtcctgaaattctctcataaatgtcctccgcaaatagtcttgcctatcttagtaaatggcaagtcctgtcttctgtgttttcagtctcaaaccttgaagatatcagtctcaaaccttgaaacacagtttgagactgtgttttcagtctcaaaccttgaagataactcctttctttctctcacagtctgtatctaatccataagcaaacactgttaccctattttcaaaataaacccaagttactctcacatctcactgatcactgcaacacactcttaacattccctgcttctgcccctactcctttatagaaatgccagaatgagtcttttaatacagtcagtcctgttagttatctgcttgaaatctctcttccacacacacacatgcagtagcctcccaccttgctcagaatgaaaaatgacaaaattttttccatggccttatgtgatctgggcctccctggccttgtctcctactactctccaatgatcccacttggctccagctacactggcttcctggctatttctcaactattgcagctatgctccctgcttaatgcttttgcaatttttgctttctttgcctacaatactctccctgacaccagcatggtttgctccctagttgcttccaggcctttctcaaatgttatctcatcagaaaggcctttcttgaccttcatatataacacaggtgactgattcactgatgcttcttctccccaccacctttttttgttttttttttaaagagatggagtctcgctatgttgcttaggctgaatgttaattcagcccaggatctcctgggctcaggagatcctcctgctttggcctccccaatagctgggattataggctcatggcatcacactcagctttttctccatcttttattttcctccacaacattaattgcttgatatattattacctgcttcctctcccctaccagtagaaagtaatcttcaggtgaatctggacttttcctgttcccagcacttagaacagtacctggcatgtaataggtgatatttgttgaataaatgaataaatgtagatttaataagaaggatgaacctctcttttttgctggccaagggaaggagagagtaccagaagacttttttgaccaagactcaaggaaatatgaaataacttgacttttggggtaactcaaaggaggaagaataaccatagcttaaagctgattaattatccatacctttcctccaacgttgaaagccatttgtctgatttaaatgacagttctcactggcagttacctccacctttaggcatctgtggtttggatacctattcagtaacttccctaattgtctccataccacactcatgggaagtactcaattgtaacccagaggaaggaaggcagaaaggaagtgtcatgaccgatttcctggggtccttcttgagttgtcctaagaactaatggggattattataaaggttctacaaacttgacattgatgctggtttatagagaagcatcagaagacaactccccattggccaaagagaaaactgctgaaggaacctccttgccaatttgtttcagggtctgctttccgggatccccagggcggggaaaaactggttgacatcatctctctgttctaggcattgcccctgttcctccacctagggacctaagctgggaagcaggacatggaggaaatgtggctttgccacttaaggagacatccgtggaaaactttctgggagctaccacacctgccctggctaagctgcaggtgccgcgggagcaactctctgaagttctggagcagatttgcagtggtagctgtgggcccatctttcgagccaatatgaacactggggacccttctaagcccaagagtgttattctcaaggctttaaaaggtaaaacaagaagtgtttgactcccccttcccctaacagtaaatattaacaggctttgcgaacattgagatgttaactaacagatagttgtgatcataactgtgtacagaagaaggtaatagagtggaaacttgaggcagaaatgtttttcttggtgtctttttttttaattacacaaattgtttatttgtgaatccttacccaatctccaaataataactaaaatgactactacaaataagcataatgttatgatgagtaagatgttagctgtgggtttttacacagtctttattgtgttgaggtacattccttctgtactttgtgtagtgtttttatcatgaaaggatattggattttatcaaatgccttttctgcattgattgaaatgatcatatgatgtttatcctttattctgttaatgcggtatgtcacagaattgatttgcatatgttaaaacatctttgcatcctagattccctagctcttctttgcatcctaggttccctagctcatctttgcctattgaggctgttaaaacagattttttcacaatggatgttacttgtactaggattctgaggttgtttcctcattttactttattctttgataccccttcctgatattatatttcttttttctttttttttttttttgagacagagtgttgctcttgtcaccaggctagagtgcaatggtgccatctgggctccctgcaacctccgcctcccaggtttaagtgattctcctgcctcagcctcccaagtagctgggattacagccgtgtgccactatggccagctaatttttgtattattagtagaaatggggtttcaccatattggccaggccagtctcgaactcctgacctcaggtgatccaccagcctcaacctcccaaagtgctgggattacaggtgtgagccatcatgcccagcttacattatatttctctctctctctctctctctctctctctctctctctctctctctctctctctctctctcctcttcatgatatgggccagtaatggtggatacatagaacaaggataagacaagcaaggatattaatccaaaggactagacagtgataactttttaatgcaaacagactatctctctatttaggcagatgaaagcctatccagttctaataattatgattctgtgttacctttgataaaagatcagtgacattaagcatcatcttcatctaattagtcccctttgtgtttatttttgccttcattcactcccatgtggggccttgagaattaacatcttaagttgcctcctgctccctgcctcccactcatcgaggatgctctgactgctcactgcctggatctttcgtcctctacagaaccagctgggctccatgaggtacaagatttcttagggcgaatccaattccatcaatacctggggaaacacaaaaacctggtgcagctggaaggctgctgcactgaaaagctgccactctatatggtgttggaggatgtggcccagggggacctgctcagctttctctggacctgtcggcgggtgagcagtagggcagaggtattaggaggttaaggcttgaccttgttgactagctttttacatgtcagttagtgtgacaaatgacaaaatgcagagacactataatagcatgacagaataagggagtatgaccatataatagaactttttgtaattatagaaatattctataactgctccatccagtatgataagccactaatcacagatggcttctagacacttgaagtgtggctgatgtgatggagaaactaaattttaaattttatttaattttaagtaatataagtttaaatagccacaggtggctaatgagcagagagtggacagtacaagtttagagcatggactttaggcttcacctcctactagttatgtgactgtgagcaagtcacctttctgatcctgagttttctgaatctgtaaaatgggagtaataattattacaaaaaatacaagaaattatgtatgtgaaaacatggccatggttggtacagagtaagcactcaaaatggtagctgttataaagataattatataacaattatctttatattgtttatatataacaattatctttatatgagtatttttggtaatgattataattttgttgcagttattaagtgtgttttccattctgtaacatcactataatatggtgggcaaactcagggagaaatttagcttgtaaagcttttgtagctcaaactcacgttttttaaaattaaagcattcagaaatttttagcctcaaatggatgtccttttccttaaaatttcccttgttctatattcctctttcagaagtgctacctgtttccctagtttctcacttgctagtgagcaagttcaatattctttgagcctccttcatatgctgattattgtacaactgaatgtgtatgagaaagggaccctgttattgtcttccatcctgtattgtcaataggacgattgcaagtatttaggcattttaaactttttaaagaggtcactcatctaaaacttgttttgtcctctaactgcactagcttctttccatttttaaaaaataccacgcatctctatttcagattatctttatatgtttttcttgttccaccaaacttctctcttctcttcttttcatagttaatgtccactcatccttcagatctcatcaatttccctgtccctgcaactcaatcaactctcttctgcccaccatcatatgctctcttagcactttgtacatttcctttatggcacttacagatatgtaaccattgatttatgtatgattatttgattctgattcacatgtgcctgtcacccaataagctccagaaggcagcagccatgctattttactcatgcttgtattccaagttcctaacatggaataagggacatttcaggcattcaataaagatgcattcagtttatgtgctaaattaatcatgaacacatgtgtgctcacatgtgcatacacacacaagcacacacacagagccctagaaaaattgctgctttattcagtggatagtcttatttatacttgtcttacctgctattcatctatgtctgtcattgtttttccagtccaatggatcattttatgtctctgcctatctgaaaatctcccacagcctcactttgaacactagtccttatatttttcaaagctttgataactgcatttcagagtatctctgcccaactttatttcttttccaaatctgtgagtgctattttgatataatggctttttttccctgtctctttaggatgtgatgactatggatggtcttctctatgatctcacagaaaaacaagtatatcacatcggaaagcaggtccttttggcgctggtaagatgaggcaacatgacaactgatggtgtgacgtttccttgttagccttgtttttgatgccatatttctcatattaatattctcaagtggtgtgtatgttttaaagaaaattagatagaagttagggggcagaaactcaagcatggataaattgtttttagtcccttccttagggatttatctagataatttaccacactattggtaatttcagggagaaagtagtcaacttagggtttatacaaggaacaggaaggatttttcagatttttcagggccaagaggtatacacccatttacttgataattttacatccccatttgtactaataatagaattaaaagagacagatagggaagcaagtagggagaagatatggaaagagaaactgaatgggtgaaaggcgacagaaccagaaggaagtatgcaattttatacctgagaaacaagaaaactagttcagaacatgtttggttggagacttgctttgatactgaatgtgacagggagtacatataattataaaagattaaggaacaagtggaaaaggatgaatgagaagagcacagttggataattcctttattttaaaacaacttaaatatttgtttatttatttatttattttttgagatggagtcttgctcagttgcccaggctggagtgcagtggcacgatctcggctcactggaagctccgcctcccaggttcacgccattctcctgccttagcctcccgagtagctgggaccacaggcgcccaccaccacgcccggctaatttttttgtatttttagtagagacggggtttcactgtgttagccaggatggtctcgatctcccgacctcgtgatccgcgcgcctcggcctcccaaagtgctgggattacaggcatgagccaccgtgcccggcctaaaacaacttaaataacgagataagagaaagaactcagggtttaagataaaaaatttacctttaccagaattacccaggaagtttatatgtctatttctatgaaattatttaaatggttgtgtttaaaattaacatttgctatggaaaatcggggttctgtgaagctactgttttaagtatttgatatatcttgctactttgaggtgtgaaatatagggatgtaagtggaatcaggaaaaggttagaaaaaaaggattaaggtgggtaaagagtaatagttatggttgaagctcccatgggacaagggagagtacacatcatatacgtgaatattgtctatggtgtttgaatggcctcgttgatatgttcccttgataaagagtgtcaggatacagcctaccctgtattcagaaccgcaattgcagaggcgccgtccagggatgaattggtcaaattggtgcattcatcaggaccctatgctacctgttacaaggcaatatcatgctatttttttcttacttttaacaagctcaaagtcagttacattctttaattcttatcatggcactataatttcttattttaaagcttcaccaggcacagaaaactgctagttttctttgtcatcagtgattggaaattatcacctttaccttctaattttctataccatccttttttagtaatcacagccctcaatatctagatcttcagtcatgtatagttttgcaactttcttcttatgccttgaataggttgatgccattggaaattactccaaaaatcaattatcatagggtgccatggctctccgatgctctgttggctgtactagaatttgatacatcttaaaaatgtcggttaccaggtctttcttcctacattttggtttattaaatctggggtgaaaatcttatgtttaaaaagctctcaggcaattccaatatgcagactgacttgaaaatttttagtagagtttatatagtacatcctatgaattataatacctggttctggtcactactgcttaataactctgtggccttttgtaatcatttagatttatctaaaagaaaatttctgaattcaacccatgcagttattttaggggaaaaagtgagatatgtatatacatttttcattatgatactcaattttggtacgtattacattgttttgaggactactgctagaaacttggaatcaggccgggtgcagtggctcatgcctgtaatcccagcactttgggaggccgaggagggcagatcacaaggtcaggaaatcgagaccatcctggctaacatggtgaaaccccgtctctactaaaaatacaaaaaattagccaggcgtggtggcgggtgcctgtagtcccagctacttgggaggctgaggcagaagaatggcatgaacccaggaggcggagcttgcagtgagctgagatcccgccactgcactccagcctgggtgacagagcgagactgtctcaaacaaacaaacaaacaaacaaacaaacaaaaaaagaaagaaacttggaatctactcccttttccagtgtctagctgggtcctttctcacgggaaacgaaaatcaggcaggggtcagtgtttgaaacagaggtgattatattttcaaaatccagtattaatgtcatttgaattatttgctcaatttggtaatcctaaacacaatgcagaaatgtgcagttcattagcatgctttggaagtgacatatcattattagtgagacttgttcagagtagaaaatgtccttgtgtttttgaagattcctaggactgcctctccttgtctgtgacccaagctgtgatctcagacagctgatcatatttgattttatcttgacaggaattcctgcaggagaagcatttgttccatggggatgtggcagccaggaatattctgatgcaaagtgatctcactgctaagctctgtggattaggcctggcttatgaagtttacacccgaggggccatctcctctactcaaaccatacctctcaagtggcttgccccagaacggcttctcctgagacctgctagcatcagagcagatgtgtacggtttattcctggactctgagtttactttcttcatgacttgggtgttgtccctgaatatgatttgatctgttgccaattctgtatacgaatataatctctacttagaaatcagacatactctcaagcagaaatgttatgtgacagagttcatgtttgtcatctgtctgcaatcctttttggtactttttcaactttttcttttcttttcttcttttcttttctaagacaggatctcactgtgttgcccaggctgaagtgaagtggcatgatcacagctcactgcagcctccaccacccaggctcaagcgatcctcccacctcagcctccctagaagctaggactacaggcatgcaccaccctgcttggctattttttttttcttttttttttagagacaaggttcaccatgttgcctaggctggtctagaagttctgggctcaagtgatcctctcaccttcgcctcccaaagtgctgggattacaggcatgagcaaccatgcccagcctcaagtatttcttctgtattagattagcagccttaattagaaaaaaaaaaagtgaaaagattattcacatcaatatctgaggacttaatctagtaaagtctgttttatctgaaggaataaccaaaaggccagttaacccatacattgttaaaataaaaagaaatatacataccttcaataacttattttaacataaaacttataaatgtacattatctgtttttttcaaggaggggcaaggcttctttttataaggatgagtttcccaaatgaagttacacgttgttcttttagtgtaaatagtatcttttagtgtaaataaaaatgatttatttttgagttccagttcagaatgattttaggtagcatgagaaacctgaaaataattgtgaaattgtttgactgcagacttttgatgttacttttcccaattttctaagttgtctccctcacacaatttgacaagactttctttttcagcagtttatttttataaatcattttcaaaacattcaacttagttttcaaaacattcaacttccttcaaactttgtttgaaggaagataacacttttttgcatttaatccatatataaaatacctaattgattatataactacatataattgcaattacatgtaaaattggcattaacaggatcataaagaatcacaattgacttttggtagccatataactcaattgcttggagaagtgcattgatgtaatgtagaatatcctgctagccatgaatgccatgagcagcagaggaaatttagaatatcagttaatatgatgagtcagttatgagatttccattgttgcttcactgacatctgcttttcaatagacatctgggggtaataaacttaactgtaaaatattaatcattcaataatgatattacagaatagtgaactatacacctctcaagtcatattgcttaggcaaatacctatttcaactatatataaagcttgccctgttaatatttttcctaggtttgggcaattaaatctactgagaaaatagtgactaaatgataaaacttggttgaatttgtgctaagaataaaggcaagaatttcagcagagagggatggaaaggaagaaagagacacagagggaatatttttaggtaaatgtgcttttgtgattgaggtaaatgtgtttgtgtggttacatgcacacacatttgcaaataataacaaacatctattaatttaaaacacaggagagtaaatagagatataatttcaatcttaaaagagattcgaacctatggaaattgagcagaaatgctttctaatggctgttattttgtttttcagacactcatccttgattctccttcattgcctttttcatggggctcttattaaaggcttctgacacttaaatgagctctctttagaaaaacagaaatagaaattaaatagatggctttgtttcttttacagctggtcttttgggatcctgctctatgagatggtgactctaggtaaggatgagccccaaaatagtgtgtacctgtatgcaaatatgcaagcgtgtttatttaaggggtggatgatgtatgctttctgaaagggtttcagtacagtgctgaagcttgaaatggactgacatgttatctaagcctgattcccgtgatagtcatataaagtgattattttctccttgccccagtcccttcttccctgtccttttttacctttcttttgctctcttcctctttattttccccaaaatattaccaaatccaagggatgttttcaaatcccaaggataattcccagagtggtcttgcataaacataaaaatgtttactccagacttattaattcatttgactgagaaactgcacactttcccatgtatggagagtggaggacaggtcttatgtcttactttgtcttatttgatcactttcttagagattcaagattctcctaacttatcaggtttttttctccaaaacacctttccccccaattcactaaattatatccatatttgatcaccagggagcaactgaattgtatgtagtatttttcctatggctatatcttttgcaagcaaccaacccaagtggatgaagaatagtgttagttacagttcatattttagaggaccttaaagttctcattattttcgtaatgacaggagcaccaccgtatcctgaagtccctcctaccagcatcctagagcatctccaaagaaggaaaatcatgaagagacccagtagctgcacacataccatgtaagtggtttttaaaggcctgctcctctttcattccaaatgttgtttagccctctatcaatcgtgcccttttcaaagggctcagatgatcctcacctgtgtatatgtacccatgtacagcttttaaccaaacccatgcagtaaaatatacctatctcatatattatatatgcatatatattatatatacatatacatacacacactcacacatactcacacacatacacacacatacccccaccacacgctgagaactatatcaggaatctaattttattatagtttagttccatgggaagcttctaaaataggtaacaagtaaactaaacccaatgcaagtatagttgtgtttagtctaaatgtcagtcttctgccagccacagttcagacagctgtcataaaagccattgcactagagttactcattcagagtataccagttcttatttagtatttaacttttaaatgactgtctccctgtttttccaactctcagtgtgatagaagccaaccagaggaaggggagataagaagaaattagaaaggcagaaggaggatccaatattgtcagcagattgggacagttagtgaaccaacctagaggcaggaaatggaaaaataaaaaattacatagactgttattaccaatgaagttcaaaaaggaactgctgtagaatgtaagaaaaggttaaattgtgtatacggaggcagcagagaatatattaatgtttttattagaattgttgctattttgtaagttttttatcattgaatgggtaaatttacagcacttggttttccttatgataaataattactgcatcaagcagattaaatttaagtatcttaattatatatgagtatacacatacacacacacgcacagaatatagtgatggagctaggtacaatagaaaaaaattgatgacaaacatttctatgtgttaaaggctggtcttaatactgggaaagacacctaactgacaaaatacctgacctggtaccacaacctctggtacttgtaacacagccttgtcatctgcaattctagcagcagcttctaggcacaagtattaaagaacataacattttgatgaggagatatctgaaacatgaaaatcaacctaaagtatgcagcagtatacatgattaaaagctccgtctcatatcagagtaaaaatgacatgtgttcatttctacccagccctgttactttactgcacaatgcttacaacgttacagcaaacaatatgtagtgataaaactgtcctgtcataccctagtttggaaaatgttaagtcattcctattatacaagagcacttgttgagaaagtgctattaagagacttgatataaaaagattgagaaggaatatcactctctgggaagaatatgagtaacagggcaaacagaagacaattaaagaattgcagagttgtttgttaaagtttgtgaggagaggagacatgctccccatacatttgccttgtcaaggaagtcagtttctcttgtttccctctcaggtacagtatcatgaagtcctgctggcgctggcgtgaggctgaccgcccctcacctagagagctgcgcttgcgcctagaagctgccattaaaactgcagatgacgaggctgtgttacaagtaccagagttggtggtacctgaactgtatgcagctgtggccggcatcagagtggagagcctcttctacaactatagcatgctttgaagagtctcgggcaagaaacattcatgcatgagtatatgttcttggaatcaattcctctaagaacagagaatggtctttcccagggacacaaagggagaaatgggacatggattcttgatcttcctttacacatttctcgggaaatctgaaatgatgctggatgggactctacacatcctgagctaagacatactgtcagtctcacttctgctgtcccagtcctagaaatcctgggtagaagtggtggacctgtgcaaaggaggttttagaactctgcagtatttgttggggcatggcacaaataagctcatccctcccgtccgaggctagtttcctctggaaccacatttttatctagatgaaaatttggaatgaaatgaaggaatagaaatccaataaaagagttgaagggaaagaaaatttaaggttcttcttgctcaggattacagatatggaccaacacctccttcaagaaaaggtggtaggacacaaagttcttcagtcctgagccctacatgtggggttggaggagaactataacggaaaaacctctgagtttcaccttaggtatagataaaagaaagatggtccccttttatctgattctgagacaggtaaattctgtttgttactacgtttaattagaaggtggaggagtcatttcatgattaagaacattcaacatgtattgttcattaagctagcttcctagttccgattagactaaggagactaagcctagagagtcaatgttagaacagtgaaaagaattctgtgtgtgtgtgtgtgtgtgtgcacaataaataggaaatgtagaaaccaagcaagaaggcttagtagctcagtctttaacaagggctagaaaagaatgtaatctgatatggaaggatagcagcttctaattttcaatcatctgttgatatactgtgaaacttattttattaaattaatatttattaaatggaaatatgcttttctggtttataactactaaaaatatcatagggaggataaaagtaaataagtgaaagttaatgccaatagaaaaattcaagagataatgtacaatgtcagaaaagggattctttatgtgtaaatggggataatacctatttcacaaggttgttctgaggattgatacgttttgagtatgtatttgtacactatctggcacatatgcgctcaataaacgtgtttctccttttcttttgcccttcctaa

SEQ ID NO: 397 - DNA, 3119 bp, Homo sapiens
  source 1..3119: mol_type = genomic DNA; note = NC_000013.11:25096136-25099254 PABPC3 [organism=Homo sapiens] [GeneID=5042] [chromosome=13]
acgcgctctactcctgtaacggaaaggtcgcggcttgtgtgcctgcgggcagccgtgccgagaatgaaccccagcacccccagctacccaacggcctcgctctacgtgggggacctccaccccgacgtgactgaggcgatgctctacgagaagttcagcccggcagggcccatcctctccatccggatctgcagggacttgatcaccagcggctcctccaactacgcgtatgtgaacttccagcatacgaaggacgcggagcatgctctggacaccatgaattttgatgttataaagggcaagccagtacgcatcatgtggtctcagcgtgatccatcacttcgaaaaagtggagtgggcaacatattcgttaaaaatctggataagtccattaataataaagcactgtatgatacagtttctgcttttggtaacatcctttcgtgtaacgtggtttgtgatgaaaatggttccaagggttatggatttgtacactttgagacacacgaagcagctgaaagagctattaaaaaaatgaacggaatgctcctaaatggtcgcaaagtatttgttggacaatttaagtctcgtaaagaacgagaagctgaacttggagctagggcaaaagagttccccaatgtttacatcaagaattttggagaagacatggatgatgagcgccttaaggatctctttggcaagttcgggcccgccttaagtgtgaaagtaatgaccgatgaaagtggaaaatccaaaggatttggatttgtaagctttgaaaggcatgaagatgcacagaaagctgtagatgagatgaatggaaaggagctcaatggaaaacaaatttacgttggtcgagctcagaaaaaagtggaacggcagacggaacttaagcgcacatttgaacagatgaagcaagataggatcaccagataccaggttgttaatctttatgtgaaaaatcttgatgatggtattgatgatgaacgtctccggaaagcgttttctccatttggtacaatcactagtgcaaaggttatgatggaaggtggtcgcagcaaagggtttggttttgtatgtttctcctccccagaagaagccactaaagcagttacagaaatgaacggtagaattgtggccacaaagccattgtatgtagctttagctcagcgcaaagaagagcgccaggcttacctcactaacgagtatatgcagagaatggcaagtgtacgagctgtgcccaaccagcgagcacctccttcaggttacttcatgacagctgtcccacagactcagaaccatgctgcatactatcctcctagccaaattgctcgactaagaccaagtcctcgctggactgctcagggtgccagacctcatccattccaaaataagcccagtgctatccgcccaggtgctcctagagtaccatttagtactatgagaccagcttcttcacaggttccacgagtcatgtcaacgcagcgtgttgctaacacatcaacacagacagtgggtccacgtcctgcagctgctgctgctgctgcagctacccctgctgtgcgcacggttccacggtataaatatgctgcgggagttcgcaatcctcagcaacatcgtaatgcacagccacaagttacaatgcaacagcttgctgttcatgtacaaggtcaggaaactttgactgcctccaggttggcatctgcccctcctcaaaagcaaaagcaaatgttaggtgaacggctctttcctcttattcaagccatgcaccctactcttgctgggaaaatcactggcatgttgttggagattgataattcagaacttctttatatgctcgagtctccagagtcactccgttctaaggttgatgaagctgtagctgtactacaagcccaccaagctaaagaggctacccagaaagcagttaacagtgctaccggtgttccaactgtttaaaattgatcagagaccacgaaaagaaatttgtgcttcaccgaagaaaaatatctaaacatcgagaaactatgggaaaaaaaattgcaaaatctaaaataaaaaatgcaaaatctaaaataaaaaatggaaaggaaactttgaaccttatgtaccgagcaaatgcaaggtctagcaaatataatgctagtcctagattacttattgatttaaaaacaaaaaaaagattacttaattttgatttaaaaacaaaaaatcgtaaaatacaaaaaccagttaatgttttgtagaccctgggaaaagaattttcagcaaagtacaaaaatttaaagcattcctttaattttttaattctttactgtggaatagctcaaaatgtccattctgttttaagtaacagaattgataactgagcaaggaaacatggtttggattataaaattcttgctttaataaaaatttcttaaacagtgaaaaaaagaaaaatcatcaattttactaatagtctttctttacattttctattattctatctcccactatatttcaaatatgaaaatcactttttcaccaaaattttaggtctttacataatagtgtttatttttaatattcataaatgaaaatatgcaatgacaaaatagtaattataaattcagtaacatttgttcaaaattgtaagacaattattaatttatactgcattatttttaaataaaaaataaatacatagttttaaaaatctaattgaacaggaggctaaacatggttctgatcacagagataatcacttttaatcatttggttttagtgtttctggtagttgattttcttcaataataattgtacatagttatttcttggtttatcaattttgtaatttaactattgacttcctgctgtaacaaataaggatatgtttcatctacctcttcccaccatccctcctcctcctcccaatataatttatcactacttgtagctcctttattggtaatattaattaatataaatatttataattaatgttacacctagtgaattgtataaaaggacagcccatttgagcattctcctttaagatgagtagaggctgtgacattgcactacatagaaatataattataccatattactttgcaataaactatgtattatagaga

SEQ ID NO: 398 - DNA, 63869 bp, Homo sapiens
  source 1..63869: mol_type = genomic DNA; note = NC_000019.10:c36245928-36182060 ZNF565 [organism=Homo sapiens] [GeneID=147929] [chromosome=19]
gactccctcaacgactgcatctcgcggggcgatcccggtcgggttccgcctgagccaaggccccgcacccaaaccgagacagcggatccagtagcccgaggcccgcagctgggcgaaggaaccgggactcaagagtagcctccggcaccgagccctccaagaaaagcagcccgggaccccgacaaccgtggacggagccagggtgggtcatagctcgaggcatcgtcaacggagggtccttaagagaccctgaacccattcacccgggcaccagagactctgccaaagcaccaattcgggcaggtggtagcctcgaagctgggaggctgcatctcaagcctcctcctagatccgcggtggaccctgggaaatgtagtccagagcaagccaccacctaaatgcgccgtggaccctgggaaaggtggtccctcgcaagtcaccgcctggacgcaggtaacctcctagatgcgcggtggaccacgggaaatgtgatccggattttctgggtgggcgtcgtaagcgcggagctttccgggtcgcagtgactgtcctcccttcgagcccgccagatcagaccctagaatgtccggcagcagcccctcggcttagaactgagctggggtcatacacgccctctaggcgcgagttggtgcacgcgttagagtctcaggggagggagaaaaccctgtagctctaaaccgagggagctgccaaagcgattcaaaggagcccaggggacccgtagcaacagaccccgactctgcgcaaatgcgaatccatggctctcgcaagggcagcgaggctcgccgggtctcaggctgtggatccctaaactcaaaagaaataaaacgtcacatgataaattaagagtttccaacagtttctagcctagccactgaacagtagggattcaagaaaacaaaacacaacaatgaaaattaccacataatacgagaaaaggtcccaaaactgaccgtcaacaagatacaagcctatcgagtaccaaccacagtggatgaaaaagacacgttctaatctaaggcgtagaattcgacaattccttttttttttttttttttaagacgtagtcttgctctgtcgccaggctggagggcagtggcacgatctcggctcactgcaacctccacctcccgggttcaagcgattctcctgcctcagcctctcgagtagctgggattacaggcgcatgccaccacacccggctaatttttgtatttttagtagagacggggtttcaccatgtttgccaggatggtctcgatctcttggcctcgtgatccaccggcctcggcctcccaaagtgctgaaattacaggcgtgagccagcgtgcccagcctcctttttaaaaaaaaattaataaactttttctttagggtcttgctctgttgcccaggtcggagtgcacgatcttgctcactgcaacctccaccttccaggttcaagcaattctcctacttcagtctcctgagtagctgggatgacaggtacccaccaccacgcccagataatttttgtatttttagtagagaagggtttcaccattttgaccacactggtcttgaacttctgacaactgattcgctcgcctcggcctcccgggattacaggcgtgagccaccgcatccggccttctgtcagagtttcagctgccctcccagcgcccccaacaggcacgttttcacaagaccagacctagctccactttgtggtgaggtggcaagaatagagagagagaaagagaggacaccccctgcccccagccactcagacacacagacatgggatcccatgggtcttttttcttggtttggttgacagctacggcagtggcagagcagcctaatgactggggctgttcttggtgcaaggccagtagagaaaagaagaaaaacagaaaaaagggaaggctgggtgtggtggttcacacctgtaatcccagcactttgggaggccaaggagggtggattcctggagttcaggagtttgaaatcagcctgggcaacagagtgagacccctgtctctacaaaattttaaaaagtagctgggtgtggtggctcatgcctctagtcccagctactcaggaggctgaggtgggagaatcacttgagcccaaggggtcaaggctgcactgagccaagatcgtgccacccccacccccagcctgggtgacatagcaagaccctgtctcaattaaaaaaaagaacccctctctcactctgtcacaccaggtcctcttttggactcctctggctggaaggaaggcatttctctcataatttatgctccctgaacccatcacacagctctgagacttccctccttccaaagccaaaagataaaggaggaaaatcccccagcaaacatatggtcatcgtgtccattcttctcgtttttaactcccttcacatctgcctgctattacttgtatttctgaatcttcaggtggtttctttttgtattcactctggggtgttaaatagaaatcagtgagagagatgctgaaatgtgcttatcccatcttggccagtaatggaagtctgccttccctgaggatttgaaattatccagtttgggcctggcacagtggctcacgcttgtaatccccacactttggaaggccgaggtgggtggatcacctgaagtcaggaatttgagaccagcctggccaacaggacaaaactccatctctactaaaaatacaaaaattagccgggcgtggtggagggcgcctgtcatcccagctactcaagaggctgaggcaggagagtcacttcaacccgggaggcacaggttgcagtgagctgagatcaccccattatcctccagcctgggggacaagagcgaaattctgcctcaaaaacaaacaaacaaaaagaccaaaaccaaaaacccaacatttactctcagataatctgaacagaacacagtcttagaaaataatacttaaaatgcactgggtgcaatctaaaattatttgaaatacaaagaactgggaaaatgtgatgaattatcaggggaaaagaaaatcagcagatgaccatgtcaagaagaaacagatactggacttacacaatgatttatgaacatcttttcatgtgcttgctggacacctgtatatcttttttggaaaaaatgattctatttatttgtccattttaattttcattttatttattttttcgagacagagtcttgctctatcacccaggctggggtgcagtggcatgatcttggctcactgcaacctccgcctcccaggttcaagtgattctcctgcctcagcctcccaagtagctgggatgagaggcacgtgccaccatgcctggtaatttttgtattcttagtagagacgggtttcaccatgttggccaggctggtctcgagctcttgatctcgtgatccacccacctcagccctctaaagtgatgggattacaggtgtgagccaccgtgcccagaaatttgcccatttttaataggttgttctttattttttttgaaatggagtctcgctctgccacccaggctggagttcaatagcttgatctcgcctcactgcaacctccacctcccgtgttcagtcattctcttgtctcagcctcccaagtagctgagactacaggcatgcaccatcacatctggctaatttttatgtttagtagagacaaggtttcaccatgttggccaggatggtcttgaactcctgatctcaggtgatccgcccgcctcggcctcccaaagtgctgggattacaggcgtgagccaccgtgcctggcccagatagatgatttctaaatattttctcccattctgcatgttgaacttcagtttcttgatagtgtctgatacacaaagttttaaatgtttacaaaatccaatttatctacttttgttgttcctgcttatactttggtattatatttggtattatatttacaaaatcgttgccaaatctaaggtcatgaagatttactcctatgttcctatgttttcctccaagagtttatctcttatgtttaggtctttggacacttttgagttaagttttgtatacggtgtgaagcaagagtccaaattcatctttgtacctcaattgtcccagcttttttttttttttttttttttgacactcttcttgccaggctggagtgcagtggcacaatctcagctcactgcaacctccacctcctgggttcaagcgattctcctagctcagcctcccaaagtactgggatgataggtgtccactaccacgcccagctaattttttgtatttttagtagacagggtttcaccatgttggccaggctgatcttgaactcctgacctcaggtgatccacccgcctccgcttcacaaagtgctgggattacaggcgtgagccactgcgcacggccccaacactttttttttttttttttttaatacagagtcttgctcttgtcacccaggccggagttcaacggcacgatctcggctcactgcaacctctgcctcctgggttcaagcgattctcctgccttaacctcccaagtagctgggattactggcccccgctaccacatctggctaatttttgtatttttagtagaggcggggttttgccatgctggccaggctggtctcgaactcctgaccttgtgatccgcccgccttggcctcccaaagtgctgggattacaggcgtgagccactgcccccgacatcattttttaagggaattattctttcctccattaaataagtttggcattctagttgaaaatcagttgcccacagtgtatcaattgatttgtgttggtataacagaatacctgagtctggttaacgtataaggaacaagaacatattggtacacagttctggaggctgggaagtccacaactgagagactgacatctggcaagggccttcttgttatgtcatcccatggaggaaagacaagagacagcaagtggggacaaaacttgcccttttatcatgacaccaatcctactcatgaaagtggagacttcatggacatctttttttttttttttgagatagagtctcattctgtctcccaggctggagtgcagtagcacgatcctggctcactgcaaacctctgcctcctgggttggagcaattctcctgcctcagcctcccaagtagctgggattacaggtgtgtgccactacacccggctaatttttgtaattttagtagagacggggttttgccatgttggccaggctggtattgaactcgtgacctcaggtgatccacccgcctcggcctcccagagtgctgagattacaggtgtgagccaccacgaccagccccttcatggccattttaagggtctcaacctttcatgccattaccatggcaattaaatttcaacattgagttttgggtgggacattcaacccatagcatttgtggactctcaattctcttcccactgatctgtctccatccctgtgtttttcctcctggttttgtttgttttcgacagggtctctgtcacccaggctgcaatatagtggtgcaatcacggctgactgcagcctcaaactcctgggctcaagcaatcctcccagctcaccctcccaagtggctgggactacagatgtgtggcacatgcctagctagaatcatctctagattagtcataatacctaatacaatgtaaatgctatccaaatagttgtatattaacatttgtatttttaaaattgttgtatattttaaacactttccatccagggttcgttgataaatggatgcagagcccatggatacagagggccaactgtatcataaagacaacacctttaaatgtgaaatatatgtgcaaacagggaaaacagagaaaaagatggggtacatcataatataaagggcagattcatttagacatttaagtatctaattcctccaaaaaggctaaaagatacagtgatgcagtgccatttaatgagttttttaaggtttcaaaatcaagctcaaatgctgtatattattgacattcaccattattcaagaaaacctttaataatattctttatattataatgtgatcaaagaataaaaaaattttcatgaagggctggtttacaaaatagaactctgtctagggtctgagccatttttctcatacccgtcccattctctctctgtaacagcagtgggaggagtgacagagctcgcaggttaagacagacacgcaggtgttggtatctaatgcactgaactgtggaagttatgggaagttgttttctctttttaaaaataaaattagctgggcatggtgactcatacctgtaatgtaatggcagcacttgaacaggccatggagaatcacttcaccccaggagtttgggactaatctgggcaatatacggagaccccatcgctacaattttttttttttaattggcacagcatagtggtgcgtgcctgtagtcccagctacttgggaggctgaggtcggaggactgcttgagcccagtaagcagaggagattgcagtgagccaagatcctgccatggtattctggcctgggcaacagagcaagatgggaaaaaaaaaaaaaaagatattatcaaaaatttaatatttaatgcacacgtttcccatggaaatatgcaggagaggaaaactgacattccaaaatcagcctaactgaaaaagaccaattatatgaagcctgtgcatgtatgaacaaagaaaaagttaaagttttctaagctcattctgcaaaatgttagaaatacgaagacagagatcatatagtgcagcggtccccaacctttttggtaccagggacctgtttcatggaagacaatttttccacggacggtttgtgggggtagaagaatggggatgggatgttttcaggatgaaactgttccacctcagatcatcaggcgttacattctcataagaagcgcacaacctggattcctcacatgcacagttcccaatagggttcgcgctcctatgagaactaatgccaccgctgatctggcaggaggtggagctcaggtggcaatgctcgctcacccgccactcacctcctgccatgcagctggggggagctggggaccccgatatagtgtgtatgccatgttaaaataattaaaacagatttggattgtgctgtccttttaaattttaataaaatagattaatttcatattacatagagagcaagtccatccattcatccgtgataaaattttagaaatattttctataaaatgtttagtatttaattggaaatgaatccagtataacatgacttccacagatacagcattcccatcctcactcccattcctattttgagaaattttaaaaatacagaaaagtacaaaaaataagacaagatatccctataccacaatccagaatcaatcagtatcttcttatatttacttgaagtcttttgaaagagaagtggatgtttatataaaaagctgaagtcccctttaaccaatacccatcccacctcccacactcattattttcccttctccactcttcacaggtgaccactatcaagagtttggtctgtatccttccaatccgtttcaaaaacatgtacatacatatatgcatccattaccaatagatagtactgagttttatgaggaaacttttaattcaaatttacaaaaaagtcattgtactatctgtatcattctgcaacttgatcccccctcaacaattctgggatctttctgttaatacatgtggatttcatttgttgcattttacagatatatagtattacataagaatttcccatattgttcgtgatgggctttctcagttgtttctaatttttggctactacaaatcaagccacagtaaatatcctagtgcgtatttcctgagcattcatactcataagtagaaccgctaagtatttctcaaattgttccaaggaatgtttccctattcccaaggtcatatgcattttagtacatagcttttccatatttctgtttttaatctctggattcacttttgtgtatagttcatggtctatttttcccccttggagaacaaactacctccacttaaaaaaaatagttccattatttcctcatttcctgatgccacttgtatcatattccaaattctaataaatgcataggtctttttttgaaatctcttctgctctgctcaatcaataccacaggagtcttaatattagttgtagatgaccatgtcatctatttttgtctgttcctttccaatatttacaacttaatttttcttgttactggcgaagatctccagatctatggtggtagcaataaaaaacaggcctccattttctgttcccacttttagtgaaaatgtgcctaaactttcaccattatctctgctgcaggtttctctgttggacacagggttttaatcatatgcatgtctttctcttcagtacaaattttctggtgtcccttaagtttttagtacttgttaaagttaacctcattcgtggtgctttgcttcagaaggattatttctggggcatgatgaggtgcaaatttctaatgaaagctttcccactttcaaggctttcatggggtttttagtgagtatgaattttctggtgtctaatgtggtgtgacttctggctgaaagctttcccacattcactgcactgataaggcttcttacctgtgtgtattctcaaatgcagagcaagggttgagaactgagagaaagctttcccacattcattacaaccatagggcttctcccctgtatggcttctcacatgcacagtgagagatgagctctgagagaaggcttttccacaaacattgcattcgtaaggtttatcacctgaatgaatcctcacatgtacaataagtgatgttcgctgagagaaggcttttccacattcgttacattcatagggtttctctccagtgtgaatgttctgatgttttatgaggtacttcttctggccaaaggctgttccacattcactacatttaaaaggcttctctccaatatggattttctcatgctcagtaaggttggatttgccactgaaggtttttccacactccttacatacaaagggcttctctcctgtgtgagttctctggtgtctgatgaggtttgacttctgaatgaaagctttcccgcaatctttacactcaaaaggtttttctccagtgtgaattttctggtgcgtaaggaggttttccttctggctaaatgattttccacattcattacattcgaaaagcttctcgccagtatgggtgttctgatgtttaatgacatactgcttttggctaaaggcttttccacactcgttacattcaaaaggtttctctctcgtgtgaaaatgctcatgctcagtgaggtttgatttgtggctgaagacttttccacataccttacaggcaaaggggttttccccactgtaaattctctgctggctgaggtgtgacatctgaatggaagctttcccacattcacaaggtttctctccagtaaaaatttcttgatgagtgaggatttacttttggctgaagatatttccacatctcttacatttataaggcttctctgtgtatgatctcccaaatgcagagtaagggataaggtttgagaggaaatgttatcatactcagtatattcaatgctttctctctagaaaaattttctaatattcaatgaagtattgctaccttcactagtttctctccagcatgaattttctgcttctcaatgagattgtcatctagctaagggcttgtcaatactccttagaagcacagggtttctcttcagcatgacttgcacgttcgacgaaatgcaacatatgagtaacagttcccccacattcagtaaattcatagggtttctctccagtatgaacactctggtaacagatgaggtacaaacgttttaaaccaaagacatttacacttaaagggggttaataccataaggagtaagctgtggtagagaagctcccaactaagtcccttgatgattctttcctacacaacctccctcatgatttcagtccaggttgtgtttcaaactgaaaacttcaaaaaggtgtggccttaaaacaaatacgatctgagaacagaggaagtattttttcttatattcaacgctctttttctcagtctttcctggagatggatcaacatgcctcccaagtcctggtgcctctcaagtcctggtgcctctctatctgtgcatcatcttctcaggcttcttctaaaatggagtacaaagaaccatagcacaaaggagttaaattcataaagtgcccagaaccatggctgccatatggtaagcccttcattttacctttatattactatcacttttatttgttaattttcccattactagcaataaaattttttgagattaactctggtagcccatctcccaatatgaaaataatctatattattaatgcttccaactaaattatgagaagggaaccctacttgaggtgatctaggtagaaaattaacattcatgggtccacaaagctgaaagtactcttgaaaaataacctttccatttcagaatttagcaagttgtataacaaataatgaagaattgccaaatagaagaaaaagatgaaaattagaaagtctacctgggatgctaaggaagaaaaataatgttcatctttctttcttctttttttttttttgagacggaatttcgctcgttatccaggctggagtgcagtggtgcgatctcggctcactgcagcctccgcctcctgggttcaagcaattctctagcctcagcctcctgagtaactgggattacaggtgtgcaccaccatacctggctaaataatgctcatctttctaagaaaaggaatagatcaaccaacaagtgcttcctcccaaaaccccattaaaattataaggagaaaatggtacaaattcccttattcaaaaggaataaaggatggtggctgaaaaaaaagtgtaaggaacagttgaacatgcactgtccagtcacgagaacaaaggactggacacaccttcatatgaaatggaagtttatcccctgcagaattttaatcagagctcaggggcattcagcaaatgagatgacaggaatgagctgctatacggaaatcagagattaaacccacatatatggtaagacctgcagcaccattctgcagctgaagacaaaagatgctggctggccgggcgcagtggctcacgcctgtaatcccagcacgttgggaggccgaggtgggcggatcacgaggtcaggagatcaagaccatcctggctaacacagtgaaaccccatctctactaaaaatacaaaaaattagccgggcgtggtggcgagcaaccagatgcaaagcttgaaccctgattacattctgtaattttaaaaaactatggaaggcattctggggacaattggaaaaatgtgaacatagactgggtagtctaatattaggacaacatggttaatcttctaaggtgtgaaacggtattttgttatatgggagagctccctttttttttgagacagtcttgctctgtcgcccaggctgtgtggggaaaagaaagagagatcagactgttactgtgtctgtgtagaaagaagtagacataagagactccattttgttctgtactaagaaaaattattctgccttgagatgctgttaatctgtaaccctacccccaaccctgtgctcactgaaacatgtgctgtgtcaactcagcgttaaatggattaagggctgtgcaggatgtgctttgttaaacaaatgcttgaaggcagcatgctccttaagagtcatcaccactccctaatctcaagtacccagagacacaacacactacagaaggccgcagggacctctgcctaggaaagccaggtattgtccaaggtttctccccatgtgatagtctgaaatatggccccgcgggaagggaaagacctgaccgtcccccagtccgacacccgtaaagggtctgtgctgaggaggattagtaaaaaaggaagacctctttgcagttgagataagaggaaggcatctgtctcctgctcttccctgggcaatggaatgtctccgtgtaaagctggattgtatattccatctactgagataggggaaaaccgccttagggctggaggtgggacatgctggcagcaacactgctctttaaggcattgagatgtttatgtatatgcacatcaaaagcacagcacttttttctttaccttgtttatgatgcagagacatttgttcacgttttcctgctgaccttctctccactattaccctattgtcctgccacatccccctctccgagaaacgcccgataatgatcaataaatactaagggaactcaagaggccggtcctcttgagaggtcctccgtatgcaggtcctccctaacgccggtcccctgggcccatttttctttctctatactttgtttctgtgtctctttcttttccaagtcagtccttccacctgacgagaaacgcccacagctgtggaggggaaacccaccccttcaggctggtgtgcagtggtgcgatctcgactcactgcaacctcggcctcctggcttcaagtgattcttgaagcctcaacctcccaagtagctgggattacaggcatgcatcaccacgcctaatttttgtatttttagtagagacaggatttcactatgttggccaggctggtctggaactcctgacatctggtgatctgcccgtatctgcctcccaagtgctggcactacaggcgtgagccaccacgcctggccaggagctgcttttcttggtagaaaatacatatttaattttttagaagtaaaacatcatgatgcctcagcacacaaaataaacacatggatacggacatacaaaagcgtggcaaaatattaattattcaatccacatggggggtacataagagattctttaactattccttcagcatttgttatatttaaaaaatgttcatatgaaaaaataattgaatggctgggcatggtgactcacacctgtaatcccagcactgtggggccaagagtttaagacaagcctggccaacatggtgaaacctcgtctctactaaaaatacaaaaaattagctggatgtggtggcatgctcctataatcccagctactcaagaggctgagacaggagaatcacttgaaaccgggaggtggaggttgtagtgagcccagatcgcaccactgcactccagcctgggtgacagagggagactatgtctcgggaaaaaaaaaaaaaagaaaaaagaaaaaagaactgatcagtatttccacacaaaaaattcatagattatttaacagcaactcatgcgttctcaaactactgatcagaaaaataaaacatggaccttccttttaaccggattataatgcagactatagacggcaaaatctaaaaccatgtttaaggtatcatttgctgagaacttgtaagttcctctggaaaatatgaagtaatggacaagcagagggaagaggaaaaaaggcagaagtaacaaacattttaatgaaaactgaattcaagtttatataagtagtacctacataagtagaatatttcataatcaaaggccaagattcaaaaattttataaagagaaagaaatatgttcatatttgtagtcacataatttgtatgttttttttttttttttttgagatggagtctcgctctgttgcccaggccggagtgcagtctcagctcactgcaacctccgcctcccaggttcaaccgattctcctgcctcagcctcccgagtagctgggacgataggtgtgcatcaccacgcccagctagtttttgtatttttaatagaaacggggttttaccatgttggccaggccagtctcaaactcttgacctcaggtgatctgcctgcctcggcctcccaaagtgttgggattacaggggtgaaccaccgagtctggcctttttttttttaaataaaaaagatacggggtctcaacacgctgcccaggctggtctagaactcctaggctcaagagatctgccgcctcgcctacagatgtgagccaccgtgcctggccctttgttctctattaaagagagcttagtgtgtctttttaaggcttgactgatcctattacaaagaccatgggaaaagaaataatccagaaataacatgaaactggtctgaggtaatctctggatctgaaaataataggatgaaaattttaatttgggtagcattctgacacaatgagaatgaaattagacagctgtctgtcccataaacaggtaaagttgtgtaaggcaagacagaaactctggagatgccaaaataagaattgatattatagttaattataacttaagaatgagtccaggtgtagtggctcccgcctgtaatcctagcactttgagaggctgaggcgggcagatcacttgaggtcaggagtttaagaccagcctggccaacatggtgaaaactggttaccaaaaaaatacaaaaattagccgggtgtggtggtgggcacctgtagtcccagctactcaggaggctgaggcaggagaatcacttgaacccgggaggcagaggctgcggtgagccacgatggcaccaccgcactccaacctggacaacagagtgaaactatgtctcaaaaaaaagaagaacttttgtatttttagtagagacagggtttctccatgttggtcaggctggtctcgaactcctggcctcaagtgatacacctgccttggcctcccaaagtcagttgtggtcacgtttacgcgtgtcacgtatatccttcttgaggtaacctaggaataagccagtatattatatctatgctgcaaatatatatacatataagccctagccaacatggtgaaacctcgactctactaaaaatacaaaaattagccggcgtggtggcaggtgcctgtaatcccagctacttgggaggctaaggcaggagaatcgcttgaacctggaaagtggaggttgcagtgagccgagatcgcaccactgtactccagcctgggtgacagagcaagactcagtctcaaaaaaaggaaaaggaaaaggaaggaaggctggccctctgttgggtctcccaaatcactcagaatcaatgttgaaacctgtgatttgacctgttacctaaccactgctactcttattcccttttgccctctctcttccagcccacggccctgatcactattctctgaacaggacagcaagcttctcctgacttagggcttttaacacttttgttccttctggctaatgatcttccacccaatgctgcacgcccactctcgcactcttcagatcttttttcaaatggcattcagtgagacctttccccaccaagctgatttaaaattacaaccccaactagccctctctataccggttttcccttactttattcttttccatagcacttatcactatctgatagtatacattttttaagtatttactcattgtctgtctccccattataacaccgtccctaggaggaagaaatttttgactgttttgatagctgacatttccctagcatctgaaatagtacctaatacatatcatgcaataaatacttgtaggatgtgaatatatcagcttggtagaaacgtaaatgggtttacttcttttgagagcaatgtgcttatctcaattaaatttataaacataactttgaccctgtattccacttaaaaagtaaatgctatgtagttgtttctgcatatttctgcaaagcaatataaacaagtatacacacttgtgtcttcaatagcagaagcctgaaaacaacctaaatgcccattagtaggagacaggttaaattatgcgttagccaggcgcggtggctcaaacctgtaatcccagcactttgagaggccgaggcaggcagatcacttgaggataggagttggagaccagcctggccaacatggcaaaaccccatctctatgaaaaatacaaaaattagccaggtgtgatggcacatgcctgtaatcccagctactcgggagcctgaggcacaagaatcacttgaccccaggaggcggaggttgcagtgagccaagactgtgccactgcactgccacctgggtgacaaagcaaaactctgtctcaaaaaaatgaaaataaataacaaattatgtgttgacagagaattctaagaaaaaaacttatgtacataatagaatatataatataccaccatttatatgaaaaggaaaaattagggcttatatgtatatatatttgcagcatagatataatatactggcttattcctaggttacctcaagaaggatatacgtgacacgcgtaaacgtgaccacaactttgcaaaaaaactgcaggactaagagtcaagagttaagaggagattttttcgggagtctgaggcaggaggaccacttcaggccaggaagctgaggccacagtgagctgtaattgtgccatacatatagacccccacacataaaagtagcagagggaaaaactgatttctaggtcaacaacttatgacagaggtacatgggagcagaagaaaggtaggcagaggagtccatggatctacgatggcagagatgagtgagaagacaacgggaagtgtgagaacaggtgtaaaatataattctgaggcattcagccactagaaaggatgagagaaggtagtaacaaaaaggaacctgaatatcagacaatatgtaaggttttacaaagtataaaggacaatgtgtgaggacaggaaaaggtatgtggatgaaggagaacagccaccacagtggcggcacagacgaagcaggaaggctgacatcagaacagcaacaggaggggcgcctggcccctctagaatctggtgaaagaagaagaataatgaaacacacaaaaatgatgactggaagcgtcattcaggaatctaaaaatctcataccaagcaatactctatatgtctacagcctggaagaaaacatcctttgaagcacttcagaggactcaatgctgactgaaaaactgtggcctgcctgtcatttactcacccgcgcagatccttcccacttctttctccaccatacagtttgtcttcttgcttcaacagaggatcatattaactattgggaaaatgacacagtattacaatgttaatgctgggtccaaagtaccatcctagaactcaggctgagccctggggtctcctggccttctgaagaatgagggtgcaacttccaaagatgcacagaacaaagtaatgaccttctgccttagtgactaaagcacacacaatcatgtgggcaaagggactagggccattagaatcctaaacttcaaagccatgctcattaaaccatttaaagtctacacacatccagaaatgggagaaagggagaattacctttcagaattttacttacacaggagagctgttcacaccttgtgtgagtgattgctgtttttctctagcaccacactcccactcagggtcctgagaggattttaactacagcccttattcgtggatgaattcaacacccatgtctgactttaacacgttcccatcagaactaaagcacatgggcacaatgtgaagaagttgttctgacagtactcaagaataaaaactcaaacattttcctgaagtcctatttaccctctttgcattatactgagagtgaaattctttctttttttttttttttttttgagacagtttcactcctgttgcccaggctagagtgcaattgtgcaatctcagcccactgcaaccaccgcctcctgggttcaagcaattctcctgcctcagcctcctgagtagctgggattatgggtgtgtaccaccacacctggctaattttgtatttttagtagagacagagtttcaccatgttggccaggctggtctcgaactcctgaccttaggtgatccacccacctcagcctcccaaagtgctgggattacagatgtaagccaccgtgccgtgtcctatttcatattagagatgtcctggcccaggtgcagtggctcacacctataatcccaacacttcgggaggccggaagtgggtgaatcgttttgagtgcaggagttcaagaccaggctgggcaacacagtgacacaccgtccttataaaaatacaaaattagctgggcgcaatggtgtgcgcctgtagtctcagctacttaagaggctgaggtgggaggatgacttgagcccaggagttcaagatggcctgacagagtgagaccttgtcataaaaaagaaaagcaacaacctggaatacaggttcatccattagttcaaaaaacatttttaagccaggtgtggtggtgtgcacatgcagtaccagcttctcaggaggctgagacaggaagatcactcgagcccaggacttccaggctgcaaatacatgatcatgcctatgaatagccactgcactccaaaagaaaaaaaaaaatctttttttttttttttgtgacagagactcgttctgttgcccaggctgggagtgcagtgacgtgatctctgctcactgcaacctctgcctcccgggttcaagccattctcctgcctcagcctcccgagtagctgggattacaggcatgcgccactacacccagctaatttttgtaattttagtagagacagggtttcaccacattggccaggctggtcttgaacccctgacctcaggtgatccgcccacctctgcctcccaaagtgctgggattacaggtgtgagccactgcgcccagccaaaaaaaaaatttttttttttttgagatggagttttactcttgttgcccaggctggagcgcagtggtgcgatctcggctcactgcaacctccacctcccaggtccaagtgattctcctgtctcagcctccggagcagctgggactataggcatgcgccaccatgccccactaattttttattttcagtagagacggagtttctctgtgttaggctgaactcccaaactcccgaccacaggtgatccacctgccttggcctcccaaagggctgggattacagttgtgagccactgcacgtggcccaaaagaatttttttaatcaatagcagacattattgggatgactgaccaaatttgaatatggactttggattaaataatactaatgtatcaatgttaaacttcccgattttgatcactgtactgtagttatgaaaaagaatgtttttgttcttgcaaaatgcatgctgaagtatttatagataaaggaagcatgtccacaactggtttcaaatcgttcaggaaaaaaaaatcatacacatttggagaaagagagaaggaaaaataaaacaaccaaaatgtaaatgattggtgaaattgggtaaaggatacatgggacttctctgtactattccaactcttctataaagttgtaatcatataaaaaagcataatcataaaaaatttaagtttcacatatataccccccatccactatgtatgttgaaaaagcttgatcacccaattcctaatggggtgtgtcagagatataaggcttagagcatgatttaaaccgaaacatacatgacagaaacacgagaaggtgagttggctggaagcaacttgcaggagggagatcaagtttgagactctatacattcagagtgtaggtttctgaacacatgcaggcagagagatcgattaggcagttggatatacagatcaggagctcagaatagggctagaacagaaatgggaacttgccagttgtcagactattactgctgctgaagacacagggagaaatgttaccgtgggctggacgcagtggctcatgccactaatcccagcactttgggaagctgaggtgggcaggatcacttgagctcagaagttcaagaccagcctaggcaacatggcaagaccccatctctgcaaaaaattcaaatccaaaaattagcagggtgtggggtggtacatgcctgtagtcccagctacttgggagcctgaagcaggaggactgcttaagcctgggaggtggacgttgcagtgagccgtgatcatgccactgtgctccagcctgggtgacaaagcaagaccctgtctcaaaaaaaaaaaaaaaaaaaaaaaaaagaatcacaaagcaggggcagggcttggtggctcatgcctgtaatcccagcactttgagacactgaggtgggtagactgcttgagcccaggagttcaagaccagcgtgcttagcactaaaaaaaaatacaaaaaaactagccaggtatggtggtatgcacctgtagtcccagctacttgacaggctgagacaaaaggactgcttgagcctaggaggttgaggttgcagtgagccagaaaaaaaaaagtaagaatcacaaagcagatgaaaactgaaacataacaaaatgaacttaagacacaaaacttttaagaaggaagcaaagctataaatagaccacaaaagataaacagaggaaatgagtaaagaaacagtcacccaaaagaagggaatcgacagaaaacagaagaataggaatagacatcttatttttgtcccatttgattttttgtttaaggatgcaataacgaaattttgagggattgttgtttcctcaatcaacagattttccctggttgttgcaccttggctattagcagtgtcctcagtctttctgctcacactcccactgacccaggcagcatgggtaatctatatttatataatcataatctgtatctgaccacaaaagccagtatcttatctaatgtaaaaacactgaaaagcaaatcatgataataaaagtaatagaaaaacactgaaggcatttctattagattctaaacagacaaggatgcctactgcctcaattatataatctaattacaaataactaaggaaagcagggaataatattagtatgtagaaatcaacagcttcatatatgccaacaatgactccattcatagcaacataaaacaaaacatccagaaataaacttagtaagaagtgtccaaacctgtatgaaaaaaattttaaaacaccctagaggacccaaaaagaaacgagaatacgtatcacgtacataaagaggaatatttaatgtcataaaaatgtccctattcccaagttattttataaatttaatgcaatcccaataaaagtaacaaactagttctaccttttccccctctggaacgagacaagctaatcctaaaatttacaaagaaaaataaacaggcaagaatagccaggaaacactgaaaaggacgagcaattaagagactagctataccacaaagtaaaacacaatgataaagcctcaatagtaaaaagataaatattttccctggttgttacacctgggctatagcagtgtcctcagtctttctgctcacacccagaaacagaccaaataaatgtgagaatttagtatataatcaaagtggcatcctaaaaatagtaaacataagacctttttttaatgtgtgtgagatggagtttggctcttgttgcccaggctgcagtgcagtggcacaatctcagctcactgcaacctccgccctcctatgttcaagcgattctcctgtctcagcctccgaatagctgggattcaggcatgtgccaccacacccagctaatgttttgtatttttagtagagacagggtttctccatattggccaggctggtctcgaactcctgacctcaagtgatccacccaccttggccttgcaaagtgctgggattgcaggcgtgagccaccgtgcccagccaggtaagaccttttaataaatgatgtcaaagaacgtggtagccaattggaaaaaggtaaagctggatgcatatctgatagcatacaccaggataaaatctaaatggattataaattaaaataaaaacaaaatcttaaaaaaactattgctctgacttgggaagccaaggtagcaggatcacttgggcccaggagtttgagaccagcctgggcaacacagggagatcttatctctacaatttttttttttttaaattagcgaggatatgaaggctgcagtcagctgtgatcacgccactgcaccccagcctgggtgacagatcaagatccaactctaaaacaatcaaacaacaaaaaactgtaactttataagaatttgaaaatatcggtgaaacttaagagtggaaaagtctgataaccataaaagactgatgaatcagccacgcgcggtggctcacgcctgtaatcccagcactttggagggccgaggcgggcggatcacgaggtcaggagatcgagaccatcctggctaacatggtgaaaccccgtctctactaaaaatacgaaaaaattaaccaggcgtggtggcatgcgcctgtagtcccagctacttgggaggctgaggcaggagaatggcgtgaacccgggaggcggagcttgcagtgagccgaaatcgcaccactgcattccagcctgggggacggagagatactccatctcaaaaagaaaaaaatgtaactagatttttttttttttttgagacggagtctcactctgttgcccaggctaaagtgcagtggtgtgatctcgtgcaccacaatgactggctaaattttttgtatttttagtagagacggggtttcaccatgttgaccgggctagtctcaaactcctgacctcaagtgatctacccgcctcagcctcccaaagtgctgggattacaggcgtgagccatcgcgcccagccaaaagttttgaaaataaaaagaaaaccatagcagcatggtggtgcactgcctgtagtccccgctacttgggagtctgagacttgcttgggcccaggggttcaaggccagcctgtgcaacacagtgagactgtgcctctaaaaaatacatgaataaaaaggtctttggtgtggtgcggggatgtctctgtgctcaccaaccacagggggctcattctaagcacggctatgtaaaaaaagaaactattattactaaattaaaacaaaacctcttatttctgcaagattaaaaaaaaaagaaaccactgtgaacaatgtccaaatgcaaatgaaaacttcaaaaaaaaaaaaaaaaaaagccaccactcatttcatacagggctaacctttctaatttataaacagctcctctaaggagaagacaccccatagaaaaatggtgaaaaggatatgaatagacagttcctagattaatacatacaggcctttaaacatataaaaaaaaattctcattcataagaagggatgtaaatgaaacctacactgaagttcagattgtctcttatgtccctagcgaaataccaaatattcgacactacactcatggtgagtttaaggggaagacgctctcgcacatggcttgtgggagtgtaagtacttacccactgggcagcgccatttgtattaatagcagtctagtttagagctactcctgtgtcagtataaaatggcgcacataaaaaaattattcattactgcattgttagcaacagcagaagactggaaacaatccaaatgctcaacaacgggattaactgaatcaaccatggtgcatccaaataatgacatcttatttatacagcagctgaaaaaaaaatttcttttaaagattatgattaagaaggaacaccttggctgggtgcagtggctcacacttgtaatcccaacactttgggaagccaagagaggaggactgcttgagctcaggagttcgagaccaatctgggaaacagtgagacctcatctctacaaaaagtaaaaaagccaggtgtggtggagtgtgcctgtggtcccagctacacaggcggctgaggcaggaagatcacttcagcccagcagttggaggctgcagtatgccatgttaacaccattgcacaccagcttgggtgacagagcgagactatttcaaaaaaaaaaaaaaaaaaaaaagaaagaaaaaaggaagggctatctctaggacatactgttattaaagaaagtgagatatagggaggtgcatgtggtatgctatcttttatgtaaggtggagggaaacaggagtgaagagaaatatataatagtgacagaacaaaaaacaaaaaacccacttgaaggataaacaagaagcaaacaaaaaaaaacaagacatgtttacataagacaaagaagaatgtgactgggggaagggagcagaatgagatatctctgtgagatagatctttgttgaatcacagaaatgcattacttacttcaatagtaatcaaattcattttttaaaaagtagtgccttggccaggcacggtggctcaagcctgtaatcccagtactttgggaggctgatgcgggtggatcacgaggtcaggagatcaagatcatcctggctaacatggtgaaacctcgtctctactaaaaatacaaaaaattagccgggcgtggtggctgacacctatagtcccagctactcgggaggctgaggcagaagaatggcgtgaacccgggaggcggagcttgcagtgagccgagattgcgccactgcactccagcctaggggacagagtgagactccgtctcaaaaaaaaaaaaaaaaaaaaaagcagtcccttaacctgaaaacaacaaatgaacccaactgtatgttaatttagtaacataattcctcagaaaaacgatttcaaatgactttagaacagagttctttgactacatacatctttagtgagatgcattttaaaagctgggctcagtggctcatgcctgaaatcccagcactttgggaggccaagacgagtaggaagtcaggagttcgagaccagcctggccaacatggtgaaacgctgtctctactagaaatacaaaaattagctaggcgtcatggtgggcacctgtaatcccagctactcaggaggctgaggcaggagaatcgctggaactggggaggcagatgttgcaagtgagccaagatcacaccactgcactctgccctgggcaaaagagtaagacaacatctcaaaaaaaaaaaaaagatgcattttaagaacaaaaatagttacatatattaaagaaagaattttttaacatgatacagtatgtttatggttactactagtatcagcattgttactgaaaccattttctttatattgcaggataaagcaaacaaaataagtacttataacttgtttcatattttttactataaaatacaactaggaggccgggcgccgtggctcacgcctgtaatcccagcgctttgggaggccaaggtgggcagatcacctgaggttaggagatcgagaccatcctggctaacacggtgaaaccccatctctactaaaaatacaaaaacttagctgggcgtggtggcatgcacctgtagtcccagctactcgggaggctgaagcaggagaatcacttgaacccaggaggcggagattgcagtgagctgagatcgtgccactgcactccagcctgggcgacagagcaagactccgtctcaaaaataaaataaaattaaattaaaaaaaagaactaggagctaagaaattaggtaaaaatactataccatttaaagtgaattagaaatacgaatatggactcatgatttttaaaaatacattaaaaatgtattttttaaatgctctgcaatttaaaatggccttaaaacaatgttacccctgggcaatgagcacacccttgatcttgtctctaataccattctccaataaaaggaaccagagctccttggagaaatggtcaattccaagtctgggaggaagatacaagcctgcagtgcaggaaaactttccaagatcaatgatgtcagccaaaatgagacaagaatgacctgaaggggtatccactggcatcaaaaagtgcagctgattctagaacacgctaaatatacacaactttaggatgatgtttaagaaagaaaaagccagggggaaaaaaagatacaatttgatgtaacaatgaaacaaatgtaaaaggaatgaaaagacaagagaaattaagactatacttccagggatcatttctagtttgttcccagaagtttctcttaacgtatagactactacatttttacacaaaacaaacaaacaacaacaacaaaaaaaacagaaaatcatcactttacaatacctgtagaaatttactcatccagccaagaattatgtattggttttaaaaccatccactaaatgactgatggagaatgaaccaaagtaaacataacattttggtcaaagggaagtaacaatcaccagccatctggtatatctctcctaatggtatgcaatttgaagtatgtaagatcacctctgatgtattctggccaaaaatcaatcacaattagaattaaaaaaaaaatcatcagagattctgaattagaaccatgcaaaagtaatcatagaaatcaaagaacaaatcttccaaaggagcggataatgatgactttctaaagataaacataactcaaacacagaaatctaacttccagcctgggcaacatagtaagactccatctctacaaaaaaaggtttaaaaattagcaggtcgtggtggcacacacctgtagtcccaaccactgcgggggtggggctgaggtgggaggatctcttcagcccaggaggtggaggctgcaatgagatgtgatcgcaccagtgcacccagcctgagccagagtgagaccccatctcaaaaatcaaaaaacaaacctaacttcctgattccagttaaaaaaggaaatatccacagaaaattttaagtggccaggcgcagtggctcacgcctgtaatcccagcactttgggaggccgaggtgggcggatcacgaggtcaggagatggagaccatcctggctaacacggtgaaatcccgtctctactaaaaatacaaaaaattagccggacgtggtggtgggcgcccgtagtcccagctacttgggaggctaaggctggagaatggcgtgaacctgggaggtgaagcttgcagtgagccaagatagcaccactgcactccagcctgggcgacaaaccgagactctgtccccccctccaccaaaaaaaaagaaaattttaagtaaaaaaattaaaatatagaaatattaggccgggcgcagtggctcacgcctgtaatgccaggactttgggaggctgaggcaggtggatcacaaggtcaggagatccagaccatcctggctaacgcggtgaaaccccatctctactaaaaatacaaaaacaaaattagccaggcgtggtggctggcacctgtagtcccagctactcaggaggctgaggcgggagaatggcatgaaccagggaggcagagcctgcagtgagccgagatcaggccactgcactgcagcctgggcgacagtgagactccatcaaaaaaaaaaaagaaatattaataacaaaagtgcatctacatatcttattctttcagaaattcctaccagacacaggactataatattttctgaggaagcattttttttgcagctagtaataaaaagtactagtatttaacattaatcaagtacttactacacactggggactattcttagaactttacatgtattaacttctggagctacacaaccaccctttgaatcaaatattgctattatttctatactatgaaatgagcaactgaggcccaaggtttaagtacctacctgaggtccccaaggtaaaaagtggcagaggaaggagttaacacaggaagtctggctccttggcctatgtcttcctttaatttaaaaaaaaaaaaaaaaaaattagctcatgcctgtaatcccagtactttgggaggctgaggcaggcagatcacatgaggtcaggagttcgagaccagcctggtcaccatggtgaaaccccgtctctactaaaaatacaaagcctttgccctgtctattccagtacccccaccccaacagccagttttattatttcgtatgtatcttttgaatttttttttttttttttgagatggagtttcactctcgttgcccaggttggagtgcaatggcgcaatctctgttcactgcaacctccgcctcccgggttcaagcaattatcttgcctcagcctcccaagtagctgggattaacaggcatgtgccgccacgcctggctaattttgtatttttagtagagacggggtttctccatgttggtcacgctggtctcaaactcctgacctcaggtgatccgcctgcgttggcctcccaaagtgctgggattataaatacatattcttattaccccttttcttattccaaatgcatcgtgtatcatactctacattctgcaccttgctttctctcagttaacaatacattttgaagttatttctgtctcagtatataaagagcttcctcctcattcttttgtacagctatgtattattttgttgtatcgatgtacaccaatctcccactgatgggcatgaactgtttttcttttctttcttctctctctctcctttctttctttcttaagacagggtcggccaggcaccgtggttcatgcctgtaatcctagcactttgggaagccgaggcgggccgatcacttgaggtcaagagttcaagaccagcctggccaacatggtaaaaccctgtctctactaaaaatacaaaaaaagtagccgggtgtggtggcaggcaactaatcccagctactcgggaggctgagccaagagaatcgcttgaacctggggggcagaggttgcagggagcagagattgggccactgcactctagactgggcaagagagagagactccatctcaaaaaaaaaaaaaaaaaaaaaaaaagacagggactggctgtccaccaagctggaatgctgtcgccaggatctctgctcactgcagccttgacctcctaggctcaagtgatcctcccacctcagcctcccaagcagctaggactacgggagatctcactatgtcgcccaagctggtctctaactcctggactctagccatcctcctgccttggctcacaggtgtgagccaccaagcccggcctgaggctttatatttaaaatgtgttgggtccccatctccccacacctcaacgccttttctttctcagtctgtactggctcttgcagcttgtctctttccatagtaagtctaggatcagttcccctagttccaaaagagaaaagcctgtccatacttttattaggatcacattattactattattgagacggaatctcgctcttgtccaggctggagtgcagtggcgagatctgggctcactgcaacctccgcctcccaggttcaagcgattttcctgcctcagcctccgcggtagctcagattacaggcgcccgccaccacgcccggctaatttttgtatttttttattttatttttttttagtagagacagggtttcaccatgttggccaggctcctctcgaactcctgatctcaggtaatccacccatctcggcctcccaaagtgctaggattacaggcatgagccaccgcacccgaccaagatcacagtaaattaatacattcacttaagtttgcgcacacttcttaatgtcacatggtatatttatttgttcacatttgttatgccccttagtagtattttaaagttctttcctaatagttctgaacctttaagtttcttccacaatactttatctttttactgctattgtaaatattagttttcttcaactatgtattctaactgatatttgtaaattagaaggctatttatttatagatattaacttggtacccaattactttatttaactttttgtaatttaaaactatgtcaatgacgacagcgggggcggggtgatttccttagaaaacgcatctttggagacgtcagtagcattctccattacttcacaaaatccatacaacctgagaacgcctcgactcattaaggaattaagacacctaggatttagtccagactcatagataaacactgcaacaattaagctttcttcaaaaaatgaggataactgtgcctaacctaaaaccgttgactccctcatcctgggcgccgttatatgggattgcttctcaaagcgtacaatgctgtttagtctagggctttgcttaacagccctatttaagtaccccaaagatggggatttgaatagtctgaagtaggcaccccgaaactaaagttccttcgaaacactctcgtttaattaaaaaaaaaagtcacggtgatttgcatgccactccaattaaaaagaaatgcttttatataaaaactcgttttaaaattattcaccacttagcttttccaccccttcaattttcaagtaaaaaagacgctccaggaagatggcaccgttataattatcagcactttcgacaagggaagtgcagctcaaacgttatacctcaatgctggtctcctacatctccctcttaggcacaatcacacacaatcccgcacccagtttcacattcactcaacaatcccaaacatcaggtcaaactttgaggacaaactcggtcacactcgctcaaacccgcctcagaggcccccatctccgccccgcacgtaggccagaagctcttacacccactccctgccctcgcgccgcgcccctaaagatcaggaatcctcccctttaacctccccggtccgaccgacccgagacgcccagatcccacctcctactttcgcgccacgtggacccaggggccgtactgacccgcggacaaagaccaaaatgtccactcggtgcgctgcgcttgcgcactcggagagcgaggaagcactcccagaagtctccgcgacgcggcccgcctcggtcaccgcggccaggcccaggctggtactgaattaccttctattaccagcaacgtcgcttctcaggccttggactacatttcccttgaggctttactggtcgactctctgtctcctcccctccccccgcgaacttggccgcctccttctgtgacgatggagctcttgaggtaagtagtcctttagcgtcagatgacttcaagcttgctggaaggtctggagtggcgacgccctctccgaagactcgtgggcgcaaaaatgtcaaaacgagccaggccccgactcagagataagagaacgccattctgtccgtggccgatctagctctggactacaattcccagagcccacagcggcctgacgttacgtcgttcttgacgtcgtggcgagctagttagctccgcaaggacccggacgcgaccaggggaggcagaaggtgaggggtctgggagtcctgggcggggccggggcgtgtccggagcctcgaatctgtgcgcgcaggcgggagctggctgcggatgcgccgttctgaatgtgtctttgtggctgtgtggctgggtgtgggtgtctgcaactgtgcacgtgtaaccgcctgtctccagggtgtctggtggtttttgtgtaaccatgtgtgatagagagtatcggggtgcagggtccttgtgaccgggggtgatactgcgtgtgtccccgttgtatatgtggcctgttcgccctgttcctggggtgtgagtacagttgtgactgtgtgaccactgcgggtgtgcggttgtgattcatgtctccaaggtgtgtgcgtggttttggttgtgtgacactgtggccgtgtgcaattgcctgtgcctgtgactgtgtggtgacgccgcttgtgtattcctgtatcccttggtgtgtgtgtttgtgtgtatgtgtgtggtgctgtgtatgcgggagtggggtgccactgcttgtgtgggttgcttgtgtgagtgtgactgtgtgtatgtccacagtgaaagttcagttgtgactgggtgccgtaaagtaccagtgatggcgtgtgtcccctgagtgggtgtgtgactgtgactatatgaggcatttgtgggtgttggtgtgtggggcttgtgactatacgggagtaactgtatcacagtggagagtagattgtgtgactgggtgtgtcttagcgggtgtgtgattgtgactggaaagatattgtgactggaaaggtatagaggtgtctgtgattgtgtcctgtgtctcaggagtggatgtagggccgggtgtggtggctcacatcagccctttgggaggccgaggtgggaggatcacttgagcccaggagttcgagaccagcctggcctgtacaaaaaaaaaaaaaaaaaattaatggctggcacggtggctcacacctgtaatcccagcactttgggaggccgaggcgggtggatcacctgaggtcaggagttctagaccagcctggccaacacgataaaaccctgtctctactaaaaatacaaaaattagctgggcgtggtggcaggtgcctgtaatcccagctgctcagggggctgaggcaggagaatcgcttgaacccaggaggcagaggttgcagtgagccgagatcgcgccatcgcactccagcctgggggacaagagcgagacttcgtctcaaaaacaaacaaacaaaaaattaaaaattatctgagtgtggtggcccacacctgtggtcccagctacccgggaagctgaggtgggaggatctcgagcttgagaggtcaaggctgcagtgagccgtgtttgaaccactgcattccagtctaggtgacagagcgagaccctgtctcaaaaaaataaaagagtggatgtgtggttatgtttgtgtgacactgactgtatgtgcagcaccaagtgtgccagtgactctagtgcttgacccatgcagaacctttgaagttaggacagattctggccctggacaggagtgacctcagccttctgagtgacactggatttaggcagatgcctggtgttctgtgaccacacttccctatatggtaggtaaggaggatggtggttcaaaaatgacctggttgttcatgattccttgctcttaacccttctccaagaaaggtgccaagttcaagtacatcaggttttattcttatttctctgaaatccttcttgtttttcaggacatgcttttctttccttcttctgaaacttcagaaccaccccaccaccaccctcacccctaccaaagtaacctggtctccagtatttgccataggagtaatttactgcgtgccttggagatggactgaaaggcctatatcctccctgctccctgcatacctaatgttcttttaaatttttttctttacttttcattttgaatttaagactttaaaatgtagcaacaatagaattcccatttgctctttttttttttttgagacggagtcctgctctgtcacccatgctggagtgcagtgctgtgatctcagctcactgcaacctccacctcgcaggctcaagcgattctcctgcgtcagcctcctgagaagctgagattacagacaaatgccatcgtgcccagctgattttttgtaattttagtagagacggggggaggggggtttcaccatgttggccagactggtctcgaactcctggcctcaagtgatcctcctccctcagcatcccaaagtgctgggttagagatgtgaaccaccatgtctggtctccattttcctttttgtaactcctttgacacgcctagccaattttttgtatttttagtagagacagggtttcaccatgttggccatttgttttgtagagtctgcagtgtagaatgttcctctctttggaattgtctgatatttcctgttgattaaattcagattctgcctttggggcaagaatactccgaaagcgatgtacccttctcggcgcatcatgccagggacccacgaggtcaattcgttacactatgagtggtattaattttaaccgcttggttaagacggtgattgccagatttctctgctgcaaagtcactgtttttcccattataattgatacatgtcttgtgaagaaatactttaagcctatgtgaatatcccgtttcttatcctcctttcatctattagtcttatccgttgatgacgcttgcctgaaaaagttgttaccagctatttgtcaaatggtggggttttggggtttgtttccatcatcacttctatgtttattttttcttctttttttttttgttttttttgagacagagtcttgctctgtcacccaggctggagtgcagtggcgcgagctcggctcactgcaagctccgcctccctggttcatgcgattctcctgcctcagcctcccgagtagttgggactacaggtgcctgccaccgcgcctggctaattttttgtatttttagtagagatggggtttcaccgtgttagccaggatggtctcgatctcctaacctcgtgatccacccaccttggcctcccaaagtactgggattacaggcgtgagccaccgcgcccggccacttctatgtttattaattagaattgtgtgtgtgtgtgtgtgtgtgtgtgtgtgtgtgtgtgagagagagttggagtttggctcttgttgcccaggctgggaatgcagtgacatgatctcagctcactgcagcctctgcctcctggattcaagcgattctcctgcctcagcctcccaagtttctgggattacaggcacacaccaccacgcccggctaataattgtatttttagtagagatgggatttcaccatgttggacaggctggtctcgaactcctgatctcaggtgatctgcccaccttggcctcccaaaatgctgggattataggcgtgagccacctcgcctggccttattaattagaatcttactgttagaaagatatttttcttctttcccatttttttatttactaaattatttctataagtatagactggaatttcttctataggttataatctcttttattctataggttatatattcattgctatcattttttttttttgctcaaattatcacacatttggccactgggagccccttcaagtcgattcctgtgtcctttcaatgtggcctctttatttactatttttattatttattttctggcaccacaaggtgttccacgttgatgtggtactttccctgccccagtcctggaatctacaaatttcccggggaccattggttccttttattagaaaatgattttttttcagccaggtgtggtggcgagtacctgtagtcccagctactcgggaggttgaggcgggaggattgcttgagcccgggaggcggaggttgcagcgagccaagattacaccactgcattccagcctgggtgatgaaacaagagcctgtctcaggaaaaaaaaaaaaatgattttttgaaaccaaggttagatatcttcattgcttctgagatgtcattgcttctaggtcctctcagctatgaaatgtgtttatatgtatgtatatacaaataattcatgagttcatatagtatctccaatttcagtgcaacactacagggttcattctagccttctctccatttccagatttttttttttttttttttttttttgagacagaattttacttgcccaggctggagtgcaatggtgccatctcggctcactgcaacctccacctcccaggttcaagcaattctcctgcctcagcctcccgagtagctgggattacaggcgcccaccacctcgcccagctaattttttttgtatttttagtaaagacgggttttcgtcatgatagtcaggctggtctcaaactcctgacctcaggtgatcctcctgcctctgcctcccaaagtgctgtgattacgggcataagccaccacacctggcctccatttccttttttttaaatataattttaagattttttgtagagacaagggcctcactatttgcccaggctggtcttgagctcttggcctcaggtgattctccttcctcggcatcccaaagttctgggattatagatgtgaaccaccatgtcttgcctccatttccctttttgtaactcctttctttgacattgaaaaatgtggctcacattaaccataatataatttatttattaaccattatatgtattaatatatataaatatatttgctcagtcctgtgtaaaaagtaatttaagaattgctgacttccatgtaccatacagttctttttgtctttagtcttacagtatatagtgaaaatacagttttctaaaactactttcttccctaaaccctttgtattcataatatttatgtgtaatatagattgttcatttattactgtttgtattttattttgggttcccctcacatcctggttgaatttaatgatttttctgagtatgtgaaacaatcacattgttctaaaagtcagaatcagacaaaaggatttactgagtcatcatttcttctctcccaatcccattgcccattgttttttgttggtttgttttttgttttttgtttttgtttttgttttgagacggagtcccgctctgtcacccaggctagcgtgcaatggcgcaatctcggctcacagcaacctccacctctcgggttcaagcaattttcccacgtcagcctcctgagtagctgggattacaggcatccaccatcatgcccagctaatttttgtgtttttgtagaaatgggctttcactaagttgccaaccgcctcggcctcccaaagtgctgggattgtaggtgtgagccactgcgcccagccccggttctttgttctttctacccagttcccacttacctatttcagtaaccaataatgttactttcttggttttatggttaaataaacataacaaagaatttaccattttagggtaaattacaggcgtaaatgattacgcctgtaatcccagcactttgggaggtcgaggtgggaaaattgtttgagcccaggagtttgagaccagcctgggcaatatgacgaaaccccatctctacaaaaaattaaaaactagccagacgtggtgatgcacacctgtagtcccagctatttgggaggctgaggtaggagaatctcttgagtctgggaggtcaaggttgcaatgagctgtgatcatgccactgcactgcagcctgagtgacagaattagaccctacctcaaaaaaataaataataaaaacattgggaaaaaggcttttgttagagtttttactcagagtgattgctttttcaggaagagattactaaggttaagatggagattcctgtacctgtctagctcccataacttggccaacttatctcagcccctgagcctaggcccttgtgatgtgggatcccaggccctaaagaatgtctgtgaattgcagagatggggaacatttaggcacgtagcttcaagttttactaggtggtgtagagatagctcaactttccagaaggatttgtacaaagttttgatgttggagctctaaaacagcatggttttgctgggtcagaatcaacttgttggctgggcacagtggctcacacctgcaatcccagcattttaggaggctgaagtgggaggatcatttaaggccaggagttcaagaccagactgggcaacatattgagaccctgtctttacaaaaaattttaaaattagccaggtgtagtggcatgcctgtggtctcagctacttgggaggctgaagtgggagaatcaccttagcccaggaggctgaagctgtgattgcgccactgccctccagcctgggtgagagtgagatcctgtccctgccctgccaaaaaaaaaaaaaaaaattgtcctgtaactcataattcacattttgtttcacattatgggtttgtgaaaaatccctttgagacatatagagctggaatcggacagctctgctcttatttctgaagcttcctctttttaaaaattgctctttctcatattgaccaagcgtctgagtctgaatttttatctagtcaaagtatggcctaatttgtgtactggttaggacaggctaagttatgctgtggtggcaaacaacccctgaatctcagtggcttacagagtcacattttatttctgctcatgtacatgtccagtgtggatcagcagagacagggttccacaccaaagaaggcccgccacctttagctgcatcatttgaaaaacagatggtcaccacatgcatgaagagaaaaattggagaattgtgcagtctttctggtgtctgtctctaactgaagtgacagtcatcacctcagctgagatttcattggctagagcagtgcatggccctacctaagtgcaaggggctggaaaatgtcattttctgtgtgccccaaactggataatggtgaaacatagtaatgtcttccacactggctaagacccatttcttttcttttcttttctttttgttgttgtttgtttgttttgttgtttgtttgttatgtatttttttttttgtttgagatggagtctcactctgtcacccaggctggtgtcagtggcacaatcttggctcaccgcaacctccgcctcctggcttcaaacaattctcatgcctcagcctcccgagtaaataggattacaggtgctcaccaccatacgcagctaacttttgtatttttagtagaaacagggcttctgttgaccaggctggtctctaactcctggcctcaggtgatccgcccaccttgatcttccaaagtgccaggattacaggcgtgagccactgtgccccgccccttttaaatataaatcagattatgccattccttggctttaaaagtttcgtaccttcctgttttccttaagaataaaatccaaagttcttacagtggcttacaagctccttgtgatctggcttctagctctctctctgaccctcttcgtctcgcatgttccatcccagctgcccttgtctccttcctcttgttgatcgaggaaagcctgctcctgccttcagacccttgcaattgccgctcctggtgcaaggcgtgcacttccccagatacctgcatttctcactcatccattcaggctgtgcttacctgtcaccttctcagaccaccctctcttcctccaaaactccctctccccttaatcttctttgtttttatctgtaggacatttgccacctgacatctatatatacatatgttgttattgttgttgtttgtgacagagtctttgttgcccaggctggagtgcagtggcacaatatcaactcactacaacctcttcctcctgggttcaagtgattctctcacctcagcctcctgagtagctgggattacaggcatgcgccaccacacccagctaattttttgtatttttagtagagacggcatttcaccatgttggccaggctggtctagaacttctgacctcaagtgatccgcgtgcctcgccctcccaaagtgctgggatcacaggcatgagccactgtgcctggccccacctgacatataattaggaatatcaatatcatgtctatggccataccaccctaaatactcacatctcatcttttttcttttttttttcttcaaattttttgtagagatgggggtcttactttgctgcccaggctggtcttgagctgctgacctcaagttatcctcctgccttggtccctcaaagtgctgagatgacaggagtgagctactgtgcccagccctcaatcccatctatctccgtatgtcagtgtttgttggttgtctcttcccataggatgtgaggtccagccagacacaatggcccacacctgtaatcccagcactttgggaggctgaagtggggatatcacttgaggcaggagttgaagaccagcctggccaacatgacgagtccccgtctctacaaaagttacaaacattagcagagcatgatggtgcacgcttgtaattccagctacttgggaggctgaggcaaaataattgcttgaacccaggaggtggaagttgcagtgagccgagagctcgtcagtgcactccagcctcggtgacagagcaagattttgtctcaaaaaaaagaaaaaaaaaaaaacagaatgtgagatcaactgggacagggacttgaattattttctttcctcgttcctagaacagtgccagttgacacaggagcccagtaaatatgaaagaattctgacttccttttctctgcctccatatgtgtcagatgccagagcctgttgatttaatctcatctacattttgaattcatctctctcctcctcttttctgctgccaatgtcctgggtcaggccctcttcgtgcctgaaaaagtgtaggggcaacccacccctacatctgaaaagtacaagtacctctcagtcaatctttctgactccaaggttacacctctccaaaataacctggccatattggtcctgtcacttctgtctttaaattcttaggtttccttccatttcattaataagtgaaaacctactttttctttcttttttgttttggagagagagtctcactctgttccccaggctggagtgcaatggtgccatctcggctcaccgcaacctctgcctcctgagttcaagcaattctccctgcctcaacctcctgagtagctgggattataagcgccccccaccatgccagctaatttttgtatttttagtagagatgcagtttcaccatgttggccaggctggtctcaaactcctgatttcaggtaatccgcctgcctcggcctcccaaagtgctgggattacaggcgtgggcaccgtgcccggctgaaaacctaccttttttaaaaaatagagatgagggctcactatgttacccagggtggtttcaaattcctgagcttaagcgaacgacacacctcagcttcccaaagaacctaacttttatgcatcagcctgtatttattggtcacctatgtcctccagacactgtggcaagagtgatggttagagtgatgatcagacccactggtccttgccctcatggttttttcattcatacatcttcattttcttttctgtttttttgagacagaatctcactctgtggcccaggctggagtggagtggtgtgatcttggctcactgcaacctccgcctcccaggttcaagcagttctcccatctcagcctcccaagtagctggataccggcacgcaccaccgtgcctggctaatttttgtatttttagtagagacagggtttcaccatgttggccaggctggtctcaaactcctgacctcaggtgatcagcccacctcggcctcccaaagtggtgggatgacaggcgtgagccaccacacctggcctatacaccttcattttctaacccctgatgtcatctccagcattatctgcctctagattctagagctaattaaatttaaattaaattaattaaaataaaataaaaactttagtttctcagacatactagccacatttcatatgctcaatagccatctatgactacaatatttatagcacagatttgaagatttccatcatcacagaacattatttggacagcactggtctagacctttcttcaaactacacaactcattccaaatcattcttagtctcccaaatacaccatttgctttcagtccagtgtttttgccactgcatttcactctgctcacaatattctctgtcccttttctgcctattaaacttccctgaggtttcagaacccaattcctattctacattttacagaaaagttttcttgacaccattcccattcattaagttagtcttccttagctgggctcggtggctcacacctgtaatcccagcactttcggaggccgaggtgggcagatcagttgagctcaggagttcaagaccagcctggccaacatggcaaaacccaatctgtaccaaaaatgcaaaaattagccaggcgtggtggtgcatgcctatggtcctagctacttgggaggccgaggtggaaggatcgcttgagtatgggaggcagaggttgcagtgatccgagattgtgccactgcactccagccttggtgacagagtgaaaccccatttcaaaaaaaaaaaaaaaagtatttcttttgacacaccccctacaggaagcttcttggacctctaattagatcagatttaatacccttgttaggccaggcacagtagctcataccctgctaaccccaacactttgggaggccaaggtgggcggatcacctgaggtgaggagctcaagaccagcctggccaacatggtgaaaccgcgtctctactaaaaatacaaaaaatcagccaggcgtagtggtgtgcgcctgtactcctagctacttgtgaggttgaggcgggagaatcacttgaacctgggagacagaggttgcggtgagctgagatcacacctctgcactccagcctgggcaacagagtgagaccctgtctcaaaaggaaaaaaagaaccctccttaaaactctgatttctcattcccttgagatgtatgccattcacaggacttcggactcagcaactgccagcctcacagtcaatggggaagtgatgttctgcagaaaagcagtagatggtcggaaggtagtgagttatctccattgattgttcacagtcagttatgaattgaactccttgttctattcttccccctcttctcactactgtacttgtctttttttttttttttttttgagacagagttttgtttttattgcccaggctggagtgcaatggtgcgatctcggctcaccacaacctctgcctcccgggttcaagcgattctcctgcctcagcctcccgagtagctgggattacaggaatgcgccaccacgccccgctaattttttgtacttttagttgagacggggtttctccatgttgattaggctggtctcgaactcccgacctcaggtgatccacctgccttggcctcccaaagtgctgggattacaggtgtgagccaccgtgcccagctgtctagttttaaaaaagaatgaaagcagtagggagggctcagatgagaaataaagagtgctgggccaagagacttctagaaattgagttcccatggagggcagtactctggatgtgcgggtatgcaagcaagatgcctgtattactgaggctttcttgctcctgtctggtgagtatagctggggctggagacattgacagagcctatggtatgcatggtgtagtcccattttggacttggaaggaggaagtggagccagtgagatgcccaggaggttttgcctgttgagcccagagaagctagaagacttcgtttagggatgtcttttactcaagatttggcctgcatagatggtctgtgttcctagcctgatggtgctgtcctcatccttaggggtcaagtgagtgagtctgagtcgtaagatccttgctgtaatttggagcaggtgggagccttctaggccccatctagggccaagtttagcatcactaagatgggggactgtgtcagctgtaatccctcccttggtggtgcctgggttctgtgtcagtgctggagcacatctgccttgaaaccatctttctgcttttgggttccttactttttaggaagggactgggttttcttaactctgcagtttttttttgttgttgttgttgttgttttgttttttgtttgtgtgttttgagatcgagtctcgctctgtcgcccaggctggagggcagtggtgcagtctcggctcactgcaacctctacctttcaggtttaagcaattcttgtgcctcagcctcccaaggtgctgggtttacaggcgtgagccaccatgcctggccaactctgtagttcttaatgttagttcttgtgtggtaggacatggagaggtgggagaagcagatccgagacattggaagtacaattcttttaagctcatctatttgggagtgctgaggcaagctcagtttatcagaggttaccccatctccccccattttgctttttcaggactctgcacttgtccaagagaagaatccagagaaatcagagcaggtcaaatagttctaaaagccatggcccaggtatgttgaaattccttctatccttagaatgatctgtcttcccgccagattatatggacactgtgttctttatcctggaacttccctgtatccttctcacagttggtccattccaggagatgagtaatggtgcccaagtccctcggtggccctctcctctccagcactgtccacgtgtctgtagtcctcttagcagagcataggctaggcgtagtggcacatgcctgtaatctcagcactttaggaggctgaggtgggccgattgcttgaggccaggagttcgagaccagcctggacaacatggtgaaaccccgtctctactaaaaatacaaaaattagccgggcatggtaccacacacctgtagtcccagctactcaggaggctgaggcaggagaatcgtttgaacccaggagatggaggttgtaggaagccaagatttccccactgcactccaccctgggagacagagcgagactctgtctaaataaataaataaataaatgctcttagcagagcaccagtacagtagaaataccttctcttgagagaaatatgagagtctcccttatcataactgtggttgaatggggccaaacatgaaataaagtagtttcatcttttccattgtcttgggtggtttctttcttctgtgtttttgttttgtttcgttttttgagacagggtctcgctctgtcacccagactggagcacagtggtgcagtcatggctcactgcagcctcaacctcctgggcttaagcaatcctcccacctcagcctcccaagtagctaggaccagagccacatgccaccactaccagctaattttttaagtttttgtagagaccaggtctcactgtgttgcccagactggtctcaaactccggggctcaattggttagcctcctagtactgggattacaggcatgagccactgctttattctttattctatttttaaatgtcaccccctctttaaaaagtcacaagacacttaataccgtcaaatatatatatatttatatggctgggtgcagtggtggtgggtgcctataatcgcagctacttgagaggctgaggtaggagaatcactttaacctaggaggccgaggttgtcataagcagagatcacgccactgcactccggcttgggcgacacagcgagactctgtctcagaaaatatatatatatgctgggtgtggtggctcctgcctgtaatcccagcactttgggaggctgaggcgggtggatcacgaggtcaagagatcaaaaccatcctggccaacatggtgaaaccccgtctctactaaaaatacagaaattagctgggtgcagtggcaggtgtctatagtcccagctactcgggaggctgaggcaggagaatcgcttgaacctaggaggcagaggttgcagtgagccgagattacgccactgcactccagcctgggtgacagagtgagactccatctcaaaaaaaaaaaaaatccaactttcttttagttggccagtcattaaagatatttacaaaaatgtaaaacaatgccactaaattttttgattttgacaatagagttatgtttcataaaatgtatgttactgatattaacaggtaacaggtttatttgttgttaaaatatttttaaaatttctcggctggatgcattgtctgatacctgtaatcccagcactttgggaggctgaggcagacagatcacctgaggtcaggagttcgagaccagcctgaccaacatgatgaaactctgtctgtactgaaaatacaaaaattagccgggcatgatggcgcatgtctataattccagctgctcaggagactgaggcacgagaatcgcttgaacctgggaggcagaggttgcagtgagccaagattgcatcactgtactccagactggctgatagaatgagactctgtctcaaaaaaaaaaaaattatatttctttcttttaatttctaaggtgggaaaatgttgatagatataaccatcattaagaaaagttctggccaggcccagtggctcaccctgtaatttcagcactttgggaggctgaggtaggaggatcgcttgagaccaggagttcaagaccagctggggtgagaccccgtctctacaaacaaaaatttaaatttaaattttaaaacacaaagttaggcatggtggctcacacctgtaatcccagcactttgggaggccaaggcaggtgaattacctgagctcaggagtacaagaccagcctgcacaacatgggaaaaccctctctctacaaaagatatgtatatacgaaagttagccaggtgcagtggcatgccacctgtagtcccagctactcaggaggctcagacaggagaatctcttgagcctgggaggcagaagtgcagtgagccgagatcatgccactgcactgcagcctgggcgacagacttagaccctgtctcaaaaaaaaaaaaaaaaaaagagaaagaaagaaattcatttaaaagggtgttatgttttacccattatcagggtgtttgcaatagaagcccacagccttctctctccacatagacatggtaggagttgtagtgattggtgttggtctctgtatgtggtaacatctgttttgtgagacctttaggaagggggctgtgattgggaacttcagtgacggaacactcttcagtcttgcaaggatatgtatgagatgaataaccataaaatggtccattttgaggttgaacatatgtgttggttgtgggccacatttatgtaactcaggtataccctccatcagctttctggtttcaggagcaaggaaaagtggacagtgaaggaatgtgaatattagcaagcgtataataaaccctgaagattttacacatcttgtgtttttaaatttttttaatttttaatttttgtcagtacatggtatatatatttatggagtacatgagatgttgtgatacaggcatgcagtgtgaaataagcacatcatgaagaatggggtatccaacccctcaagcatttatcctttgagttataaacaatccagttacactctttattttaaaatgtacatttaggctgggcatggtggctcacgcctgtaatcccagcactttgggaggccaaggcaggtggatcacttgagatcaggagttcaagaccagcctggccaacatgaggaaaccccatctctactaaaaaatacaaaaattagctgggcgtggtggtgggcacctataatcccagctactctggagactgaggcaggagaatgacttgaatcccagagcagaggttgcagtgagccgagatcatgccactgcactccagcctggatgacaaagcaaaactccatctcaaaaaaaaaaaatgtacaattaagttcttattgactatagtcaccctgttgtgctatcaaatagtaggtcttattctttctattttttgtacccattaaccatccccacctcccactcagcctccctctacccttcccagccttcagtaatcatccttctactctctatgaccatgagttgaattgttttgatttttagatccacaaataagtgagaacatgcagtttgtctctctgtgcctggcttacttcatgcagcataataacctccagttccattcatgttgcagatgaccagatctcattctttttgtggctaaatagtactctattgtgtatatgtaccacattttctttatccattcatctgttgacagacacttgggttgattccaaatcttggctattgtggacagtgctgcagcaaacatggagtgcagatatctcttcgatatactgatttcctttctttctttcttttttttttttaaacggaatttcattcttgttgcccatgccggcagtggtgcaacctctgcctcctgggttcaagcgattctcctgcctcagcctcccaagtagctgggattacaggcgcacgctaccatgcccagctaattttttgtatttttagtagaagtggggtttcaccatgttggccaggctggtctcgaactcttgacctcaggtgatctgcctgccttggcctcccaaagtgctgagattacaggcgtgagccaccacgcctggcctactgatttcctttcttttgggtagatacccagcagtggtatcgctggtccacaaggtagctccatttttagttttttgaggaacctccaagttgttctgcatagtgattttactgatttacattcccaacaaagtgtacaagggttcccttctgttcacgtcttcactagcatttgttattgcctctcttttagatataagccactttaacatacacatcttaattaagctaagtgcacgaaaataatggaatcgacgtatcttacaagacataacatacgatattatgcaaccaataacagtctctgtctttctgcctgcctgcctgccctcctttctaacttccttctctcttccttctttcattcttatttatttatttatattgtttttgagatggggtcttgctctgtcgcccaggctggagtgcagtggcgcaatctcagctcactgcaacctccacctcgcgggttcaagcgattctcctgcctcagcctccctagtagctgggactacaggcacgcaccatcatgcccagctaatttcttttttgggggttttgttgttgttgttgttgtttgtttgttttttttgagacagagtctcgctctgtcacccaggctggagtgcagtagcacaatctcagctcactgcaacctctgcctccggggatcaagttattatcttgcctcagcctcccaagtagctgggattacaggtgtgcactaccacgcctggctaattttttgtagttttagtagagacagggttttgccatgttgaccaggctggacttctttttttttttttaaacagagtttcactcttgttgcccaggctagagtgtggtggcacaaatcagcacactgcaacctctgcctcccaggttcaagcaattctcctgcctcagcccctcaagtacctggattacaggcacctgccaccacgcgcagctaattttttgtatttagtagagacaggatttcgccatgttggccaggctgttctcgaactcctgacctcaggtgattcacccacctcagcctcccaaagtgctggaattaccaccgtgcccagctggcaggctggtcttgaactcctggcctcaagtgatcaacccgtctcagcctcccaaagtgctgggattacaggcataagccaccacgcccagcctggactcatttttgaaagacattagatttgccaggcccaggtttgctgtgtgttttgtgtatttcactatttcgcttatttatgggaccccacttagctctttcctgatcattcccagaccatggaagatagaagtgtcctgctgtctgcagatagtttatgtgtagccacaggaatgctcaagaatatatagacctctagtcatataactgtgcttattatacttccttcatgccacaggcctgcagctgtagattctgtcatgcttcattacctccttcctccagtacccttcttcatctcctccaatgtccttggccgagtgcagtggctcaggcctgtaatcccagtgctttgggaggctgaggcaggaggatcacttaagaccaggagtttgaggccagcctgggtaacatagtgagattctgtctctaccaaacaaaatattaaaaatcaaaattaggctgggtgcagtgactcacgcctgtcatcccaacactttgggaggccaaggcgggcgtatcatgaggtcaggagttcaagattgactaacatggtgaaaccccatctctactaaaaatataaaaattagccaagtgtggcggcgcacacctgtaatcccagctactcaggaggctgaagcagaagaattgcttgaacccaggaggaagaggttgcagtgagccaagatcgtgccactgcactccaacctgggtgacagagcgagactctgtctcaaaaaaaaaaaaaaattcttcatcttctcattaagatatttcctggataaattagcttgtcaaaacctgaccctactcatcaattttaacctcatttaaaatgggtcaggtgggctgggcacggggctcacgcatgtaatcccagcactttgggaggctgaggcgtgcagatcatgaggtcaggagatcgagaccagcctgaccaacatgatgaaaccccttctctactaaaaatacaaaaaattagccgggcacagtggcacgcgcctatggtcccagctattcgggaggctgaggcaggagaatcacttgaacccaggaggcggaggttgtggtgagctgagatcgtgccattgcactctagcctgggcaacaagagcaaaactctgtctcaaaaaaaaaaagagaaaagaaaaaaaattgagaacactggggcaattagaatttaatctgttgactgggaaattattgatacttttattaagtatgataatgatattctgattattatgtgtttttctaagagaagttgttgataatctgttggatactaaagtatctgtgggtgaagtattatgatgtttggcatgtgggatttgcctcacagtacatggggaataaaagatagaagggaagagataaaacagggtacaccttgttaactgttgaagcagactggtgcatatcggggggccattactgtcaactattctctgtacttttgtgcatcttgaaaattttcataataaatgaaaaaagtttcttaatgtacactaatgcgtgggtttattgtttcagggactggtgacattcagggacgtggccatagagttctctctggaagaatggaagtgcctggaacctgctcagagggacttgtacagggaggtgactctggagaactttggtcacttggcctcactaggtaaggagattgtatcacacgggccagacggaaagcaaggcaacagggactacaaccatggggtgcagtttccatctctgcctaaatgggtgaggagaggaaactgtcacaggagacgctacaaactacagccatagagagaggcccggccagcaatagctgtagctacttccagagctcctgggtcaaaggagggagagaggagggtaagaaatgcctggtgctctctctcctcctgtccactgatctccagctgatgctttctgtctgccaaagccaatgagaagccatagggcatgggtaatgcagtccttacggtgagctgtcgggatcccagagctgggcacagaacaaggccaggagcatcaaggaatagattggaggggaaggaggggttcatggagagtgatcaccacacatttactccacataattcaggactacccttctggaatttctggtttcttcattatgaatttctagggcaacttacaagtttctgactgaatttctggtgactgaaaaattgttttgtgctttgtggaactagaaacaagtcattctgctgggcagctcggtcttcctatcctttggacaaccttccacctaccttgtaattgcgtcttttccatggtgaccagggaactgggtttggattttggagcggtctgatcacaccccatttcttttcctgtaaacaggactctccatttctaagcctgatgtcgtctccttattggagcaagggaaagagccctggatgattgcaaatgatgtgacaggaccatggtgcccaggtaagcgagggccgatttcgacaggggaaggtccctggatgagtcgactgacaggagtaacttgagttactgtgggaagttccctcaaagccctactgtggaagaaaggcctgaaacgtgaagatgtggcgagtaaagactttattagcgtcagcttccaagagaaccttggcctactcccattaattcctctctggtctctgttctctcacattttcctttctttttaaaaagagatgtacctatttcttccccagtggccaactttttacctgtactttgtatcctttttctttaagagacaggatctcactctgtcacccatgctggagtgcagtggcgtgatcatagctcactgcagcctccatctcttgggcttaagcgatcctcccactttgggaggccaaagtgagattacaggtgtgaaccatggtacctagccagatccttttttctacaagtgtcttcatcccttagaaaaacttatttttggccgggcgcagtggctctacgcctgtaatcccaggactttggaaggccaaggcgggcggatcacgaggtgaggagatcgagaccatcctggctaacatggtgaaaccacatctctactaaaaatacaaaaaaattagccgggtgtggtggtaggcgcctgtagttccagctactcgggaggctgaggcaggagtatggcgtgaacccgggaggcggagcttgcagtgagccgagatcgcgccactgcactccagcctgggcaacagagcgagactctgtctcaaaaaaaaaaaaaaaaagaaaaaagaaaaacttattttcttggccaggtatggtggctcatgcctgtaatcccagcactttggcaggctgaggtgggtggatcacctgaggtcaggagttcaagaccaccctggccaacacggtgaagccccgtctctactaaaaatacaaaaattggccagacgtggtggctcacacctgtaatccctgcactttgggaggctgaggcgggcggatcacgaggtcaggagatcgagaccatggtgaaaccctgtctctactaaaaatacaaaaaattagctgggtgcggtggcagacgcctatagtcccagctactcaggaggctgaggcaggagaatggcgtgaacccaggaggcagagcttgcagtgagccaagatcacaccactgcactccagcctgggcgacagagcgagactccatctcaaaaaacaaacaaacaaacaaacaaaaaacttagctgagcatggttgtgggtgcctgtaattccagccactcgggaggctgaggcaggagaatctcttgaacccatgaggtggagattgcagtaaaccgagatcatgccattgcactccagcctgagcgacaaaagtgaacgtctatctcaaaaaacaaaccaaaaaaaaaaccattttattggctgggcacagtggcccatgcctgtaatctcagcactttgggaggccaaggtgggaagatcacttgaagccaggagttcaagaccagcctggccaacatggtaaaaccccatctctactaaaacctccgcctcccagattcaagtaattctcctgtctcagcctcctgagtagctaggattacaggtgcacgctaccacacctggataatttttgtattttcagtagatacagggtttcactatgttggccaggctggtctcaaactcctgagctcaagtgacctgcccacctcaaccttccaaagtgctgggattacaggcatgagccactgcacccagccagctgatcctcttaatgagtatttttttgtagattgtctctcactttacgtttgtctaatgttttctcacagtgagattctgcattttagcaagaatatcacagaagtgatgttatgttcttctctgtatatcacatatcagacatcaacatggcttattactggtgctgttcagtttgatcacttggtaagataggtgctgttcacactttgggaggccaaggcgggcgaatcacaaggtcagcagttcgagaccagcctggccaatatggtgaaaccccgtctctactgaaaatataaaaattagctgggcgtggtggcgggtgcctgtagtcccagctactcaggaggctgagacaggagaatcgcttgaacccgggaggcggaggttgcagggagccaagatcacgccactgcactccagcctgggcaacagaaaaaaaaaaaaaaaagataggtgctgttcagtttgatcacttggtaagatagggcctgtcttgtttctcccctgtgaagtttccatccgtaattgataaatatcttatggcgaaatactttcacactaggcaaatgtgctgcttttcctcctcccactccgattttggcatccatcactggaccttgtctgcaccagttattactctgtcacttgtctaatgttgattttctgtgtcccttattccttcaccatttattaattggaattcttcaataaggaagaactgtccctagccctcttccattcacttgttcattcaatgatttctttatatcacgatgagttcgtgggtatttattttattctatgggctgtagtcactactttcattgtttatttcattgctcgaatcgttcaggctttggcccttgaaaactcgttaagcttggctcctgggttctctcaacacacccacattctcttttatatacttccacattttctggtaccacagcatgttccatggttatttcagatttttcctgcctcagccctgaaatcagccagttctcaaaagaatgctggttccttttattgaaaaatggttcaggaggcagaggtagctgagagccgagattgccccactgcactccagcctgggcaacaggagtgagactccatctcgggaaaaaaaaaaaaaaaaaagaaagaaaaatggtaggaaatcgatcatatctttgaactttttctgagcaaagcaagaccttaacatctttaccataccatcttttacttccctgtgccctagaccaggggtcggcaaactgcaatctgtgggtcaaatgcagtccataaccagtttttcatacagccctagagccaagaacagttttgatattttgaaagtgttaaaaaaaaaaaaagaatatgctgtagagactttatgtgttcaacaaaccctaaaacatttaccattgggcccttcacagaaaaagtttgtttttatgtgtttttttttttttttttttgagacagagtctcactctgtcacccaggctggagtgcagtggcacgatctcagctcattgcaacctcagcctcccaggttcaagcaattctcctgcctcagcttcccaagtagttgggaatacaggagtgcgccaccacgcccagctaatttttgtatttttagtagagacaggatttcgccatgttggccaggctggtctcaaactcctgacctcaagtgatccacccacctaggcctcccaaaactcccaaagtgctgggattacaggcatgagccaccgcacctggccttcccactttcacttccaaggacccttgtgaatacattgtgtccacccagataaactgggataatctcgccatcttgtggtggtcaactgattagcctttttttttttttaattttttttttttgagatggagtttcgcccttgttgtccagactggagtgcaatggcgagatctccgctcatcgcaacttccgcctccctggttcaagtgattctcctgcctcagcctcccgagtagctgggattacaggcgcccaccaccacgcccggctaattttgtatttttagtagaggcggggtttctccatgttggtcagactggtctcaaactcccgacctcaggtgatccaccctcctcggcctcacaaagtgctgggattacaggcgtgagccactgtgccctgccctgattagcaatctgaattccaactccccttgctgtgtgacaacattcataggttccaggaataaagacacagacatctttgagtgccgttatcccacctaccacattctgtatgtattttttttagcaaagttaattgaatatgcataaattaacaatgtatggacgggcgcggtggcacacacctgtaatcccagcactttgggagaccagtaggtggatcacttgaggtcaggagttcgaaaccagtctggccaacatggtgaaaccccatctctactaaaaatacaaaaattagccatgtgtggtggcaggtgcctgtaatcccagctactcgggaggctgagacaagagaatcgcttgaacccgggaggcggaggttgcaaggaaccaagatcgatcgcgcatctttattccagccttggcaacagaacaagactccatctcaaaaacaaaacaaaacaaaataaaacaaaaacaactttatgggtacgactctactgtaattccgtattaaaatattaagcctattgctgttgattccataaaagtgttcttgtctttcacagaatatttggttggtgtgttttctaatttcttgcagttctgaaaaataataatcttttatttattagatttttaaaaattgtgataaaatatacattacataaggggccgggtacagtggctcatgcctgtaatcccagcactttgggaggctgaggtgggcagatcacctgagatcaggagttccaggccagcctggccaacatggtgaaaccccatctctatgaaaagtacaaaaaaaaaaaattagccgggcatggtggcacatgcctgtaatcccagctacttgggaggctgaggcaggaaaattgtttgaacccgggaggcggaggttgcagtgagccaagatcacaccactgcgctcccagcctgggcgacagagcgagactctgtctcaaaaaaaaaaaaaattacataatatttatttatttatttttgtgagacaggttctggctctgttgcccaggctggagtgtagtagcacgatctcggctcactgcaacctctgcctcccagtttcaagccatcctcccacctcaggttcccaagtggctggtgctacaggcacatgccaccatgcctggctaagtagataattcagtggcatttagttcattcacagcattatacactctgcttccagagcttatgcatcatcccaaacagaaactctgtacccattaaacaataactctattttccttcctccagtccctggtcacctctgttctactttttgtctgtatgaatttgcctattctaggtatctcatgtaaatcatccagtatgtggccttttgtatctggcttatttcactaaggataatgttttatccaagttgtagaatgtctctgaattttattctttttatggctgaataatattccattgtatgtgtgtatgtagatgtatacatgtataaatactaatatacatgtgtacatattatatacacactttgtttattcactcatctgttttttgttgttgttgttgttttgtttttttttttttttgagacggagtctcactctgttgcccaggctggaatgtagtggcatgatctcagctcactgcaacctccacctcccagatgcaagagattctcctgcctcagcctcttgagtagctgggactacaggcacccgccaccatgcctggctgattttagcatttttagtagagacggggtttcgccacattggccaggctggtctcgaactcctgacctcaactgacctgcacgcctcagcctcccaaagtgctggggttacaggcatgacctaccacatgcggccccctcatctgttcttggagttgtttgttttttgtttttaatttttttttctctctctcttttatttttccttgaagcccttgagtctcactttgtcgcccaggctggagtgcagtggcgggatcttggctcactgcaacctccgcctcccaggttcaagtgattctcctgtctcagcctcctgagtagctgggactacaggtgcacaacaccatgccaggctaattttttgtatttttagtagagacgggtttcaccgtgttagccaggctgggctcgaactcctgacctcatgatccatctgtcttggcttcccaaagtgctgggattacaggcgtgagccactacgcctggcccctaaatttatattctttataaatttttatcatcttggcctatttctgagaaaggtgaattgaaatctccaagatgacgattttgttaatttcttcttgtgtgtcttttgaattttgcattatatgtttggaggctgggccaggcgcggtggctcacgcctgtaatcccagcactttgggaggccgaggtgggcagatcatgaggtcaggagatcaagaaaatcctggctaacacagtgaaaccccttctctactaaaagatacaaaaaatcagccaggcgtggtggcacacggctgtagccccagctactcgggaggctgaggcaggagaatcacttgaacctgggagccagaggttgcagtgagccaagattatgccactgcactccagcctaggcgacagagcaagactctgtctcggccgggcaccatggctcatgcctgtaatcccagcactttgggaggccgaggtgggcggagcacaaggtcaggagatcgagaccatcctggtcagtgaaaccccatctctaccaaaaatacaaaaaattagccaggcgtggtgacgggcgcctgtggtcccagctactcgggaagctgaggcaggagaatggcgtgaatccgggaggcagagcttgcaatgagccgagatcgcgccactgcactccagcctgggcgacagagcgagactccgtctcagaaaaaaaaaagagactctgtctcaaaaaataaataaaaataaatatatatattaggaggctattaggtgtatataactttagaaacataaatcttcctgctgaatggaattactttcttgattatagagctaccctgcttaacccaaaatgatgatttctgtttttaaagtctatttttttttttttgagatggagtttcgctcctgtttcccaggccggagtgtaatagcacgatattggctcaccgcaacctccgccccctgggttcaagcaattctcttgcctcagcctcccgagtagctggaattacaggcatgtgccaccatgcccagataattttgtatttttaatagagacagggtttctccatgttggtcaggctgatctcaaactcccaacctcaggtgatccacccatctcagcctcccaaagtgctggggttgcaggcatgagtcaccgcacccggccacaccttttattttcaaacaccttaggtcttcatgtcttaaagtgtgttacttgttactactgtgcacctagattttggtattttatccaatctgacaaatgccgtcttgtcttttttttttaaacaagttcttgctctgttgcccaggctggagtgcagtggcactattctcggctcactgaacctctgtccctgggctcaagccatcctcccacctcagccttctgaatacctggaaacacaggtgcctgccaccatgcccagctaattttttgtgtttttggtagagatggggttgcaccatgttgcccagtctggtttcgaactcctgagctcaagtgacccacctgcctcagcctcctaaagtgctgggattacaggcatgagccaccacgcccagctgggttggtttcaatggttagtgaaaaaggcagtatttccatctttggggaagattcaggaacaagaaaacaaacagaacagcagatgaatatgtaaatgaaaatctaattacaacaaaagtgttacagagtacaagaaatgggagaaaggataaaggcgtgtgtttagggctgtcaggctgagagctttcttgaaagtgtgagtttttgccgggcatggtggctgacgcctgtaatcccaatacttttagaagccaaggcggctggatcacgtgacgtcaggagttcaggagaccagcctagctaacatggtgaaaccttgtctctaataaaaatacaaaaattggccgggcgtggcagcacatgcctgtaatctcagctactcgggaggctgaggcaggagaatcgcttgaaccccagaggcagaggttgtggtgagctgagatcgcaccactgtactccagcctgggagacagagcaagaccccatgtcaaatattaaaaaaaaaagacaagccaggcacagtggcaaacgcccgtaatcccagcactttgagaggccgaggtgggcggattacctgaggtcaggagtttgagaccagcctggccaacatggtgaaactccatctctactaaaaaagcaaaaattacccaggcatggtggcaggcacctataatcccagctactcgggaggctgaggcaggagaatcacttgaacctgggaggcagaggttgcagtgagcgcctgggggacagagtaagactctgtctcaaaaaaaaaaaaaaaaaatagagagtgagttttcatctgagaccttaaggatgagaaaagcagcaaaaagcccaggacaggattcttgatagatggaagaacctgatgagagatctgagatggaaaaggcctagatttattttacatgctcatagatggctggtggttttgtacactgggaggaaaggggagaatgttcaatgtgaagaggccctgctcttgctgagacacagtggtgacaaaaacaagcagggatctgctttgccaagagccctgtgagccatggcagtgagtttgtaattcttttttttttttttttttgagacagagtttcgctctgtcacccaggctggagtgcagtggtgcgatctcagctcaccacaacctctgcctcccggattcaagtgattctcctgcctcagcctcccaggtagttaggattacaggcatgtgccaccacggccggctaattttgtatttttagtagagacagggtttcttcatgttggtcaggctgatctcgaacacccgacctcaggtgatccacccacctcagtctcccaaagtgctgtgattacagacatgagccactgcacccagcccttttttttttttctgagatggactctcactctgtcttccaggctggagtgcagtagtgccatcttggctcactgcaacctctgcctcctaggttcaagtgattcttgtgtctcggtctcccaagcagctgggattataggcgcctgccaccatgcctgctaatttttgtattttttagtagagacagggtttctccatgttggccaggctggtcttgaactcctgacctcaagcgatccatttgccttggactcccaaagtgctgggattaaggcataagccacctcgcctggcctttggaattaattcttaatgcaccgaaatgggaaggcagtgaaatgtttaagcagagattttcattttgatggacatcaactttatgtggtgggaagtgttgaaaatatagatgccttatttacatgaaatgtccagaataggcaaatttatagagacagaattagtagctctgtgccagtaatggttgccaggggctggagggaatagggaatggggagtgactgcttaatgggtgggggggtttctatttggagtgataaaaatgttctcagccaggcgaggtggctcacgcctgtaatcccagcactttgggaggccagggcgggtggattgtttgaggtcaggagttcaagaccagcctggccaatatggtgaaaccccatctttactaaaaatacaaaaattagctgggtgtggtagcagtgcctgtaatcccagctactcgggaggctgaggcaggagaatcacttgaacccaagaggcggaggttgcgtgagccaagattgtaccactgcattccagcctgggcgacagagcaagactccgtctcaaagcaaaaaacaaatttagaacccctggcttaatttgtcttcttgctcccttctggcaccatgtgagctcttcacatggtgtgctttcatctgcttttttgaaattgcataatatttgagatgtatataaggcattcactttttatggttatttatttttgtctccctgttctactatagttttttttttttttttttttttttatgagacagagtcttgctctgtcgcccaggctggagtgcagtggcgcaatctcggctcactgcgacctctgcctcccaggttcaagcgattctcctgcctcaacctccctagtagctgggattacaggtgcctgccaccaagtgtggctaatttttgtatttttaatagagacagggtttcaccatcttggccaggtgaactcccgaccttgtgatccacccgcctcagcctcccaaagtgctgggattacagatgtgagccaccgtgcctggcctctactatagaattttttatttctcatagagaaggatcacagcttgtatttatctttttcttatttttcagacttggagtccaggtgtgagaaatttctacaaaaagacatttttgaaatcggggcattcaactgggagataatggaaagccttaaatgcagtgacctggagggctccgattttagagctgactgggaatgcgaaggccagtttgagagacaagtcaatgaagagtgctattttaagcaagtgaacgtcacctatggacatatgcccgtgttccagcatcacacgtctcacactgtacgtcagagcagggagactggtgagaaactgatggaatgtcatgaatgtgggaaagcatttagccgtggctcacaccttattcaacatcagaaaattcacactggtgaaaaaccctttggatgtaaggaatgtgggaaggccttcagccgtgcctcacaccttgttcagcatcagagaattcacacgggtgagaaaccttatgactgtaaggactgtgggaaggcctttggtcgtacatcagaacttattctacatcagagacttcatactggtgtcaaaccttatgaatgtaaagaatgtgggaagacctttaggcagcattcacagctgattctgcatcaaagaactcacacaggcgagaaaccctacgtatgtaaagactgtggcaaggctttcattcgtggctcccaactcactgtgcatcggagaatccacacaggggccagaccctatgagtgtaaagaatgcgggaaagcctttagacagcactcacagctgactgtacaccagcgaatccacactggtgagaaaccctacgagtgtaaggaatgcggaaagggctttattcacagctcagaagttactcgacatcaaagaattcattctggggagaaaccctatgagtgtaaggaatgtgggaaggccttcagacagcacgcacagctcacacgacatcagagagtccatactggcgacagaccctatgaatgtaaggactgcgggaaggcatttagtcgtagctcatacctcattcaacatcaaagaattcatacaggtgacaaaccctacgaatgtaaggaatgtgggaaggcctttattcgtgtttcacaactgactcatcatcagcgaattcacacttgtgagaaaccctatgaatgcagggagtgtggaatggcctttattcgtagttcacaacttaccgaacatcagagaattcatcctggtatcaaaccttacgaatgtagagagtgtgggcaggcatttattcttggctcacaactcattgaacactacagaattcatactggttagaaagccttgagtgtaagggataaagataagcctttatgtggagttcacatctggctcagtactaggtaatttttaatgtagtgtaattaatgtcagaaaacacctgtcacttccatcatagaacatcagaaaactcacacccaaagaaaattaaataaatgtgggaattctttttgcctcactcactgtttcctaagcatcagataatctatgctaaaaaaaaatgaatatagaaaagctgcttcttgccattcaaaatatgttaaatttctgacaattcctaatacaaaaatgacccgattaaaagattctgtggccaggcgtggtggctcatgcctgtaatcccagcactttgggaggccaaggccggcagatcatttgaggtcaggagtttgagaccagcctg

SEQ ID NO: 399 - DNA, 99208 bp, Homo sapiens
  source 1..99208: mol_type = genomic DNA; note = NC_000013.11:57630104-57729311 PCDH17 [organism=Homo sapiens] [GeneID=27253] [chromosome=13]
agtcagtcagcaagagacgctggggagagagcagggatcgcgagcccggcggatgcggcagcggcggaaggcggctggggagacgctactccaactgttgaattgaattttcacctttcctttcatccgctgctttgcttgcggagatggatttatttgctttgaaatccgcatatctttctcagactgtggggtgatcccggcagacaccagactgaaagagaccacccgtgacagaaaaggaggaattaaaaaaaaaaaaaacctccacaacagactgcacaattaactgtacacatcgatgttggactttgtgaatagaaaaaattgagaggaaaatcttgaactatgatgcgaggctaagctgggaacaattactggaaacctgattttgtttttccttttccaagactctgaaaaatttcggggtacctctcgcctaaccaagaggaaaggtttaaaaaaaataaacaaaataaataaaccaatacacctagcaaagcagacgccttgttttccagaacctcggactccggcagaaagaggtagagtaaaagtgctgctagattcagcttcaccttcttccctccatccttttctcttgcattttctttttccccaaaaacatgaatctggtttttctttctatagactgagtcagagaaagcgttaggaagaagccgcaactaatgtctgtgaagggaggaccatgaggcgagagtgaatacgattcgttccgctgcttctgactcatccggcagatcggaacacctgcatttctggatgtgtcattcccgtatgtcgaggcgcctccagaacccgaaataatgtgtagacagacctgtgtctaacatcccctcggagggagctccccggggtaggagcccctggctggaccgccgcggccgcagctctgcaccccctgccctccctgagtcgcccagaaaaactgaaagagagactgcagaatgcatcacgccaaaccttgatgtgttgctttcatccagcccactcctcctactataagagaaaattgaaggaaaaaaaaaaacacgtactttatttgcttcaaatattcatcacttttattcctcgccaaggttttcttttctagatgaagaggactgggaggcagggctattggaaggagatgctgaatagaaagaaaagaggcacttgacagcccagccctgtgaatgcagagactgtttcccttctagcgagagacagggagagtgtgtgtgcaaggactgggagggaggctcccccttcctttttattcggcctcccccctcctcctttaaatgtgcacgtccaaccatgagttgcctgttgatttcccttcgcctgggaagaaaagcaaactggaattaaactgcttggagagaagtccttgctcgcggggagaggatgggatggtagcggaggctactggcttggcgtagagaaatcagagagtgtgttctacgaacagaggcgaagatttatctctctacttcccccctcccaatagactcacacagcaaatgctgatcaggctgtggctttcttgatttcgggggagagccttttccgaggaagagagggaggagcctggtggggagaggaaactacaaatcgggacactagttctttacgctgcatttcctcccctccctttggctgctcggaaaggagagagaggaaaaaaaaaatacgcttggctggtagatgcagtccgccgccgccgctgcctcagccagcaatgcaagattagatctctaaatgcagcaaaacactgcctgaaaacagaccggcccgcgcagcaagcagacatttcacggtgcgctggggaagcttcaaaatatatctgtgactctgtcttcgttgctcttcatccccatcaatttcatcacgggaggcgagcagcaagtaagaatttcactttcggatctgcctagagacacacctccctgctccctcccccactcgatgtgaagagtattccggagtctccgggcgggagtagatttgcagcaccctagcgggagcgaggaaaacctactgattctttagctcattatcatctctcccagacgagatttccttcttatcgcctgcctcatcgctcaagtttgagcctcccgaagtccgggcgggagagacgaaacccctggctcacccccagccgcaggaagccaccgccttgctccaagcccctgcagctctgctgcaccgcagcttctcacccagtgcggatgctgtagatcaacaggttcagggaacttgagcagaataaggagagaccaccgggtgccgcagctcgggtgcagagggaaaaaaggacccatagacttgtggctcgcgtcgcgcgcgcacgctgcgccagggccccaggctggcgcgcactccctctctggctcctccagtccgattgctcctgcccccaccttacaggtctgggatgtacctttccatctgttgctgctttcttctatgggcccctgccctcactctcaagaacctcaactactccgtgccggaggagcaaggggccggcacggtgatcgggaacatcggcagggatgctcgactgcagcctgggcttccgcctgcagagcgcggcggcggagggcgcagcaagtcgggtagctaccgggtgctggagaactccgcaccgcacctgctggacgtggacgcagacagcgggctcctctacaccaagcagcgcatcgaccgcgagtccctgtgccgccacaatgccaagtgccagctgtccctcgaggtgttcgccaacgacaaggagatctgcatgatcaaggtagagatccaggacatcaacgacaacgcgccctccttctcctcggaccagatcgaaatggacatctcggagaacgctgctccgggcacccgcttccccctcaccagcgcacatgaccccgacgccggcgagaatgggctccgcacctacctgctcacgcgcgacgatcacggcctctttggactggacgttaagtcccgcggcgacggcaccaagttcccagaactggtcatccagaaggctctggaccgcgagcaacagaatcaccatacgctcgtgctgactgccctggacggtggcgagcctccacgttccgccaccgtacagatcaacgtgaaggtgattgactccaacgacaacagcccggtcttcgaggcgccatcctacttggtggaactgcccgagaacgctccgctgggtacagtggtcatcgatctgaacgccaccgacgccgatgaaggtcccaatggtgaagtgctctactctttcagcagctacgtgcctgaccgcgtgcgggagctcttctccatcgaccccaagaccggcctaatccgtgtgaagggcaatctggactatgaggaaaacgggatgctggagattgacgtgcaggcccgagacctggggcctaaccctatcccagcccactgcaaagtcacggtcaagctcatcgaccgcaacgacaatgcgccgtccatcggtttcgtctccgtgcgccagggggcgctgagcgaggccgcccctcccggcaccgtcatcgccctggtgcgggtcactgaccgggactctggcaagaacggacagctgcagtgtcgggtcctaggcggaggagggacgggcggcggcgggggcctgggcgggcccgggggttccgtccccttcaagcttgaggagaactacgacaacttctacacggtggtgactgaccgcccgctggaccgcgagacacaagacgagtacaacgtgaccatcgtggcgcgggacgggggctctcctcccctcaactccaccaagtcgttcgcgatcaagattctagacgagaacgacaacccgcctcggttcaccaaagggctctacgtgcttcaggtgcacgagaacaacatcccgggagagtacctgggctctgtgctcgcccaggatcccgacctgggccagaacggcaccgtatcctactctatcctgccctcgcacatcggcgacgtgtctatctacacctatgtgtctgtgaatcccacgaacggggccatctacgccctgcgctcctttaacttcgagcagaccaaggcttttgagttcaaggtgcttgctaaggactcgggggcgcccgcgcacttggagagcaacgccacggtgagggtgacagtgctagacgtgaatgacaacgcgccagtgatcgtgctccccacgctgcagaacgacaccgcggagctgcaggtgccgcgcaacgctggcctgggctatctggtgagcactgtgcgcgccctagacagcgacttcggcgagagcgggcgtctcacctacgagatcgtggacggcaacgacgaccacctgtttgagatcgacccgtccagcggcgagatccgcacgctgcaccctttctgggaggacgtgacgcccgtggtggagctggtggtgaaggtgaccgaccacggcaagcctaccctgtccgcagtggccaagctcatcatccgctcggtgagcggatcccttcccgagggggtaccacgggtgaatggcgagcagcaccactgggacatgtcgctgccgctcatcgtgactctgagcactatctccatcatcctcctagcggccatgatcaccatcgccgtcaagtgcaagcgcgagaacaaggagatccgcacttacaactgccgcatcgccgagtacagccacccgcagctgggtgggggcaagggcaagaagaagaagatcaacaaaaatgatatcatgctggtgcagagcgaagtggaggagaggaacgccatgaacgtcatgaacgtggtgagcagcccctccctggccacctcccccatgtacttcgactaccagacccgcctgcccctcagctcgccccggtcggaggtgatgtatctcaaaccggcctccaacaacctgactgtccctcaggggcacgcgggctgccacaccagcttcaccggacaagggactaatgcaagcgagacccctgccactcggatgtccataattcaggtaggagacttttagcataactgggagttcactttattgctggttttggagctgtcctgaaacctttggaacagggcaagccactctgccagcagcagtgagggggaaaaataattaaatgaaaacggtttacacttttgacactgtgtatacatcatattctacatataacccctcccatgtaaatagtctaaactctaccaaacgtaaatatcttactgtttcattttaaaatttatttttataggtttaaaaatgttagcagtgttcaataataatagcttattttacttacttttatttgttggtttacatttcttttcataaaaaggaattcccagagcagaaaaaaatgttttagttaattgtcttgaaaatatttttattctgtttttttaaatgatgccaaaaatgaaaggaacttatacccaactattaagaagttaacttctttaagtacagaataacaaccagtcagaatttcagagttcattcaatttgaactaacttttcatccttaaaaagtcagctttatattttaaaggtgctttaaagaacatgaatctcacttattcttcatcattacattatggtaaaactgcagcataatgcattaatacagcttaagcttttcaaatgtgagttatactctgaagcactttgaaaagtttgaatacatgcaggctctgcataatgactagtaactatctatgaaaagtttgtatttgttttgtcctgtggttaccgtgatctgtttcttggagtcactgaggaatgaaaggaatacagcagaggaccagaggctcattttgcgctactgaaaaaaggaggcaaagttacactgaaggcacttgatgtgccaaaatgaattcatgatgcatttagtttgcatagtgtgtatattaagtatatctaagtgatatttaatatatataagatagtatgcttcaaagttattgataataccacaaaactaaatgactgacccagcttggacatagattctaacagcagcaggtgactataccatgtctagtcattgtcttgtttcttttacctactattgagttgtgtcacagaaaaacttcattcttgcttattataattgtatgttgcaacaaattactctggatgagcagtatgtggaattcaaaattgagcttaactgaaagtgacaccgcaagaggaagattagtttggggcaagtggaaataatttgttcataatgttatgctttgaaaagcaaataacttttgatgacactggactcaataatgtttttattgttaaaatggagcagtaatatttcataatcttattctttctaacataataagtataccaaatactaatacttagcaaaatatattttcctataatagtataatgtccttgtaaaacaatctcacacttgacactactaaatattaaaatatcaattgtagtattaaatctcacttctaatagtgtttactatacatcagtaatcataattttttaaggtctatataaaactgaaaaagaaattctccactttaaaaaaatgtggtttctatgaaagtatttctgtgactgtgtaaaactggtatttatgataatcaatacgtatttagaaggaaatattaaaacacatatttaaagatttgctacagtcattttataaatacacatatgttaaatacctttcttatatttttaccattgagaattacaaagatgtcacagagggttaatgcttagtcttccatttaaagtgctgtgagttgaattttcatttagtttccagtaaaaatgaaggtggtgcagaattttcaacaagcctgattcctttgttagactagtggggaacaatcttggattgaaatatccagagattttgagagatagtgatacctgtagtatattgcaccatgctgttcttgaaggtggtcattgcttaaggaggaataggataatgattcctctcattgacagtaaaactcaagccaaagcaaatacacacgtgcgcacacacacacagaatgtaaagagaaaactttttttaacattctgtttcttctagattcttaattcatgccataaagacacaaactatgtttttgttttaagtccttgaaatgttttgcacagtggctaattttcccatattgcttctaccctagaaatatcctcaacatgcattgtttaaacttttttttaattcagtttttgtaatcgtctaaaggatgctttgtaagttcttaatatgttaattctctttcaaatatatcaggtttatctcaatattaattatggggagcagagtaaattaactacagggacagtcttttttttttttaaactagtgtgtcgcaaacacactgtgctaaagtgacatgcttaaattaaagcatttaggtatcccataatcttgtttcaggtgcttttattagtgtatatatgtaatacagcatcctaaggaaacacactattaatctcatgtgtatttctgaaggtagaattttaatccacagagtgcacttagcctaactgctactaggtctggttcatcttcattttatagcatctgtgttctgtttggaagtacagagtattctattgatggaatgaaaagaatttcataattgtgttgagatacactggtacagtgcggtgatatgaaatttaggaactttatgatttatgaagctcacattaaagctaaagttaagatttaagtatcaaagcattttgtgtgggtcaaagggcctaaaatgttaaggttaatgcctgtaggttctccttaggcataggagtacttttactgagtatggatgctaagcattcatataagctgatacagaaacagtgatgtttgtgagaagagatttgatttcaggtgtttttcaagttcctcagaaaaattaaagtataaagtgtttaaacaatagattagcaactaaatacccacaatagtgtgaatcataataaaacacagttataattaaatatttaagtctttttaaacatataaaactgattttgaagaataggagcacaggttttgtagtacataaggcaaatagattgttatacaaatttataagagcactttttataggagcaatattcctgtgaattattttatgtgttaatatgaaatctaaagtcaagtaaagagtttattactagttctcaagaataactgcttatcgtgatttatcaagaattaagtgctaagtctcagggtgacttctcaacaggtgttttcaatgaaggccttgtaggaaagagaggaggaggctggggacttctcactgatgggagacttcccagttttgtttgaacatctgtgttttcacattttttgtagcactactacaaatcattttaatatgctctcatagaaggaaatacattgagccagcagaataagatctactaaaataaattttgaaaaggaatacattcttactcagtgttttacaaatcaatttcaaacgattcacatttgggttgactttagagtctttatgctaggaagataaaatccttttgatagatgtacatggccttttcaataacagggaattaagcatatggtaaatacctagagccaatccaaatatataaaaatgatattgaagtgtagaggactaacgtatcatagtgtaaacaataaactcaatattgcagagtaaaaaggtgaaaggagactccatctttaatagcaacattacccgctgtatgcctttattcccactttgctctagtacaggaagatcttcactatggggacttattcagataagttcccaagatcatgatcttcaaaatttcatactctagcctattaatgatttcagtaacaaatacaaagtgcgtgaacaatttattttggtatttataattttggagatattttgctatgatttttattctaagacagctctttaattagtatatgcattagtttccataaactatatatacatctctacttgtaggcattctggtatcttgagtaggaaaggaatgtccctttcttactctgtgccttctggattgtttagttcactcatcctttttcttaaatattttgaaaaggtagaatgagtaattcctacttgagagtacacaataattacatatttctttttctgttttatcaggcattaaaagtagtgtaaagtaaataaacttaatttaaaatataatcagatattcaatgtttagagtttttttggagaagagtttataacccctaaaagtccaaaaattgttatcatcattattatattgttacttttatttttatatgcatttatgaaaattttagctccaattttaatgtggcatttctctatttcccaataaatgaaaacacagaaagtataaagctagaaaccagagaatcttgtttttaatattaactaatataactctttgtaatgtattaacttcttgattccattagcttttggttttcgataaaattttcaaaatgcaagctaggtaatattttaccattcttgtattgagattataatccttcagtcttttgaaaatgtcaggagtaagataatttttaattttacttgagttgtgtgagttctataatttcaataaatattaccatatgtaagtatatgccaaaaaatttggaattttagtcttggcatcttcatgttatttaaggctgtgtgtgatcatgaaaagatcggcatagaaaagtatgccctaaaattgttacctcaactacctgaatatactgtttcagtcatgagaaaatttacattaccacctttgactatattgttcaacatactaaacacacaaaatcccccaattttccagaatgttttctccataaagttgatgctataacatatatcattcacttttttcaagtgcatagatgcagattttgtatatgaggttaaaataatcccaaatatcatctctcttcaaaaaactaagaaatacacatattttaagaggaaaaaaccttcaaaaatttcaggtaatatttaatcctgtttaaaaatatagcatttatattttatcatgtttcaggactattcttgggtttcaggtttcaagtttttcactgttagtgctgcttgctgcttatgtactataacacaatagaaatgtatctacaaatataaagggcatacattaagaaaaaatatatttaagattaatgaaaattcacatgcatttattgcagtgaaatttggctatgcctgtatttatgaaaatatacaaataattttttggtaaatttaaatatgtgtataaatgtatatgtctttatattttcaatatagtgtatgtaagtacttgctcaagcacaaatactagtccaattttatacattttagttcaaaagtatttcttctctaaggaacagctcaagcttttatttttctttgaaaatatgttgaagctttattttactgttttaaagtttcaaacaatttgaagtcccataaaatagagctagtgaccctagagcggggggacttaacacgtggccttcagtgggcaataggttgaagcctatgtagacgaagagaaacaaaaatctcacccaagttcctgattcttttgagaagatggcaggagagctggaagcatgtgagaatgtatgctgtgagcctgatgatgaaacaacaacaggaggaagaagaagccactataactgggcccatgccagttaggaagtaaaacttaactccctaatgctgagaagtcttgcaatacactcaatagtgggtaaattcttacaaatgcacccgctaattacaatattagtcattgcactagaatgtattcccctcagtggtacttctgtttaataaatcccatagggcattatcttaaggttgtattttagtaaagccattagggagggattttttgtgtattaaattccttcaatcaatgactgtatattagttagagaatagcataaagttccttttgcctatcattttgaagataatgtgacttctgcaacccacctacaaagcacttttaaacttcgtcagacctgcattaacctattgtcaacctactttagtaaaggaggctttgacaataattttcttcaatgacatacagtattttatagttagtcataagctttcaccactagctttgacaatgatatactgcgatctttggtcttctggaataagttatctacaataaagaagtccttaatgacatcaacatccctactgtgactaagcagaagcatgcttttatttccttgctactgcagaaatactaagatcaatatatttaaggtaaagcaaaaaaaaagaaaaaaaacacgcaaaaatcccataacaaaatatagatgaaaaattgtggctctgtgggtggcatcctttgcttgtatgtaccaagttcttccggggatagactataaaattggtttcagacagtgtttgagagaaaaaaaaaaaaaaaaaaaaaaaaaaaaaatatatatatatatatatatatatatatatatatatgacatacttctattcatctgttctggtcctagtgacattctgattactggtatttgtaggccttgccctggatctattccaagcagttttattgtagtgaaatggttcttacagttcattgagcatctagcataactgtgctgaatatgattggcgcgtttgcatatatttattcaaaaaaataaggcagttaaacagcataattacgggaaaacgaatcataacaataaaagaccatttaagttaacaagctttgtgatcaaaggataaatacaggttggataaatgacactttagatgtaactaatctacataaatagactttggtctgattagaggagtggaatatattaaaataacttaatggtattagaaatttactttatttcagttatcttgaaatgtttaacgatctgtattatcttattttctttatgtttctatttaatataatagtgatacaccatatttaagttgtatgaaaaatgccaaggtaaagataaatataattttgtaaacttctgtttgattctgaaatatatgctgtctgaacaatatttaacactttttaaacttttaatgtttttgattgatttttaattagtggaacacattaaagggactatttaaaggaccatttcttgtttacgctctcagctaaaagcagcctttgtagggtttgaaagctagagcatgaaaatcaatttgaaatttcaaagctatacattcataattgttttgtagatatatactcttataaaaaacattggttacatgtttgtaaattatattgatacataatttagacaatgacttgatattctgaaagattctgatgctattttcatagcatctatgctttacagttaccttacaacttctctaaacaagtaatttctttgcaacaactatggtattttagatatatttcattcagctgtttttgataataactttaaaaatataatttaggcactgagtcatgaattgttacatctcattatctaggatttccacctaaatacttaacagatgctaaacaatgatttggttttttgcgtgcctaaaattttcatggtctccaattcagaaaaaaactcaaattaaaatatataaatgaaataattaggttatatttgaaattccaataatttgctttgatcaaatgaaaatgcaacaggtatttattgtaggcagaaatggttatgggagtcaaaatagctttcttattgttataatacaatttcagactatgcatgtcatataaattcttaaatttgaatttgctgtacaaacatttgcatcagttttgaacatctaaaagtagttttcacccttaatctacaacattcttttaaaaatcatagtccccaatacaaatgcctttgctaaaatagttcattttatttttcacacaacatattttagcagtgtatactgagattattttaactgaatacttgatatatttttgctattttttcacggcgacatagaaattgcatatgtattactgaatttataaagcaattcacctttgacaatcatgaaaagaattacctaaccacatgtgtaaagtggctgtgtgaaatttttactgatgttcttattttatcagtagataaaatgaaattaagacattagaatgtttgagaaataatatgcttaaaattttagcaaaatataataagaaaaaagttattttagtaatttggaaaaggcaatttgtttaaaagaatatttttcagttcaaacttgaataagtgcttaatgatacattttatataaattattagtcataaaaactaaatgttaaaaataattacttcaatttctatagttctgtcagcaaaacaaaaacaaaacacaatatcatctaaatattggtgaattctattataatagtgtcttcttgggtcccaccagaattcatgccttctattttgctcttgcagttttgcatctattttaaaatagtatatcccaagtccttttattgaattaagaatgtgaataagagcagttataagtcatacaaaaaagataaatcactagtccgtctttattatcattttcattgtggtaatattaaggattccatacaaacttaccttcccattgtttcacggcaagacacttgattgttttaattattatttgaagatttgtgtgaccttgtgttatattaatgaatttttttatttttgtgagaggtcagtgccttgcctcatattgtaatcttggttgattaaatcagaaattcctgacttaaagaagtaagcttatagatatgcattgactgttatttggcatggtatgcatagaatgcatttatcattttagaaaacaatacaaatgttttggtgctgtgtcatgaaccaaagtgtagagtgagatacaggattattaaaagcagatatatcagaaaacagtaactattttaatatcaatgcataccttgaaaaaatattcataacctttcactttttagtgttggcagatgcacgggtagtaattattagctaagtttccaggttccaaccttcttaggaaagctgctgtttatccctatatggtcataaggatggaaataagagaaccatcctattaaacaaatcccactcacaggacattttaaggatccttggcagaagtctattctatggtgtggctctgatatcagatgtgccaataccaacaaatgaagcactatgcctgagtggagagaaactagaaaagacaaagaatacatttatagagacttttttttccttctgattttgagcaatagactttccacgattttttataatcaagacaattacatagtaatttgggttagaatgcgtgcccagttccccatctcaaaactcaatttgttaccacctgtggctatttctattaaaaaaaaagaaacataattactatgagtctcagcagtcttagagtaaatttttgcaattacaataccccccttgggcagatgtgtgaaaatggcagattaattcttgccaggatttttctgttcctcgtgcatttttaggtttggtgtcgcctgcttattagagtgcctgttttgctctggttaaaggttatgtcagtttttccgtagtaaatctctagaaataaagatccacaaattagccattaaattttgccttaggtgaaaagttgacatgtaatgtctcaggaaaggagcagataatattttccatcacgctcttcggttgcctggttaagtttgaagtaaaagggaataagaccatttggcaatgttgagaaagcacgacttagcctaggaggtaataagaaaagtgtggtaaaataatatctaatccagtagtagccatggaagtgatcccaaagctacatgttgcctagggattttaaagtgcagtaaaaaatatattaatactggtggataacaagaaatttaacacccaactcatttccattcatttctttttgtagttgttgtgtgtactcttttcttaataaagatttaattgatctacacacaaactaatgaatgatattaagtctgtaaagtgttaaacctctcgatcagtgttttaactctctatgagtaagattagttattttttctcaaagcagtctagatagtagaatactcgaaaccagaagccgcatccatcttgattgtcactgtagttgaaataatgtagcagtttctgacatgtagtatacacttaaaaaaatatgaattctttttgaagaaactgagacttctatagttaagtcattttcgacaatcacccatcagatacatgctggaatttggattcaaatctagatgtgactaaggctaaagtctaagatattaatataaatatgctaaaatgttgatctgctggtaaataatttatttgaatgtggcatattttgatatttttaaatttatagttaccacttttgtaattattgctatgaaaatttgtatataattttattaataatattacaacttcatggagaaagacaggtgatcaagtttcacaattatgagcatcaagctctcccagtatttgtttatattatatataattgtatatggtatatataatatatacacacacacttatataaatggtacatcaagaggaaattgtgttgattgtagcatatctttctatcttttgtcccactctttggtctggtttatatggtattagagtgatgcacttctgatgttatgtctgtctattttttaaggctttaaggattacccaacctcagtcagttattaagaaactaatatgatcatttcgtctatatattaattaatttttaacctggttttatttgtggaaatgctccataaagtataaatatttattttctatatgataattttaatgaaatgagattatatctaaaccataaacagttattttgggattacatttatttttattttttgatatataattttacaatttaattgcttgggcacagatcatctaccatgtgataatcagaaaataaaaatatggttggaaattatcaagtgtatgtaataagccaacttacaacatttttctcaaaatttcagaatctgtcacatatatgtggtaatgaaatttttatgcaaatattgagtaaatgcaagctaagccttcatataaacagtatgttgtccatttcagtattgttattaaaaagacatccacaactttcagaggtgtttaatctataattattaattcaatgaataaataatgtaataattttaaaagctattaattgaaatggtttactggtttttcatttttttatttgtgcaaatttatggggtacatgtgaagttgtattatttagtacttttaagctatactgagagttagctacgtttgtctgaattttacattttaaaatccatatcaaaccataaggaggttttacagaataaaagttttaggcagaacgagttttcaaacatattaaaaattcaattatccccattagtcagagtagctgaaataaaaagtgaaggaaaaatagaaagaagcatagaaatgtaatttaaaaatgtttagaattcattttcaaccttcgtagacaagaggatttttctgaaagattaagctaacggtattaaatatcatataagattatcccatgaataagaagttctcaatgcagaatttatatccacatttgtctaggcattatactaatagttcaagtccatctgttaattcaccctgaaatatttggcatttttgaaaataagacacatcagcaatcagtgctactcaaccttgatccagggggatgtcaaaataagtcttggttacatgttactacaagaagccctgtgtgccaggaacaagttttctcttagacaccatcaaccagaaactgggcttgtaatattccataatctgtttgtgttttactctttctgtgactttttcttaaactatcgtacatgctttcttttaaaaaatacagcttggacatctgctggcaatgtgacttccaaataatgttggtaaaaatcttaacgtttcataaatacaccagttggcaagtactttttagtctttatatcaaaccttataatctaaaaacatatgtcatttgtttaaaagactttgaaaagtcatttaaacattttagaagtattatccaaaatacatgattgtgagtgaaagaaaaggaaataaattattatttatgtcttatgctgacctgttctaattctattatttttatccttggctctggtctcttttctgtgacatcccagcagaaaatatgcttttcacagggttactttagtaccttgtatatttacatctagtgtactttttaaaaatattcaaataaatatgttgataaggcatggtgatatttatcaccagataaatgtttaactatatgcacatttgggcctggcctctgtatagttgactttacatagtgcatatacacaggggtggattggattgagcagtattatgtttctcattttaaaaatgcatttaatagacaagaaacttttgtttattagctaaaataaaaggcttcttcaatttcctttaatttaggcttgagtatatattttaagatgtaaaatgttgattttcttttatataaaagcaataaaataaacttctccacatgatttcctcttgtggttcttcgggcaagagtgtgctctaataagatatagtcgagataaaattctccatctgctactcctgaagaatagaatgctaatttttttaacctcttggtaaatcttctttccatacttatgactatgcaagtcagcgtaagctaatgtatcagttcatcatataaagaaagaaactttatagttaaacttagtcaacaaatttcttagaattatttttatttgaaattttccattgagtctcagtgaacttaaacttgacatttatgttaaatatccattatttaactagagaaatcaaatcgccaaggagacatctgttatttaacgatattacagtttggatttttttggttgaaagtgtgggatggtgatagaaaggctctaggagtgagggaaggaaaggagctgtggttcaatatccccaggtagtataaataattggaaagtggagatacctttttagttggttaattgtaataaacctattatctttttagagcattaaggtagaatcaacatgttggaaaacagataaaaggtgcatgaaagcatttgaaattcaatcattaggtttcattgcacccatctgctcccaggaaatataattggaaattttattcattgacctttagctgccattttggacaacagtttcaaagtctgtattttcaagttggacatttgaagttaattagataagagccatactcagtgcatttttaaaacccgattatttgttggaacaaaatttgaataaataaaggcttaatgggcaagtgtatatttgacaaagagtcaaaatagttaatcttggatctgcttaaaagcaactaatgttcaacttcattaacatttctgttaactagagggactgctcaagcttttattgtttttttatgtgcaaattcctacctcacattaattattttctggattcatattaccttagagttatacttacaacattcaattacactaaaatcacgtaccatgatataagggaaaaaaattaatgaaactatttagtatttcaggtggttatcttgagttttaaaatgttgggcactcccaattccttttgccagtgtaagtataataccatataatctttctaggatatttttatgtctctactcagaaggatgatgtatgataaaactgtgtgtctaatataggaagtacattatgtaaattgatcaagatttcttgccagcatttgtgtattgctctgcttactgaagttcatgtaccttggaaaagagtcatgattagacaggtgtttcttcatcctatgagatcaaatttctgaaatatttatatagtgatgagccagatgtacacagcttaaccttgtaatcccatttcacagctttcccaaatacttggaaacttgttaagtatgaagctgattattttggcagcatatctccattaataggattcagatattccttatttacaagccagtgctgttaatataatctactacattaaatcaacaaggaaatggaaaaaggagaatccgtccaagggcaaattgacagggaagcttttcctaaagctttttaatttgttttttattgactccataatatcagaaaacacacagcaaatgtgaataatgtacatgttttggataccatgctacagccattttggtgtgaagtagttagtgctcagatcccttgtacttctatcataactttgatgtaagccacataagaccatgcatctctgctctttacaaatatccctttcagcatcatctcaatggcaaagcttactgtcatttgacataaaattattttaaatgcactcatctgttttttaatgaacagaagcaatacagaataatgtaataatatgtcatgattttcattatgcttatttattggttctgcaataataggagagcatattgttatgctttcagcttgagctatttatgcactgtgctactggatgcaccattttatatttgtgatattttgtcctcccaagaaaaggggtatcaagatccttaaatcaaattagactaggggaagagtttcatacttcgtcttttttatattaagtatatagcttttataaattacctaactctacttgaataaacttacacaccttcagagagaggaataccctattttccaagctgtatgtgacaacctgatttacatggtttgaaaagaaggaagaggaaagcagactatcagaaaagagaacaacttttccttttttatctgttggagaaaattatgtcctttgtgttttatatttacacaaaagtgtctaacacaccaataagaaggtgacataacttttttagttatgttataaaacaaaacatataattaagtaacttgtaaaaaaaagagtttttcaagcccagatgagatgtaaatatttgagatttctggacccttgattgtgtgtgtgtgtgtgtgtgtgtgtgtgtgtgtgtgtgtgtgtaataacagatactccagagatggagctactccactgagaccacgtgcctgtaggcctgtgtagttgagattcaggcacggctggtctactgccttttggatttcaactagtctatcattgaactggaatctgtagtgaccctccagggatgaattgcttacatttgactacagggccagttactcctcttctgtttgatttttagcaagtcaatagtttccctacaaaaagatactttaatcctgggaaaaacaacaactattacaaactcctgatattcagatatccatgtttttatattaaaataatttcaagttgtttttgaatatgttatttgtctttgagtttaattttcactcttctcaaaattatgactatatttttcccaattttaagaaaaattcttatatattgcaaatattctactaaaataaatatctaaaacagtgtccagtgtatagtaagaagtcattacataattgtggactgaaaatagagaaagttgaacttatagagttcaattgcctataatttactactcagagaaaaccattgttaattttttgttgagtaaatctgcaattcttcctttccaattctaaaattcaaaagactcaggcctgaactgatttaacattacttataatctttacttattctacctagtgtgaatatcaacatttttcactgcagagatatcgatatgtttaatattgaggtgttccgctagtccccactggaatggacaatacatgacatatacatcaaaatatcattctaaaatatgaaagaggatggtcttacaaaatgaaaaaaaggattgtgaacctatatctctttctacttcttcatgcctgtgcacatgcacacaaacacacaactatatattttataaagagttgtatatatactaaacacagcatagtaaactgcattttccttaaaattgtataaatttcatgaaaaattatatactatttcattttttcatgtcaataatgtagtttcacattatcttaataatggaattctaggccaatcaatggatatattaaaattcagttactctctgatagataggtggtttaattgaggtttttttttttttttttttttttgagaccgggtctcactttgtcaccctggcaggagtgcagtggcacgatctcggctcattgcaatcctttcacatcggcctcccaagtagctgttacttcaggcatgtgccaccaggcctggctaacttttatattttttttagagctggggttctgccaggttgcccaggctggtctcaaactccaggtctcaagccatccatccgcctcagcctctcaaagttctgggattacaagtgtgaaccacaatgcctgggattctattttgaaaattcctgacttaaaaatatatatattagctatgcagtccaggggaagttgcttaatctttttaaattttgtttctgatttcttataaggcataatatttactatctatagggccgttgtaagaattaaagataaaatgtaattatttgtataaagaatatgataaatactaaatacatattaacacatattattattgttgttaaaagcaaattacataaaacattctggtgcagttaaactttagggtactgatttgcaaacatattctctataaaaacaatatttcacttggcctaaatataagcagttgcataagaacagagttttatttaagaacacttacgggccgggcgcggtggctcacgcctgtaatcccagcactttgggaggctgaggcgggtggatcatgaggtcaggagatcgagaccatcctggctaacaaggtgaaaccccgtctctactaaaaatacaaaaaattagccgggcgcggtggcgggcgcctgtagtcccacctactcgggaggctgaggcaggagaatggcgtgaacccgggaagcggagcttgcagtgagccgagattgcgccactgcagtccgcagtccggcctgggcgacagagcgagactccgtctcaaaaaaaaaaaaaaaaaagaacacttacgactataaaaaggtagttttactggagtactaattaattttactacaaatttcattttgcaccctctaaaccaggcttggtcacttttggttaatttttgttagatgattttaagagtgacaaacttttggtagaggattttccaaaatcggtttctagatattgtaaatttcttaaaataacaaagtaaactctaaagtagaaagatgttaagtcttctatataaattgtgacttcttttttatggagagaggccttttaggaaggaaagcttgtaccaaggagaaaatgaagagaagtttctacaaaagaactgttgtaggatagtgaatattagaaatttggatgcgtacaattgcttctgattccatttatacttcttttcttacaagaaaactgaaatacagagatttcattcatgtatttacagccagctaggaatacagaactaatgtcatctggttcaaagtttagagttcttgctcttataccaccgggatctcatgattagcatgcatttatcatattgaggtatctatagagtttgagaaatttatatagtataaataactgctgctataaagtactgcaacttggttcctagattgcaggtcactttggaggagaattctttaaggcttctacacgttaaacattaaaatctatgctgtgacctatgtataacacattgccacagggtctttcaaataggaacctggcagtagtttcaagaggttctctagctttgtcttgtgtagtaaaagtattcacaaattttggatactatagagcagcccaggattctcatggatttaatctcagatttaatgttaaatttatttaattttattaaatttatttagttaaatcaattctcagatttaatcatagaactggctctgattattattttattctagtcaaaatggtccagtagatttcattgcttttctttgtgtttaatctaattcagagctgaatagttaggaagaaagccattccagggggtatgacctcgtattagaaactgtagggagtgttaattagaatgagaataataaatctgtaaaatagatgtgacaatgataaatagagtagaatagaaagcacaatacacagaaaagctagatgaatcatacagtacttgaaagagtgcaaaatttgagtcaaaagaaacttgttcataatacttactcatattgaaacctccactagcctttcataaatttcataggacttagtttccccatccacaaaaaagaaataattataatggacctatagaagtgaggttaaaaggaaagagatttgaaggtgtaatatagtggtgagatcatcctataaaataggtgaggaagtatgcgatacaaaggagtaagttctgggtataagggtgaattctttgaagtaaacaagagctgaagagcaatgttgctggaaagaaccggtatttactcttacactaagtacactctagaggaatttataatatgctttaggaagcttcatgtgtcgaaatgcattttgttttcaggtgttcccatggcggtactgtttccgcagttttaagtagtttggaattgagtataaacacactgcaaatcacctaacactgcagtccacttaaaagaaatatgaacagtttttcaatcaggtgctttccacatgtacatcttgtgagggaggtctgtgtcctacagagaaagaaaatgatttgtgttttttctaaactatgacctaattaagcatagtgcatacataaaaattcatctttaatattttatctgcaggaatgtgcagagtaaaaatgttaattatatggttaagaacctagacctagattttctaagtaaggagtcaacaactttttctgttaagggccagatagtaaatattttaaactttgtggttcatgaaattctctgtcacaaatactgtactctgccattgaagcaggaaggcagccatagaaaacatgcaaatgaatgggacatggctgagttccaataaaactttattttcaaaaacagataatgggccatgagacaaccattgttgtaaagcatgactgttattgatatttcttaagttttttttttcatttgtgtgtgtgtgcctgtaaaaattgcaccatgtagattataaaaagtttctaacaaaatcaaaatgattgttattttaaaactagatataaaagaatgcagacctattgtctcatgaaatgatcgtcattaagtaagattgcttgtttcactagaggagaaaattcttgaaattaaaatctttaagcaaagaaaaaattggagatgcttgaatttgatattatgtgacagtctgataaagagtacagagatttcacttcatcttgtgctaatgtttaattaaaagtatattgacactagtaaagacactttattttaatttgaggtataaatgtctacctaaaatagactatttccattgagtcatacattttaaatgtggtatatattcttatatttcagaaaatgataactatcatagaaatctaatactcattaatttgattaataattatttttttcctcaaatttggaaatatcttttcctatgtaatggtcatgtcagaggttgtctttcattatgtttttggatggaattggtaaattatctttgaagctatgtagaaggttggggatttcaaaatttacccaaactatttattaattattataaaatatgttggctgattagctactggactgacttgttgtttatagtcataaaaaagtaaaaattatttatgcctatcaagagttaaaagaaaaacaataggcattgtgtcagtccatttcatcttgaacttcattttattttgttttttctattaggagttaaaatgcacctacaaaggtgacagttgaaagaataatgcaaaacagagagacaactaaatttgttgatatttttaatttcatttgtcaaatgtaacattatctaaataataattgatttatcttctaattgatgatttaatattttgagatgtaagaatggtgaattttgtttaccaaaattattgtattcataaagtttcttattttagtgtattgtgaaaaaataaattgatggaaatatataacagacttgtagtctgttatatgtttggatcaccttttaaattagttattttgtttgtgtgtgggaattttacataatgatgggaaaaaagtaacatattaaatttcttttgcatttaaaaaggtaggtattcataggtgcctagtttgacaatttatatgagtataatgatggtaagtaatcatatgattaaacctcctgcatgcattagaatatttgataataaatggccatgattgccttttaatgttatcgatcaaagaaaaatctagttgtcagagttatatataaagcacattaaacattaaacaataaaacacattaaaacaataacatgaaggtatagaaatgtagaagtacagattctttcaaagaaccatcttggtattaagggggatagtagttctagttttatttattatgtaacagtaattgtaaaaaaattttcaaggaaagttacattaatttctcatcaacttatttccaaaaatattggaatggttcattatttttctccattatctcagagaggcagtacagcaaccgactggtgctggcaggctctggcaagtgtcattgttctataataaattgggtatatgatggacaaatctatgaaagtcacttagctacagtttctttgtttgaaaaaaaatgtaaacaatgcctccactttatctcctagggcaattgagaagaatgaataataaacatcactacagtaatactgttttgtagatcctaatacaagacactgtactccaaatctcccagtgcagaatttaattagtgacattataaacatgcatttagactcaatgcattatagtttccaagcatgtccatagtagctaaataaattaggctaaaaaccagcttgatcataaaaatttaatttgtaaaaatgtattttcgcttattagcaggtttcttaaatttaattatatctaattttaagaaaatgtatctaccataagactcagaattcttagcaataataagtaatatcaccaatttatcttcctttctttattctcttcctttgtctttatataccgagaatattagaagaagctatttcagaaatgtaatgaattttcactggccacatataacctttgaattcttcgtcctggaggccctattgcagagaatccagttttagatatttctttcagtgggaaaagtcttcagtattcttaacagagatggaaaaagagcacgggaggaagaaagcagaggaatgtctccagagataagtctggctgagagatagcaaaaaacagaaaagaacttcaaatttactcctacactgcctctggaataaaaagggaagactaagttttgaatagggctgagatgaagaggctgacaacacagaagagaatgggtgatttgaggatgttggagttagcagtctttaagtatgttttaatttctgtcctcatggcacatccagtatttagtggcatctcagttggccctgggattcgcaatacagcaaatatataacaggaatgtatggcagtctctattttatgcgctttcatagataacaaatagcgctcatcttaatttaattttaactttttgataatctcagttttctttgttcttgtcaaagataacttttttcgagattcataaattacataattaaatgctggcacatcagttattattaaagttatcaatgtcatttcaaagagttagcatttgcaagagatcttaatatatacccagattactttaagaaaaaaatctaagtcatcctcattgagcagcagacttaaaaattcttacttacaggatgtggctgttcctgtcctctcatttttaatttaaaggaatgctggtttttgctcaatattgtaagaatacccaatgtttttattacgcctttagtagcaaaacacaaatgtcaaccacactatacttgtataaaatgtattattttgaaaaccactgataaatacagttattgccatacttcatacactttaaaaattccacagccataggtgctgtcagataactttatgagtggtggcttaaaatgccgttgcctacttcagcaatgtagaaagaaccacaccatatattctgtggaaggcaaagctatcagaagcaatgtcggtacgaaaaggcttaaagtgaattattcacctcttaacactcccttgtgttcagtctactgcaaacagaatgcttgttatcaatgtgaaaagcagtggctttgaattaaggcaaaaatttgttttgtttagttttcaacgcaatggtatcaaggtagacaaacaaacttctgtccctaattcaagggtatttttcaaaattttatttctgtgtacccctggattaggaaaacactgaaaatataaatttggctgattttataattatacgatttaacaccatatctagaatcatttatttttagacaaaatgttgttctgttcactacacatccaaccccaaattagattttaagagctgagttgctctcttaatgacttcaaaaagtcaaagacatacttacaattattctagattaatacacctagaattaaaaatgtcttcgtctttatatttcaaacagtggaagatcactttgtatttgaaatacgtatctttataatatatttaaaatgtataaaaataatgttgacacaaacatataaagcctatacagataatgcaaaaaataaatttaagtattatctatttagattattgaggcaaatgtttctagaacttgctgaaaaaatgctacatcttttcttccttagtctctaatctgcttccagtcccatccagtgtgtgtatttttactttaaaatactacagcttttatttttagatgtttcgtttgaatctttttttatatcttctatttctctctttcaggatcaaaattaacgtgaggcaagggaggtagttaaggcacaagatttaaggagacactctccacgtcctgcttttacattcctgaacatatttttaatatttctgatcgatttttaaaggtcctattagttaatcctatcatcactcatccctgagtctgtttttattgatttttctcccaggtctaggttatattttcctggcttattgcatgccctgtaattcctgattgaatcttggatattgtgaatcttacattgttgatgctggatttgggactgcctatgttctgagctaaatgtacatctgtgaaatgaatgcatccattgggctgagtggtagactctgacttaaaggtctccagtttggtaaagagatagagaaagccaagaggacttcaagaatgctaacgggtttttcgtttgtttgttttgttttgttttgttttgttttgttttgaggcggattcttgctgtgtcgcccaggctggagtgcaatggtgcaatctctgctcacctcaacctccgcctcctgggtgcaagcgattcccctgcctcagccgccatctctactaaaattacaaaagaatgctagcagtttataatccattgcctcctgtgtctccgcaccaatcattctggaaatgtcagagttctatggtgtgtcagaattgttcctttcataggaaatttcctgaatatctcatgactctatctataatgggtagcataatattggctaattagcaccaaggttatttatattgtgtgtgtgtgtgtgtgtgtgtgtgtgtatacacacacactcacatatataattatcagagtatgtgtaaattaatcccagattgaattctagcagcatttacttaaatggtatgtttgatggtgaaaaactgaccatagaatacagtttcctactgctcacattattcttctcttccttttgcagggatacatttgaagactagtgttctgatttttttcttagaaattcattagaaattagacttaaaataatgaggtctttatttttctcatcccacaggtgtctaattttatagaaatccaagtgttgcattaaaatttaccatacactcatccagttaccattatttcatatcattactgtgctgcacaatttaaaaattaaaaacttataatgagaattgtattataaactaagaaatttgcatacattatctcgtataaacttaaaaccccacattttgaatactcttatattatcttaattttgctgccaaaattgtaaaattattttgacaatattttgcatacattttggtacatttcagaggctaaccgttttgtattacatgttttttaagtttttacaaagtatggtgttaacttacttctaaaggtagaaacagttttatgagccattttgaaaattaaaacaattcaccgtttctgaagacagagcccagtcctccacgatctagccatgtttctttcctgtgttcaaaagagaagctactactttgcaacaagtgcagtttgaaatttttatgtaaagtatttattttatggctgggtaaatcagagatacacacaagaaaaaaattctttggaagaaataaaatttgaaggctgggttcggtggcttatgcctgtaatcttagcactttgggaggccgagtcgggtggatcctttgagctcatgagttcgagttcgagactagggcaacttggcaaaaccccgtctatactaaagaagaaaaaagaaaaaagaaagatagccgccatgttggcgcacccttgtagttccaattacttgcgcggctgaggcaggaagatcatttgaacctgggaggttcaggctgcagtgagccacgatcaccccactgcactccagcctgatgacaaaatgagaccctgtctcaaaaaataaaattaaataaatttgagctatggatctgttgcttggatttgatggtgtgattaaatagatatttatatccaaattcatttgtattctgtccaaataaatattaaatatctacataggtttcagaaattggctcagtatcattttaaaagacaagttcagaaacactctttgttgagaatattaaaaaaataacttttattataattattttatgagacagaagaatcctcagcatatatgtgatgcagataatcatattaggtatattttggtattaccatttgcttttaaaattaattacagtaatgtgaaccttttttgaggtgtatagttctatgactgttcatacatgtgtagtttcatgaaacaagcaagatactgaacagttctatcactttaaaagcttccttatgctatctctctctatcatactttccctcacctttcacccctagcaaccacggatttgttctgtgccataatagctttgccttttttaaatgactagtcttataaattgaatgatacagtatgcaatttttaaagattgacttttttcactcaacataaagcttttgagattcattcgggttgttacaacagtagtccattttttcattgctaaatggtattttattacacttatgtatgaatatgtatgatggtctgtctgttcaccttttgaaagatacctaggctgattccagtttggggcaaacatacagaattttgtgtgaacatacttttcatttttttagggtatatccctagaagtaggattgctgggtcatatgatagatttatgtttgacgtaagaaatggccaggttgttttccagggtaggtgtaccattttgcattttcacctaaatttatgagaattccagttgttccacatcctcatcagcattagtattgttaagtttttaaatttcatataatctaataaatatatagtgtcattttattgtaattgtgattttcattttcctaattgcagcttatagtaaatctctcttcatgtgcttttgtaccatcaatatattctatatgatttagtgttaagcctttcaagtgtttgtttgtttgtttgttttcttagttttgacagttcgttatacagtctgcatgcaacattatagatgttctctcaagggctgtagcttgtttttaaattctcttaacagtttctttgcaaaatcaacatttctaatttcataaactccaactttttcttctgtggatcatgctttgatattgtctaaccactgtgtagtgccctttcacaaagattttctgctaagttttctactgaatatttttagttttacgatttacatttaggtctatgttccatgtttgagggagagaaagagagagagagaaaaagagaatgtgtatgtgtatgtgtgtgtgtctaatgtgtaaggtatagatcaaggttcatttctactgaattatatattgaatcgtcttttcaactttgttaaacatcaactgttcatatttgtgtgggtctgcttctggacagtcttctgttccattgtcatatgtattcactcgtttggcaatactgcagtcttcattagtgtggcttcaatagtaagtctttttgttgttgtcgttgttttttgagacagagtctcactctgttgctcaatctggagtgcagattgagctcactgaaacctccgcctcctggattcaagcgattctcgtgcctcagccacccaagtagctgggattacaggcatgtgccttgaaacccagttaatttttgtatttttcttttagtagacaagggatttttcaccatgttgaccaggctggtctcgaactcctggcctcaagtgatccacccaccttaccctcccaaagtactgggattacaggcatgagccaccatactgggcccaacagtaagtcttaaaagagagtagtgtaatttcttcagaaattgatttatcttttaaaaaattgttttggctattatagttcatctcctatcacatattaatttaagaatcatcttgtttaaatacacagaaaatttttctgagaatttgcatggaattatgttacatgcatacattatttggggatccaaattgtcttccaatccataaacatatatctctccatttatttaggccctttaaatttatttcatttttttataatgttcagcatacagatcctatacattttaaaaaatatttgttgaacaattaattgataggcgctattataagtgtattgtttttactcctctcagaggaacttaaggacatgtaagtggccatatcaaaataacctacttccacaaacagagagctttcctagtctcagctagcatgactcagtttcactacatgctttcttttgacctttttcagacaagttttttaagaattacaataatttgaatcagacatcaagttgtagaagattgcatatccttaggaatagtttattactgaatattgctgataaaaatgttgatttttaatatcatttataaatgtaccacagtttgctgatcactagtaaagaaaaaagacaaataatcagagaattcatattctgccaactttatccactctgtttgcttgcttgctcacttgtttattttcctgtttattttctccacaaaggaaagtaaagaatatctaattttttattacctttaacacacaaagaaagaaaacgaaaaagataggagagtacattcagtatgatgttagttcacatctgttttgttatgatcaaataatcactttttttaaaaaagtgatttttttgtctcatgtattattgattttttgtagatttttaaatagatcatcatatagtttttaaaatacctacttgaaaacatttatgtagctacccaccaattgtaggtacatgtgatatttttaatgataaacaaatcatcatgtttatatatttatcatataaaagtcactgtgttcaagttgagtttgaagagaacactagtgattagtttgcatgaaagataaggttttcaagcattgtaaatattcgtgtttaattactctgctgagtcctaaaatgtacaaatgtctgacctcaaattctaccctcttccaagacttaaaatttatgaattataaatggaaaaggtaaaactcaatttttagagtatagtgttgtaaaatatctgaatactcttatacttctaattaaatggtgctgtcatacatatggcttttttctctatttttcatttttctatgcaaatactgttattttatattcagattattttaaatgaattttcagagacccttggagtctagataatgaaaatgtagtcaattagttatatgtttgttaaaggccaaatggctattacgttatggtaattatacacacacacaatctctcattcctatctactttaatcaatgagttcagacattattagtaaacttctgatactctgctagtgattgaattgcaaacttttaaaattgtactttgtgaaattctataattagaaaccaacttcttttttctacatttcttttcactcctctcaccctgcttcctcctcgttcctgtatcttttcatttctctctcccactttctttctctgtgcttttctcttgctattcctcagatttctgtttgtttgtttatttatttttgtttttgagacaggttgaccaggctggagtgcagtggtgctgtcacagctcactgtagcctcgacatcctgggctcaagtgattctcagtctcagcctcctgagcagctgggacaggtgggcgccaccacacctggctaattttattactatttttatcaagatggggtctcaatacattgacagggctggtctcgaactcctgagctcaagtgatcctcctgcctccacctcccaaagtgctgggattactggcatgagacactccacctggcctttctttggctttcctattttctcttgttctctcccaaacaccgttcttttctcctttcctcttgtttttctatcttcatcagaccaatatttggctgcagtaccgttgcccagagttcatcaaatgctcatgcataaatacatgtgtgtgtacatataattttaatagctcttcattcaatggaaatatgatttcatttcttagcttatgtttcttatttaattagaaatgcttagaactttaataatatgcaaatatttctagatactgttcctatcaggacaagagaaaaaaagtttccccagactatttccttgtgtctaaacgaatagggatccacatcctatgaggctccacttaattaaaaccattaaaatcacaagactacttataatagtgcttacattttttaactagagtttctgatttcacagtaaattttattgtctctttaataacctggattttgttttcttgaagtgttctaaaacacttatttttagctttcaactgacagcaataatggaatagatacatgtgtttgatcaattcaaaggatgaactagtttttattaaattaaaatgtgaagtgactaagtaattatagtttaaaaatttttcaaaatatttttggaaacatttttgccactggtgttgactactgctattaactttactagaaaatcaagttatccttaaaaactgatattttgtcattatggaaacaaaaagtaagatgcttcactgaatctagaaattactacaatatataaatagaaagtgtctgctaccaactgctagtaaaagacggttaggagtgagcaatgaatccacctttttcacttcatctttgcatgtactttgacatgcaggtgagtgaagttttccaatgcttcacttcatctttgcgtgtactttgataaatgtcatttggacaaaccaaaaaaggttatatattaagaaatttgtggggggggtttctgtccccaaacttgacaatgacacatattactttaaactatcattctttaatgatatcaaataaactatcattctttaatgtatcaatactttatattacttatcaatactttaaactatcattcttaatatgcctttttcttttttcagtaatcgctcacaaattcaaatgctttatattattatatgggaagaagaaaaaaagaatatcttattttaaattagccttattaataaggaaagcacatattgcactacattaagtcttaccttgggccctctgtttcatgaattgcatgatccctgtgtcactgatacttgtgtgctggataatcttgtaggaacccatagctgcttcagagtataatgccgtgatatgaagtgatgcaggaaacaggagaagctttgtcactgagtcagctgcaagaagaagtaatgtgtatgaatgtacagtatagggaaatctatgaaagatccagtctctttctcccaaaagactctgttccatgatacaaggagaattcagttctttttggcagacctccatgtcagtttggaagcagtaaaaacaaccgcaaaaacaagcctggtttctcaatgtctttatgctcacgttttaagtaacatttttttctctcttatttttgttttgctttgtttttaataactaggaagtaaaatagaaatccattccgactggattgtttgaacataatttccatagttgggttgtagctgagaatgaattatagcaatgagttcaaccatatgtgagatgcttgtatccattactggcaaaattggaaggaaaggccctgcatctcttaattgaggagtggatgactttaaatgatattacatcaagaaacacatagaatcccagtagatgatgtaattatgtttaaaaatgagtattattaaataattcacacttttaatatggagaaattaggttattttcccactcctcccacaaatattcaatcttaatatctaagtaatgaaacaacacagccagtgttatccatcctggtactaaaagagaatgccagttatgacaggctcattgtttactttaacaggtaatttgtggaccggaatcatttaattgttctgagtacataattacatgtcagcaatttccaatttaattaaaatgtacaaatctgaagattaagggaatttttgaattattaatcatttttccactaggaaatcttgttgctctgcaggagatttgtccagtgtacaactatacgtatttttttccttctctttcacagacagacaattttcccgcagagcccaattacatgggcagcaggcagcagtttgttcaaaggtaaggcctattaaataacttttctcagcttccccatttgcattcgtgtcaaaattgctttgcaagagactacacttcagattcaaactagtagagacaacactttctcttctttttctttatatgtatttcagtagctccacgtttaaggacccagaaagagccagcctgagagacagtgggcacggggacagtgatcaggctgacagtgaccaagacactaacaaaggctcctgctgtgacatgtctgttagggaggcactcaagatgaaaactacttcaactaaaagccaaccacttgaacaaggtgagtgaagtcttccaatgcttacaaagtgtaaagcttaagcagtcattataaacctattagatctagagttgcagtttatcacagtggaatggaccatttataatatatcaaagaaacagcaaatcttgaggttgccccagaaaaaaagcaaccattgaataacacagtcaaaaacgaaaaacgaaggccctgggtatcattcattaatcctaaaacaagaacttgaccaaagtcacttgattgttcttatttcatagacatttcccaccctttcctatttggggttatactaacaaggaaaatatggcatatattagctagatatgtatatttatgaatttacagtataaaaattagtaaattcaacactttttagataaaatgaaatcattggaattttatagctcttagcagtgcttgttgatttattttttgtttggattttagcttcaaaatagtttttcaagagtcataggtaaaccagagttttggctttcttttgatttacatctaaggcttcatgaatatcaaatgggtaataaagcaatgtgtcttaaatacatatatttttgtaaaattttatctctaatttattcatctcatgactttttattaattttaatgtttttgttgtttcaaatacaataaaatgtttgctaatgattcatccaaagtaaattaaattactcttatgtataagactaaaaactgtgaataggttttttatgtcctattgtaaaaagtgaaaagaactgtagttgatatagtaacagtcttcagaacattagtagtatgtaaatatatttagacttattatttcagttgttttgaatgagaaactacatttaaaatatgtgaacctaacctctaagtcatttactgattaatgatttatagaaagttaatttttgcctgtagggcagcctgttctattatatatatacctcaacagatacagtgttaagttttctagtcgttaaaatgtttaatgcaaatattaatatacccatatatataagtatatacatatatgtttatatatacttatttatatatattttttaaaacaaaattaatatatattcagtttaaatatatattaatatttttggaataaatataattatgctgaatttattttaaggttgacctcagaaaaagctgttttctaagtagtaattgctagaccgatgacttttttcacgatcttttaccatagcaactttctgtgttaatagtgcaatattgttttaaaaattatttttaacaaaagcaatgtgaatccttatttattattcccattttctgaaaatttatatgtttacttgacgtgacttaaatggtcatgatgggttgtagctctgtgattttataaaacatatgaatctttgagatacattttcaataatggcttgttgaaacttgatatgtaaatacactgcatgagatagacccatctatgtgaatgacacataaaatgattgatagataattgattggctactacttatgaaaatgcctaaagtaagtgaagagttttttgtatctttatgagaaactctgttaattttttaaaaagagagcaaaccaacaaaaacagcaacaagaaaaaactgctgttcacattaactgtttaatttcatgccaaccactaacttagaaatgtatttgacagaagtgaattttatgtatattctcttatagagaaaggaagtggtcttatttattaagtatgaaaatgcaatttatactaaaaagctattttttcaattttgatattgaaaattgaagtctagggaaggtggctattattatttaaaaaatgccaaagatggcataaattttaaataatattgcgcaggaaataattgctagtctaagagtaagaatgccacacatccctattagtaaatacaggaaaattattttgaatctagaagatacacttaaataatttatgaattatgtgtaaaagactggcttccactttaaagcatgatttatatatatatatttttattatactttaagttctagggtacatgtgcacaacgtgcaggtttgttacatatgtatgcaagtgccatgttggtgtgctgtacccattaactcgtcatttacattagttacatctcctaatgctatctctccccgctccccccaccccacaacaggccccgtgtgtgatgttccccttcctgtgtcccagtgttctcattgttcaattcccacctatgagtgagaacatgcggtgtttggttttttgtcctttcgatagtttgctgagaatgatggtttccagcttcatccatgtccctacattttttaaagttagttaaaataatatttcactgattgattgatccattgatttgatttattcattcatttaataaatatctagtaagtgctttgaatatgtaaggaaacgttagatcattcaggaatgtcaaaaatgaatttgaattagagcctgcctttaagtaatcatatggaactaattacagatgggtgatctctctctctctatttctccccttccccctcttcatgttcccctcctttgctttctctcctctcatctttctgtgtcttctgtcctcctatatttctttgtctacttctcatctatatatctctttatctatcttttttgtctatgtcaactattttatctatctgtcagtctgtctttcaactatctatgtttgtatctgttcatctagatttagaggaggagactacaatttattgagttcttaccacttaccataaacagtgcaaacaatttcaacattaggttgtttaacctgcaaactctaaaaagtttttatttttatcttacatataaaaaataagctaactcgaagtttattaactggcacagcaggttggagtttaatcctaggtctggatatggctctaacttttctattttctacacaaccttgtctccaaatgagagactttgctcaaataaccattttgactcattgctatgagaatatattgaataaacatcagagtaagtaaaaaccagttaatgtgtgcaaaccaagggggagaagatcaaaatatctcatatgcattgattgaactactgtattttgttcagtacctgaaacatattaccctatttaattctcatggcatttataggtaggaaagtactgttactctcacattcagtagatattaagtaactattaagcaactttttttaatattctgtagttataagtagtgaaggcagtatagaaatttaaaaaatacattcaaagcctgccctttcaaacaatgttttatgctattcacgtaatgagtagtttactcagaaataatgttaaaatgttaaacaagcaagcagctattgtcttgatcaatgtatttatttattctatttgaaaaacatcatgagagaaaattccacaattaagtcaagcacacatataaataacaacttcctttatagatgagagatgatgacagccatatccaaataattatttcatgtagatttcaaatattaaaccctaattttaatagtttcaaaattaccctaaaaaacaaaagtaaattttctcttacgagaaaaaactagagctaaatgaaaggagatgtgtttctcagtctttttctcttactaaaaatgtgtagcagtgccttacacagatttcaattaaaattcagtagcatattatattttatatttttatattagaatataatttaaaaatatatatattttttccaatttaaatgatctcattttagaaaaataatgttttatatttaaattgaaatatttctttaatttagaaatgaaaatcaatttcaaaaataatcttcacattttcaatactttctttgttaataatggttttcctttggaaatgacttaggccttttgagattttattttattagctcaaatattactttctcatcttctgtgcagtgaaattttttctatttgttccgttcctgatatttgtgtatttttgctaccattagtttaattccaaatacatcgcaaaagtaatgtattgcccactattttggcaaaataatttaaaagaattcagcagctaattgaaggtgtgatgtactgtactagagctgaagacagctttaaggatgtaatgttaataaacccgttagtagaaagaggttattttttcttttagtgtgatgggaaaaaaatcaaagaatgtatctagtttctttccattttattgcatgtttgtgccctagttttcaaatagttaattagattttctccatacccccctttcatcctttataaaatatagtaggtaggaaggtagattaaaaaattccaaatattttggaagttgtatagtaccataataggatattacttaataaaaaggtaaatatgtatttttacctaataaattattgtttattttaaaaatgggaaaagaaaaccatggaatattgagaaaaatatatctgatccttttttttaatgattttatattttggaagaagataaactgatttatatcaagacctaatgaaaataaatatagtattagttctgtaaagaagagctacctatagttttataaataataaaacttttttaagagtttatgaagctaatgttttcttaagcctcagaatattattcacactttagcttctttaagtaagtactgtatctttgaatttctatccattagaagccctgtaaattattttgattgttagcaataactttttcttcatgaaaagatttaataagcattttctaaaatttaatagtctccattgatttctaactaataaatgtacagtccttataagtgcttaccagcaatttctctgagctccttaatgatggctaagtgatagttcccaattttccaaggattatcagctttctgctatctttataattgactgaaaccaactccttgaaatagaattgtacaggagaattctgttgcaacctgtgccagaagtggcggtgggatcatcaccaattctaacatcacccttttgggtggccggccgtcagtcccttcccggtgactggattcaaggacttctctgcttcccagggattaccattctaattctttctcattttttcattttatttaattgccttgtaatttctagttttctatttaattctatggcttccttctcctgcctctactgttagaaaatctgtcttcttaaattacattgagttttaaaatttcataatgaaattcctgattcaaatccaatttttaaaatccatgaaaagttgccagtaataggaatatcaaatatctttggtttgttttagtgaattccagttctaaaactaaatttcttccttaaggatggcctttttttccttcctagaacattctagaaaatcacagaaagtaaagctaataaatatttgtttgtttctttaagttagtatttgaattttgcttgggggcaccttaatcaaaataggcttaggctagtttaaatgagggcagtatttgttatgtaatttcgcagttgcctagaggtaagggtgggggaggctctgagtttcactccctcaactctccctttctaattccccatataatgactgaaagttcatcatatttctaattatgtttggaaatgaaaccgattaagaaactttccacaacctgtattttaccatgaaggaactatttaagaaagctatagcaaggaaatagaagttgaggctcgtgcccacctggggacgaatgtgtggaaccacacattcagattgtgtgaagttagtgagctagaggtttaaggtgctgaccacaaaccagttactttacaatcttccctataactgacactaaatagaaaagtagtagaactgtttctttctgtgttctagtctgtggaatggttactgtagttctgactcttccaattaagcagtcgagatcttttcccagaccttcccataacagacaacagccaaacttttcccaaaccaaagagagggtcgagatgcttattcctgtggcccaatagcaagatgcagactaactgggaaagaagagagtttacttctgtaaccgggtatagggagaaggctgggaaagtatcaccagaccaagtctaaattacaaagttttccagagcttatataacctctaagctatacatctatgtgtaagtgtgcatttgtctaaagacataagtgattaacttcttctaatctataactaaggtctgagtcctgaagaccttcctctggagcctcagtaaatgtacttaatctaaatgggtccaggtgccgggggtgattaccctcatcttgtctcctgctaaatcatggaggtttgggaagttcctttagatcctccaataaaacttgtttgtggaggtctgggaagtttcttcagacccccagtaaaacctgtttaatcctaaacgtgtcctgttaagaattcctttgttatcttgctatgctttaaggcccaggaaaggcctactcaagacttgatgggcttttgttacattccagcctttgtttaggggcactggctctttcagcttttaatatttaacctaaccactcaatcagtgctgaaacatttgtcacagaggcctgctgttcagctgttagtgagacctggcctgccaaaaaaccacttccacgtaaccaagaacatgaaggtgatgactgagtccctccttgtagtggccatatgccagtctctgaaaacaatttttaaaagaaatgctgctgcaagcttattaatagtaaatttgtcttaggaaggaaatagaaaattactgtcatatatgggggacaggaagaaactgttgaatatttaacaccagaaaaaaaaattacttagaaatgtttaaggacactgttgttttcacatagatggcatctaagaaactgcagtatttgccaggacttccaattattttcaagccctgtaaggttttactagaatgcatttatctaatagcttctcagtgtcaattttcccacccccctgtgctgtctttcaagactttcaaaattcatctcggtttatgttttctggataaagtgtttcccaaattgtatgcagcttcagtttatttttgcttaccaaagtttgcaactgcccccacagtttacctaactttaaaagtttcaatatatttttcacatgtgcaaacatctgcttctagaatccagcagctggtatcatgaaaatagagagattttatgattctcatatttgttgcacattgtaaagcctcctaacaagtgttgcatgatttactacggactcatgtgattttgagaatctcttgcttttgctaaaattagggaatgctgggactatatttccaaatgtcctaaaagccctctcctgccttataattattgtatctttcaagtaaatatctcaacatatcaacataaaaaagtcctttttttagttttattataatgacaatattttgttttattttttatttcattttatttctttctagagacagggtctcgttctgttgcccatgctggagtgcaatattgcaatcacagctcattgcagccttgatctcctgggctcaagtgatcctcctacctcagccttcaaagtaggactacagacacacacaccactatacctggctaatttttcaaatttatttataggtatggggtcttgtttcattggccaggctgctcttgaactcctggcttcaagtaattcttccgcttcagcctcccaaagtgctggggtcaccagttagagccactgtgcccaccttttttattttttattaagaaaaatcatgcactattattaagtacgcttttatggaactaggagggtgcccgtacactattaaaattcagactagttatcagcattagttagttaagaacttaaggaaataattttgttaatttaataggtctaaaacattccccagaaattttctcttatttcattttgagagcatgttccaatattagaagtcctctgttcttttaaaagccatattacaaaacattatggtgagaagaaaccttgaaatataacgcctccattttataagaaaacagacagtttccattgagtcttcaggttagtggcaaaggcaatactagttccaggtttgtggttttccactgtaggactctttccatcctaccaagccattcccgtaacacacaatagagacttcaaagtctccaaataggcacatcatatctgtagcagcaccatttatttccttacctgaaggaaatctgaagatgtaagtggtcatttttgagagcttgattcttgatcctttaacatatattgaatgaaagcgctaaaatgtctcaatccagacgtacccactgacactactgtgctatcaccaaacactaggatgtatatattttgtcagtctgtgcacaatatctctatttctcttatttgttgctcattgattctttccttagtgttgtaaggaatcatggaaacaggaaagcttttaactcattcatttattcattcactgttttaaaataaacaggtataccacggaatacaaagatgagctgaggcacagactgggttttcagggagctcacactgtcataagagaatctgacatataaactatgaggtcagtgcagtaagacatgtccacaaaattcatgtagaatgaaaacccagcccagatttagggaatcaaagagaatttgtggagtaagaaacatttgagcagacccttctgcacacttggcagagtaaagtcagaggagggaggatgacaggaaacactcagaagcacagatgacgtgaaccagtgtatggcaagttgctgtgaggtgcagatgagtagcgatgtgtgagactaggaatggcagatatgagactagggaggtggctggaagcccagtgatgcaaagcctgatagagagccattaggggtgctcaggaggtaacattgcaaacttgcattttaaagagatgatgtttctggcaatgtgttgggagagaggaataaattaggaagcttgggaagtagtccaaggcaagagaaaatgaggcccagagtagtgaagaggtaggaggaatgaacaaagtaagcgattaaaaacttgttttgatatatgccactacttttataatgataatggattgcttagtattttacttgaaattagtttttgggataagaaattctaaaggaaaaaaatgacttaatgtctaactaaatggaatattaattgaattatttaatgccttaattaagttttaatgttatgtatgtgttaattatctcttaatgtctgatgcttatatgtttattagaattgactcagtaatgtggaacatttgaaatttttttccagagatgctaggaaaaaaacaaaaaaacaacttcagttaaccagatctttgagaaaaccttcagaaaacaattaggtagtataaaacttgatgtgttattgtatcataggattgtgacttcagtagctgcctaaacagtagtgcagtttactaaggtggtgaagacagggtgaggtcactgcaggaacaacatttgggctttataaagaagagtttagatttagacatgttagaaatgtctgaggcacccgtatggaagtatcagaagaggcaactggcaattacagtttggcaatcagagaggtcaggaggtataaacttgcaagttattggcatagaagcatacttaaatccaagtaaattaatgagaaagaatattgggagaaaagataatagggttcataacagaatcccatagaacacaacgttaagaagctaggaagaggaagaggtcagtaatagttcagcctgccaagaaaaatactcagtatgttctgtgggaatccaaaatctagagacccctagatgagatatttcactgaatcccacagtttttacatttcatttccagccaagtataattgatagccaaattatgacaatatattggttgaatactgctgtttctatttaaaataaaatatactgagctggttgtattttatgattcacaaactagtcctgagggcagtcccaaatatgtgaccatgcatgactggcatcaatgtataacttttcaagctcactattttgaaagaagaaacatttacttgaaaaaaatatgttttgaatttttaactaactttttgtcttgtgcccactatgcatatgggactgtcttagttgttatgttgaatgtttgttcaacaaatatatattgcatttctggcatgtgacagataccgtttcaagtgctgaggattgagtagtaagtgaaacaaacattcctgctcacatagagcttacattccagtgaggattcctagccaattccctagactctcttgggacttatgaaacctattttcaaagaatttacagtctagtaatgaaaatgaaatatatattgaaaatatagtaaaatgtagaaaataatgtattgttatttaggtataaatgaaaactctagggcttttaaagaggaaggatagaatactaatacttattcaatgaagatttcatgtaagagttaaaatttgagctaggacttaagagatgaacagaattttactttaagagataaggagaaacttaaacagcataaacaagcatgaaatatagaagatatatatacagtgtttcaaagaattgtttgatgtattcagaggagaatggacagagacagaagagttatcagtaagaacgggaaagccatagtcagtaaggaaggagaggggtaggaagctacatagtcacagtggccgaagctacgcaagaagacacactgtcggttctttagagaaatctaacacaatgaagttcaagaaacatctatacaatctgacaactgacaggtcactcctgatttccatgagaggagttaagatgttaaaagataagagatttcaaaaggatatatcgtggcacagaaactcaaatactgcatgatctcactcatgtggtggaatccaaaaatactgatctcatagaagtagagagtcaaatggtggttaccagaggctgaagtggttgagaggccggcctagaggattagagagatgttagtcaaaggatatgtaattacagttagaagaaataagttcaagagatcttttgtacagcatggtgactatggttaaagatgatatgttgttttcttgaagaatgcagagactgtggatgttaagtgttctccctacataataataactatgtgaagcaatatagtttttaattagccagatttaactatttcactctctctctctatctccatatatatatatatatatctcgaaacatcatattgtatatgataaataggtttttttaaagagggatatgccaaggaattatggtcagagatcggagacagaaggtttcctcctgtttcaagaaaacgtagcaagtaatggagagggagctggggtagctaaggaagatattgttatggatgaaaaaagctttgaatattcaagaaaactgagtatcaatatactgaggcagttgatccagttaggaggaaatatggaaggattggactagaaaaaggatattcattgaagcataatggggaggctagctttaaagtaaagataaactcttctgtaaagaaaggaatgaagaaataaatttgaaaacataaacagagatgtggaagaaaagggtaaacaattgctggtagtttataataggtggctctaatcttttctataaagtgcagggtaaagtccattaatctcttatttcacataagcacttatataaatgacactcagatatgtaaaaattcagaggagctaagaaaattaccaagatactctaccacaaggtgcacatgcgtcaaaaacacgtgtggccattatttcatatttataattggtaaaaaacaagaaataggggcatggaatatatcaaaccaaatattttaacatgttaaaattaattttttctttacttttccgtctcatggttctcatgaatttttgaaaattgatgttatgatatttaggcatataattcttgaaactgtatgctttccagaattaagaatttttctgatcttagaaaggggctatagttcatatacatacattatgtagcatttccactggattctgtgacagtatccataatcaaacacattaacattgtgtagtgaaatatctgaatactcgcactaaatagggtaaactaataatataagtaacctatgtcagttcaagtcagttttattcaccaaaaaagtaacaaagttacttcaagatatggatttttttattttaaaattatgaataaggaatatgcagtcttatatttaatttgcatgttacagcttttcctttttaaaattcttgacaagttatattgatgatgatttaagcagttgtataatgaaaaaaattatcgactacgaagacacattatttaatccaatattctatgaaatcataatagaattgtgcagttaggaatcttcagactgaatacaaaaaaaaaaaaggagtataaggggtgatggactatttagtctagccaaagtaaatatgataaatatttactttgggaagctaaaaagtaacctaggcacatggtaatgtataatcacagcataggatcattttgaatagcacttttaggatttgcagaccaataacaaatacacccttacctctgacactgggtttatttttgaaacaaaatatatatttcatggaaattgatttgtctgccctagattttattttctttgaggatttgaaaattcatattgaaagatgaaattgttttgtttttgttctgaatcattttctttctaatttgaattaccgtgttcattacataatattctttatacagatatctgaccttttacccttacaagctaagagtatttgtagtatttaatgggagatggcaagaaaacctgagaaaattttaatgcatacagaataacttcatgatgtatgcaagcattactgcactctgttagaaaacaatagacaatagattacatcttaagtaaatataaatctgagaatattttctttactcatggggttatgttttgatgtttgttcagggccaggtctcattatcattaattcatacatggataaggtaattcagtaaatattacttcagtaattcagtaaaaattacatatactcatgtatatgacattgtttgccttcaaagtgttttgtctttgaggatatcaactctctattgatctatctgtaattccattaggtaaatgttatatctacatatatatatatataaatatgtatgtgtgtatgtatatataattaattttgctagagaagtaaataaggaatgacttcacaaattacatgagcttgtaatacgatcttgaaagtggactgtctatcagatgaaaatataaaacttacaaaaactgagagtaatttaaaaagtgaattgagtgtttaaaggcgggataatagcatcatcaaagaagtggagatgtagcaagccatagcataatttagaaatggcaaataaatcaaaatatttttattggagtgtagggttatcatggagataaactggaccaaaagaatttgttagggtcagattatgaaggacttgaatgccatactaacgagtttaaatcttattttacagacagcaacaaaactttattttcagtgtggttacctagtcaggttattgctttagaatgattttttttttattatactttaagttttagggtacatgtgcacctgaggagggttgaaaatgcaaacaacttgatggccaagctgatcattcatcaagtttcaaaaggacagtggcatgtttaaaactctctgaactttgtatattatatcatgtcatttaattgctgtgcccaagacttttattgaaattattctgaacaataagcataactcataagaaatattgtgcaatatcgatttctgtttgttgatgatacccaaagttgatttttcccactcatttttacagcagagctgatacttctatgttaaatataattcctaatgaaattcttaagagtataaatatacaacaaaccatatgaagttattcaatcagataacaaagatcagctagtaataattggtaatgtaaagaaaaaattattaaacatctactatgtgtcaagcattgtcgcaagcaagtgcttttaaacacatctctcctcaagttgatgatattgctgttaccacctttaagagatgaaaacctgagcatcagagaactgaggtaactcgctcattttgatgcctttaggagtgcagcagttgtctgtctcatgccatgtctgtacttaaacttccactctcatcccttttacttatttacaatcttagatgattaagtgcaaaggagagtttgcagaacagttgtatcaatatttctaagttggaaataagatatgttacttttaaaaggtgagttgaaccttattctttataactaaatttaaagatttatggagagtacttcagcaccacctatagtcatatgattaactgtgattatttattagtattattcttttgatttaccttgcttagcatttactcctgagactcatatctggtgttttttggttttgttttattctgttttggtgcttatatagattacttacctttacccagaataatctctagtttattgctacagattctgcagttaaccctggtcagtcttactgaaaatggatagaagacacaaaaagctctgtgttaacacattaacaccatttaaaaataatttaatttctatatactcctaaaaccacccttatatatgaggcttagcttattaatatatagccactggtgaaaacaagatataatgagacaattctaaatatatggtctatctccccattcagtgcctctcagtgccaaatggtacttctgctaattatgagcaataaataagatcactttttattttttaaatgttgtatttattaagtgctagcatgagtgttatgtttagaactatctcagactcttccaagatatctacattatacacacaaatttaattcccctttaatgagactctacaatgtacaaaactctgtagtccatctgtattcatgagagatttcacagttctctaggtacttgatcaaagtttttgcacaattaaaatagagcagcaacaacaacaaaaaaccccacatacttggttaaactccattttttttcctccatcccaaacctgccagcattttatcttcacgtctatcccaagccctccccagccatcttccttcttatactcctacaatttacctagtcactccagttagaaacaaaggaattactatttcctttctcttcctcatgctaacatctgtcattaagccgtgttgttaccacaccctagttctacttgaaatttcttcagttcactcacccccagtgtatctccctacccaggctacccttcttactcaaaataccctctcaggtggtcacatgtattctctgttgtcctgttactcaatcaccaacaattagcaagaaagtgatctgcttgcgatgtaaatcaggtcatttcactcttccaattacaatgcacaacacttccaaaacagtgtaaacttttaaccttggccaacaaatcctctctgtcacccctgctagctcactctacaaccagccattgaggcattttcttcttttctttcttaggaaagaggcgtctagtgctgagactgttttgttgttgttgttgttgtttttgcaccaacttgtctccaccagtagtctgcaggctttgtgtggggaagaaaatatttctgttaatctccaaagtattcccaatgactagtttaaaagaaaaaaagattgatcgagtattaagaccacaggttaagcagaagaatttagagaacctgaagttgataatgggtaaatgttaaaggatcttgatccggtaaatgacatgatatcaaactattaataatttttaagccttagggtagttctgttaaagtcagtagcagatacaacatttaatgactattcaaagaacagaattatgtacacttatctaacttacctcagggaacatacaaaaatttcaacagtttcataagacaggcatatttattttcattttgaatagaggaaataaccattctaaggttactagagcttttgcgtgactaagccaaaattttagcttaggatgtctaattctaatttcataggtatttttattatttcacagtggccatagcccatgtgagaaataatgaagttctaaccagcctaggtggtatttaagagggagtcatggggatgattgtatttggagaataaaggccttattaacatcttgactgggagttggaaacccttgatagaatgatcatgtttttcagtattaagaacttccatcaggttttaacaatacagttgggctgttaagtagtattggctggcaaaaacaatatgcagaggaaacaaatgatttaatagaaagggtggaaagagaatcgggactttgcaaagaatgagtgcaatccattttgaaacgtatgactcctttacttgaaatatgtgactgcagatgctcagaatataatgtaatcttgagagaaagatagaaaaacttaggttaggttttgattgcctttaactgatattgtactataaagtatatacaaaaattacagtaagctgacatcttcaggaaaatagtgaatcaaatcaacactgtgaaacatgagacaaatcagcaaaataacagcttatcctgtgagtaaatataataaggacctcaggtgacgctggtaaatattcctcaggactcagaaaccgcctttcctattactgtacccagaagacacatttctaattaaatcattcaatttgaatacccagatagtagtgggcagttatttgtgaaatgctgattcagttagccatatatatgcactgatttaaaaaccatcaatttaggtaagttcacctaaaccaattgagatgtgtagaaaataatgatagaaatgaaagatttgctgaaagcaataagaagacatcaccaagaaaaggaatagcagcaaattactcacatattaaatagtttctaaagagaggggtaatgtgcctctggggcacgaggtgagatacccttgaatttaaacttataggagaacccatattaaaataataaaagttaaaagaacgactctccagaggccggagttttccaggtttctttctttcattttcactgaggaaaacaacactatgtttctgctcacactttccttctgtaatgtactgagatttttaaaaactaagctacatagaatcctagaggttagaaataaatctcctcctagatttgttcttatgagatgcaattttgactttctatacttgattactaaatatatgttgttttataagcacacattcacatatatataaacacacattattttatttaaacacatatatttatattcagtttaatggcataagctttttaaaattttaaaaattacacctagcctacatctaccaaaatattattaacttctcaaatgtactctaattgtgcctggaaattgtaccaggttgctaggaacttgtccttaaaattccaaaatgtataaacaatagttaataatgcattttcacatagacttgttagcacacaagtattcaaaacccattatttatcaacctaattatttatgtgttcatatgacaatatttcattaaccatcatttttaaaatgttgaatgttgaaaagaatgaaagaaacagatttttaaagccatggggcaagttattggttttacattatgagtattatgcttttatgaatagatgataagtattttacttcactggttttagaactatggtgttatgaatataaatttgtacatgcatttcactacatttattacttacgtatcaccagttcatttgaatatgcttgatacatgtattagtgccatcaatgtttgagtgatatgctatcattttcttctaacataaccaaatttttctgatatcagttcaataatgtcaaactactcaaattcagctaataatacagcacagtaattaattttgccttggggaatctatctgcattatgaattactttaaaaagaagtcagattttttaatttgctttggttcaacatcatactgaaattgaagttgagtcaatagtgtgttgccatataaattcttattaaaatcttcaaagataaatagatgtgatagatagtaattagtatgttatctataattttcttctaatttacttgagggagactaaaactaacttggtctcttagtactataagtaaattcttataattgtctttatgctcttaatatgtaatacctattaaaaatattggacaaggtaaaatctatatagcaataataatactgacatataaagcattactgattcttcaaaatgctatacattcttttgtatcttctcaaatatagtttgcattgagtcaacagctatttgtgccactatataaggaacgaaggtgtgaaattatgtacaaacaagcctaaagcctaattcctgatctcttaaagcttactttccctcagtggatgtttgtgtttttcaaagcttttggaaaaatatgtagtttgatattgtgctagttatgaataccagtctaaaaattattttaaatctaccatatgaatattaaataatggatgggagttgagtataaaagttggttggaatgaaaatttatcttacctgtgggtgtgtggtttgtgtgatgaaattgtaatcaattttatatagaataaaaaattgtggagtcagattgtggatgggatcctagaacacaaaaaggacatacggtaataactaaggaaatcacagtaaagtacggaatttaggccaggaacagtggcttttgcctgtaatcccagccctttgggaggccaaggcaggagcatctcctgaaggcaggagttcaagaccaacctgggcaacacagtgagatccccgtctctatgaaaaaattttctaaaatagccaggcatagtggcatgcacctttagtccaaactactcaggaggttgatgcaggaggatcgcttgagcccaggagtttgaagttgcagtgagtcatgatgttaccactgcactctagcctgggtgacacagggagatctcatctctgaaaaaaaaaagtgttgaattgagctagtaataatgttagtaataattaataaatatttgttcatcaattgtgacaaatgtaccatgcaaatataagatgtcaataatagagccaactagttgtgaggtagttggaactttctgtagtaactcattttgtctataaatctaaaacaattcaaaaattttaaatttattttaaaaattactaacgttagcagaaaaggactgagaccaaattttgcagaaccctggatgttaacctgagaatttgaacatttttaatgatcagtaggaaaccatcaaaaatataagggagaagcataacataattaatgcagtaatttaggaaagcttttgcaatgactctacaaacaaattgtaggagagcaaagatgatatcaaaggggccagtctgggtctatttcccatataaagtgatatgaaccagaatttatgtggtggtcagtttgagtggaaatatgaaggtttgaggtagtttgcaaataagtaacagcacttggcaattagatggatatgacatctgtaggagaaacaaagtctgtgtaatttagagaagagatataatataaaaaactagatttggagatatgaaaataatataaagtttagactttaaaactacagttgctaatggtgttaaactagatagtggaaaataacatatatttgaattctcaaggcaaagtgaaagtttatttcctcgaaatatggcctatgattaaataattcgaaaacttcttgaacactcaagaagggatgcttacaatttttcagcctagaacgcactgtggtctgtttcacaaatctttttgttatgactattgtgttttatttgaaattccagcattttctcttaagaacatagtgagccccatcctttaaatgcataactaagtattagaagtgaaataggaagtttcccaactgccaggccatcactaaatgagtaatctctaatatgtattcagaatggttaaataataaaaatggcacatcgtgcaattctaaattccgttgataaaatgcaattttaggtactttattttattctcatttacatttttacttttcattattaaaaacaactttatgttctgtatttcacaactggaaagtaaattacttctgaaacatttaaagaagggtaaatggttggaattaaggaatttgaaagtgatcaggaaaacaccagcaattacttgagaaagagagaggagaaagggaattaaaatttattcacaggtgtgtgaaacaagctcttttctttcaatggaggttcttagaatgtttttgtaggtgttttgatgtgttcagattagaagtagctagctattagattaaacacaatctcaatctcaattagatttacatttgcattatatatatttgactggctcttgaggttcattctttaataatgaagctaactcatttttttaaaaaatctaaaattgtattatcaaaggagtagctatgaaggagtttgcttgaaaaaaattaaaaagaagatttgcattcattattgacctgtacagtgcctttcatttggattcagcaatttaaaatattatgattaaaatatataaaataactaactattaaacccccaatttgaccatgaatacctgaaaggaataatgaaagttttgtccacacaaaaggatgaataacacaaattcttctataatgatgtgtcctcttgttcccctctgtcactactgtccaaggctgaagttgtggagggagctcccccagtggagctaagtcctcacacgtggcagattgtcctccaccttcatcaggttcaaacattttcaggatagttggactcctgtgagacaatttagtctagataaactgtgtagagagagactgtcaatttgtaacacttatagggcaatgaactactaacatctttggaaatattttatccagttaaaaagcttaattcaatcattctcctacccccccaccccattttttttaaaacctttagaagtcatgggcttctctccttcaataactagttaaaacatttaaaaaatatttggggcatggtggtgcacacctgtagtcccagctactcaggaggctgagatgggaggactgtttgggttgagctcaggagtactaggctgcagtgatcacaagactgcactccaaccctccagcctgggtgacagagtgagaccctgtctcaaaaataaaataaatataaaaaactttgggaaaaattgtgtttgtgtgtgttaagtgtgataaaatttcccttttggtactaattgacacattgactaaatgacaattgacataattgacacatagtaatgcaatttaaaaaattttattagaaaaaaagcaagattaatggctattttcattaaagccaatctttctccttaattcaaattttgtgttttgatttgtatgtgtgtgcacatgtttgttttcaaatgtttacaaacattaaaatgtctgttaggatgtatgagtatttgcagaaatgctatatattatatcaaggtacttgactgtatcatcaaatgcatagcagaagatttgaaagattccacatcattgtaatgaatgtaagatcaggaattaaaatcagttgcagtattgactcagtaataataccagctgcagatctatttttctggctaagaccttcctttacttggctgtgtcttaaattccatacccataaatgagaggaccaacctagattatctctaattgtcttaccacctcataatgcagtgtatatacaaacatatggagaagttttgctattgtatcaacctctactctaattccaccattgtagcattggcatccgtacttgaattccaccaatcattttcttagtatagaagaggccatgattaattcttcatggataatatcaatgactaaaaatttattagcgaagaaattcatttgtgctttcgcaaaattttagcattcttgctgttgctgatgataaagatgatgataatgtgttaattaaaaatatttctgaacagcaagattcattcaacaactttttctgagtacaaatgtacaaagtacattgtagaaggggtagacaacaatacttaggggaatatgtcattctagtcaacatatgaaggtaatgaagaagcacaaccagaagctccctggggaagaattttgagcagagaaaatgaccagtgcatttcctacttgtctggcatattgaatcgaaagcacaaagtccagcatggctgagggagaaggggcaagtttgagattagaggaagtgtcagatagtgaaaggagaatgtagaagagggattgtattggacttcatagaaaatgggaaggacacaattcttggttaattaccttattgatgatgtttgtaatctgtttttaaaaaggataatctaaatgaggttctcttacagtaaagtaccaaacattcatggaaattatatattataatcaaatttacatagacctttaaaaatacattgcatattttctcaataagtatctttgagtgtatttttctgtatatgcataatgcaatcggatttattccaaatatataatttgtggatttatcttaacacttagcattatattataagcaaatccttgacccctaaatttcttcaaaatcattagtcatgttcaactccgtattcagaactgtggttgaagaattctttattgatgcatacctctattctgggaaaaaataatatgtatacacatacattttataattacttttataataggctattctaattatatttgcagataatatactgttaaagatatgtcttaaaataagatctctaattattttcttaagaagtggcaatagaagcaaaattattgttttaaaggatgtgaatatttttaaatgttcttgatgaaaacaatgactccataggaagttaaagtaaaattagtaggctatagattcttcagaatcttcacataaccaggccagtgtccaaaaagacaatactcttaagaaggaaatataattatatttttatatttcatattaggtttttaaaatcatgcatgaaaaataattattttaatatttagactagcatcctatccatattcatgctgggtttttactgtattgttggcattatttgggcacaagtgtttttacaaattagtgaaaacatatgcttttcatatccttttattggaacacatctctaaaagtggcaacacaaaaaagaagcagtatcagatgaactggtagaatctagaataacttttaagaattactataatatcatcttactgtaataaagagtgtaggagattatattcaaaggttctttatctaattagaatgtaaagagatcatttaatgatgtgtaagggagttcaagttttagatagaacagtttagaaaacctaaaattattgtcataatattcatgagtcactataacttcttttaccaaattatgcacctgaaactaaataagagaggtgaaaacaaggaaaatcatgaatttcattaggtgaaatggtatatttaatgtatacttatgatgaaagaatacaacttctcaataaaactgaaaattttcatgggtagaaaaatttgatacaatgcataatccataaatataagtcctttgtagtatcatttatgtgtgatataaatcatgaaatctttatctcgtgccgagtattgtttttatgataatctaagcacagcatgttcactaattgcattactctaactagctatattgtatgcccttcatttgacagtgtaactgtataacctttgaaaatgatatcccttgtggtttttaaatgcagtatcaacattttggcagaatcattttacagacatttaaattacatgcatttgagttaaaaattacagcctcagaatagtgtcagcaatatgtatattttttcttttactcttgctcattggaagtataataaattaataattctttggtgactaccaattcattagtcaaaagtgtttaccaaaattaaatatgaagtaattatgaagaaatatttaattattccagctaaaattctgttattaagtgaaagaaatagaaaatgaagcaaactttttgttcatttaaaatgaacttaattcactcaatacatgaccatttttatagcacatagtgaaaatatttagtaggatgatcatataatttattattcaaaatggctaatttttgagggtgaaagggacacttttaagtctttcactgggacaaatatttcaggacaaatctgaacttatggccagcctaataatagataattttttttaaatgatgggataaaaactaatcatggaggagaccaaaaaaacataaggaccatggagagatgaaaagtggggagtaaaccaagtattattctatttgcctcttttgtgattattttttaatgttaaagcttttaacatttacattttaatttttaaaaagaatgtaagctatttttggtactcatagatgtagtatgtgtacacatcaattaaaaatttaaaagctttacatatagcttcacacatctcccctgtgtatttagaagtagaaatgggtaagttgaaagggaatccatgagaaagaaaattatttaaattttaattcatggagaaagtggcctatctaggataattttagttgctgttagtatgaatgtagagtttccttacatattttgcctttgcctaattaataaacacattattgttatgctgactaataaaggcactttatttttgaattgaaggcaaacctatatttgaatgcatatcagactgtctttctattttgaaattatactagagcttattaaattttaatacaagtaaaccaatttaaggtgacttatggtttaataaatgtcagtgagaacaggaagttaaaatgcttataaaatcaggaagataatttcaactcgataatgtttcatggggcaggctgataacattttctcttactatttcttttcatcctctattttctggtatccaaacagtgatatttagcatttcatgccttgaataacagttctacgcttattattaaattgtctgcaattttatggataaataaatgagagagtctcaatttcttatccatgcccaggaagcatactggcagtttttatttccatacatcaattgaatgttacgttaactaactgctctcttggtttatcaacagttaattatatctgtattaatttactttaaagttttactttttaaatattgtaatttgtttgaagttaactaggctgacatttagagcttgtattcacaatgaaataagacttttaaagcttttgtactaaaatgaattaagacgtgccataaactaattcagctacatttctagtaatttaaatgttttattcaatatataagagcatctgggaatgttaaaatgctatatgtatttcatatccttttattggaacacacttctaaaggtggccatgtgaaaagaagatggaaagaacacaaattaacttgtattttaatattcacttattttagattgagtattatttttctttcattcttactcttttctttttttagtcaccctttcaagccttccctttcaaaggggagaagaaaagcttggttagctttcccaactcagcttataaacataaatctcattttaaatgctaccattttgattaaaaaacaaattatacatttcatatattatgtattttcagcagtaaggtgaaacatatcataaaacctttgaatttttatttatttgaacttgttttagaattaagttattgtatgcccatttctctcacaaatacatagatataagaagtataaagattttctttttttcaattaaagaaatagagacagtggaatttctcagcttttccatagccaaaaagaaatccatgactcagcctggataggaggttatagtttttgtacttatctccagggatatgcctgttgtcaagatttccactttcatttatttccacggttttcaaataccaagaaagttagtgctcattgaaatagtaaaggtgaacacctgaatgcagaccaacatcttttttttttcatttcagtatgataactaattgtgaactgaaatagtatttgaggtaaaaaaaatttttaagaaacttggtatatttgttcacttacattcatatatatatatatatatatatatatatatcaaggagttaggatacaaaatatcttctctaaaagaatgcttagatcttgagattctgattcatttaaaaattttacactgctctttcatactttgttttttaaggtttaacttagaggaattgcagataggttagagtggatgtgagtcctatatatattatttggaaatgatgcgtaaagtcaaatttcatatatacaatttcttaagttccttaaatttgatttcacttaaaatcgtttggatcttattatttcaaatattatgattggaaggacacaataatttaaaaatgattgcatgattttataactttcagctacacagatctcttttataaaagattaaattattacacagcatttcagtccaaataattatttttctaattatataggtcttttaaagttatttttctcacattttataatctcttcttttctttagaaaaagttttacaaattcttgattttctttttaaatttttcaaactattacatgtttagatttcatctttctatataagttatgtcttcagagaccagttaaagtcaaaggaggttgcaggaatacttccaacttacacattgtaggtacataaatccagcattcagtcaagtgttttttttttttcttttttgaggtaaatgacttaaagaacagcatacaaggcaagtctaggcagcacatcttgaatatttcatagccaagttttatatttccatctagatcaagttagatgcaaaatgaaatcaatcctaccttgatttggcaaagttgagtattgactcagttgtcaagatgtgaaagctagaagttgataaatcagtccaagtgtatgggtttatgctatgttttctcagctaaagatgtttgttgttaaaaaatgcccaatggacctgagttctgtttgcaacagttttggagcacaataaaattgctacattataatagctactttcttatttgtaaaattatgtcagcaataccttgcatacttaccataaagagcaattgttagaatccaatgagcaatgaagatgaaaagattttgatgagaatgaaggactttctttccttttgtcccttttagccctgtgcattcgtgtatatacaagggttcctcctattaaaaaaatgcatgtccagaaagtattagggaacattctttacttcagaagataaaaggaaatttgaaccttcaaaagatattctaagcaaattcaattattgaataaacacacttaacactagtttcagttgctaaaataaactataaaatggtaaatattatgtgttttcatttttttaatactttcctgaagtgaagtccttttacttgaggtcagcattttattattaaaaaatttttaacctttttaaaaatttctctgaaaaccaaaaaaacagttacagtatatgatactataattgttccattttaatagtctattttttctccagtcctcagagagatcgtatgtaggccattgccacatgtatcattctagagtatattaatcaaggatctgaatcaggatggcaactcctgtgtgtccaaagagctgggtcaggatgtttctgtaattccctgatgaggaatagaaagatattggccttttgtgctatatatattttagtgttttgtattttattaaccacttgattcctgcccaggatacttgctaagtaggacacatttttataagtgtaagtctcatttatccagttgaattgaatttttagaaaagtctcctactgcctgaaaaaaaatgaaatcaattatgtttttcctttctaaataaattaaaatcaaatgtgtagagaaaatgggaagattgagttaccatctatttattgtagtgtatctgttataaaacaaaagcttcaagtatattgataatttacattttaaaatattaaataactgaaaaaaggagatgatcatatttagtttgtaaatttttgactttcatttagcaattttagcataaacccttggttttgagatgctgccaaattggagttttcatatgaaggcacacaaggtaaatttgaagttacagataaaatgagagaaagaaagaaagaaagaaagaaagaaaaggaaggcagggaagaagaaaggaaagacagaatggtggggggcatggaggaaaggatggaaaagattggtttctaaaggtaaattttgtcttcagtggaaagaaatgtatttattctagctattttaatgaaaatcaaccaatttttaacatatagtctggcatttataattccctccgcaaaactacatttttctgaagaaacatcaaattagggatggaaaactggggccaaatttaaatgttatggaccaatgtggtagattacaaaattgccactaccacgtctctactttatattcagctctttacttatatcatttctgtcctcaaagattaaaaccattgtaatttatatcttatttccatgttactaaaaaacaaatcatggctcaacaagcattcttgtaattgaaagtctctgctctacccgggatatattgttgtttcatataaaagtagacaattaagcagaaaatctgggtcctggtttagtttaatcagttgctgatatagatcaagtccctttaactctttggattcaggaccctcatttgaaatccagaactgttagcagtggtctctctttgaagatgaagttcaagtgtattgatacatgggaaaacagtgtgtgaaccctgtaactctgtacatatgataacgtaacggttgttcttagtaaaaaataggaatatatgattgatatttatatttaacttgtaattactaccttgattttccaaactagttacttttgactttcaacagacaacatttgatgaaaatactggctaactaaggtactgagtatcttgactagaatagaaaggaaaaattgcagataacataaaattatttaaatctttatttttagacagacaaattcttattttataaatgttcaaaaaaagtgggttttaatttcgtgtaaattaattatgttttattcccaatattttaagaaaaccatcttaaatgtgtagagaaatataataaaatagaatattgatggaaatgttaatgttacttaaaatagatcattttaataaaggaaaatacagatatatactgttcgcaaaaaaaatgtggaaaataattggactgtttttaaatgccttaggattaattcttcgcagcctgtcttatatggtatccattaaaatataccatattttaaaatacatttcaaagaattagtaataaaattgaaatttattttgtcatttacataggataaagaaagttaggggttctgttttttaagcaaaatgccaggttttacacattttgagtattaacaatggaaattagaacagatctataaattgagattcacaatgaggaaaaagccttttcttctttctaaatggcagtgaaattgctaaagtttttgtctgtgttagtagaagaaaggagtcaaatataaaggttggcagtgctttcatctacttaaattcctcccacatccacagctgattgacagtctcaacaaactgataattgcccatttggtttgttttaaataattcttaattttttttgtatttttaagtaggcttgaagaaatcattaggaaatacttgcatcaagtgggatcatttgcttttattaaggtagggagtccatcctttatggaggcaatcttctatccattggggcacctgcttcagttttcaaatgcccctctcttcattaagctgcatgagcttgttttcattaagtgaaaaccccatgaattcaggctggttttttattctttctgatctcatatggctagacagagtagttcttatttattcataaaataaatggttttatgcagattagccatgttgcagaacagtgatttagcaaatttttgcatgtgttctgtgctagaaatctaagatggttttcttttttcctcaagagatactggatttttaagttatccttttagatttgtgttaacaggtttaacatctaatgtatacaactcacatagaaaaaaaattcattgatcttgccaaataagcaaaataggctaaatgatgttaagaagccaactatttattatatccagcatgaattgctgtgttaccattgttatctgatatttaggcttgtaataacatgttactaccaaaagttaaactgtgagtctgttaacaattcatactggccggataagaatgactgtcattatatacgctttctatagagtcaaaagttaaataatcaaaaatggtatttagaagaaaaaagactatagattacaaataatgaaataaaacacagactatgtatctttaatatattcatcctagagctcaaaacaaaagtgattttttttttttagggtacaaatgaaagttggaaaaggagtcagtaacaaagcacagaaccaaaactcctagttggggggtacttcacattaaataaacttaaattatatttattatgtgaaattaaatagatcataattctactttgggtttctatcagtctttcaaatatattaaaatatttgttaatagtcctgatattcttcagttgtttccacagataaccacatcacagcagtggggcatctgaattcaatgatagtgaaaattcatgccttgaaaaagccagtatacatatggtgtaacattgtacaaaaacatttaatcaagtaacattttacctggacctaatgtattttgtggtgcctagaattataacatgttctgaattgattaaattgattcatttatatacataaatatgaagataatatatagagaaatatatataaagatatatacatatagatatacacacacacacatagagtttgtcttgtttagttatttttaaaaaataactcaatattttttattcatatgcttaagtatcattcctagaatatatttatggaaacaaactttacctgttggccttataggaaaattgaggctagaaagtttatcacataaatgttctgtttgagattaaaattaggacttaaatataggttttcaggggttgagaaaaatcatgctgctttctcgatccttcctggaaaacagaggccgattttacaatatgggcactattcctgctcatgttactgaaagacaccaaatagcatattgtgcttttcacaatttcaattgctaattttgaggactatatagtgaaataagtttacctattccgcagaaatcattgagtaatgtgatccactcaaaaatattccaacatattttctctcactctgaagctgattcattcaggtcatagagatataatgatccgaaatgatgcctaataaaatggccttcaacactgttaatgccggcctttcagagtgaaagaactcaaatgagcagtcaccttaacattaggtagcatatctttatgagaaattaaaaaatggatagtgatctatagcaccttgtagaaaatcagaataaaatattagctattttatgtcaaaaatcgaaaggaaaaggagaaaaaaaacagtagctagaaccgacttgacatcttttttcagccactctgattcagttatatgtaaacagagctccattttgacaactgtttagctcaaggcacagatttgaagtattagagataacggcagttttattagattaacactaggatctttagtgtcctagataattaccagccatggtacatctcgatggtttcagcttgtagtattttaatgtttatgcattcccttgtaggcattgatgttttgtcaaaagagatattagaaagttcatacctagttttgtttcattgatttgtgtttttaaagtgtgtatgtgttcatgtttgtgaaatgattcatatctttgtttttatatccccaaattaaaaaaaggtgaaagtttcttttaatttcctgaattcctaagaaactattctcccagctatctttataattttaattattgatctgtcattctttgattactcaagtgagcggcaccagaattctttcatcaaatttgcacattacgtttctctctcttgttttgtatgatttatttgcacagtctctttgcatacttgcattttcattctggatcctcatgcctttttatccttcttttgtttttacctattgttctttactagctcctttatatgtaagattctttttttttacaaggcgtgtttttattgcttcttttataactcttaatttggtttaaagttttttgattagcttaatattttatatggatattcttaacatttccctatttctgttctttgtggtacccattgtttctctcaaaaatgataaagatcttctaccgcattttttcatgtacatcgaaggaatcttcagtcaataaatatacaactattttaaaattttaaaatattaaaaatgtatattcttttccaggaaaaaaatgttaaaattattcaacccaatgaaatttttatttgttttactttttaaaatgacctcttcagaacaaaacaaaggatactaaacttgatctttccttgccttatgagtagggatatcttatgtcatggtttactcagaaaaatctctgtttatacatattcttctgtcataattattaatagcagttcctatcactttcaaaattgccgtggtttggtcaacacattatgtggtcaacctgttatgagtaactaccacaaagaaatataaaaagaaaaatatagagatacataaagtgtgggaagagactagagttggcatcaggtgaataattcttattttgcccctaagtttcctggacttcaattttcttacctgaaaaataaacatattttattttatgatacctaacattcctcacctccctaaaatataaactatcgcacataattacatctctctctctctcttttttttttttttttgagaccaagtcttgctctatcgccaggctggattgcagtggcgtgatcttggctcactgcaaccactgcctcccggctacaagcgattctcctgcctcaactttctgactagctgggactacaggcgcgtgccaccatgcccagctaatttttgtatttttagtagagacggggtttcatcatgttggtcaggatggtctcgatctcttgaccaactacacaaagattatgtatgctaatgaacagtagctgcaagggaagaagcttagatggatacatttgttttgagggattaaagaagcctaatggtgggagtaaatatattctttcttttgtttgaaattatgttgatattgtccaaaggcatttgtctttggaaaaatattaagtaaatatattaatgtgactgtcattctgtaggtgagcagtcagtcatgcacattaaaatctgaactagactagactagaaaaattcagaacaaacacttctgaaatagggttattttcgcagtgttcaattaacaggtaaataagatgtgttttaagccaggcctggtgatgtgtgcttgtactcccaactacgtcggaggttgaggcaggaggaacaatgagcccaggaattcgagaccagcctgggcaacacaggaaaaccccatctcagtaacaataataatataataataacagcaacaataatgtccttcttttgagtcaccattttttgagtatcaataagcaatgtgtaaataataactagatgtttagactaaaaataaaccttccttattattttcttccagtattgagactcataaaaaagaattttttaaaatgaagtttagtttaccaaaaaaatcaaagacaaaagctagcattatctttcacagtttatcaaactacattgtcacagtgctactttgtatctcccccgtttgtttgtttgtttgtttgttttttaacataacctgtagaagtgaagcaaaaagtgatgggaaaataacgtgtacggtagatatgagatactgttctaaaatttgttctgcttctaatttgtgtggggccctagtcaaatccctttgatatttctcagaattttctactaaaggatttctaaaggcagaaaagagtaaatacatacttgtgggccttccaacaactgctagaagtatttgattctgatattttaaatttaagacacccatattttgctttatgtcttataatttcaatattttttaatagagaagtaatgcttacaattatttttcatctagtaattttattcttcagaaaaaatgtgccaggtttgttttcggttttatgtatcctgaacatagtcccctattagagaagtatggtgataggtgaccagtggttctaaaattctgattctatttattacagaaatgacatagaagtaaagaataatatatttataacatttttgcttcaaatgtaaatgaattccatcctcaaaagttttgtgtatttgttttattacatatttaaattgagtgagaagttttattttaagtgtattaaagtttttaagtgtattaaaaacaacagcaacaacaataactgtacgggtttttttttggatggagtcttgctctgttgcccaggctggagtgcagtggcatgatctcggctcactgcaacctctgtctcccaggttcaagcgattcttctgcttcagtctcccgagtagctgggattacagggacgtgccaccaggcccagttaatttttgtatttttagtagagacggggtttcatcatgttggccaggatggtctcgagctcctgacctctggtgatccaccgcctcggcctcccaaagtgctgagaatacaggcgtgagccaccatgcccagcctgtttttctttttggtaccaaaacgtagcttcaaaataaatggctttcacttgcaaaaggctccatgtctaaacagagtttgtgcctgaattatattgtacttttcttgatttgcccaccgagccctacttggcatcataacctaatagtagcattcactgagtgctttgcatacatgtattcacttagcccccacagaagccctgtgaggatatccccattttacagaggagggagtgaaagaatatagaacataagagatttgatctagaacacctacagtaaaactttaaatccggctgtgcagggttgccaaattcaaccccttcccttccccaatgttctaactgccagacatcatttatatttgcagtaatccacatattcaagttgaaattctcaactcctcaaacaaagcaggcagctagagtcaaaggatagtagatatactctccctttgcctccactgtgctctccaagtactgaaagagctcagcagtatgacacgcaactgcatgtggcaagacagccagtctctgactataaagacccacatagacccataggagaacactgtcctgctcttattgtctttgtcacattctgaactgctgcgacaatgagttcaaaaagtggttagaaaaattagctattagaaggaggcacagttaaagatgctggcaggctccaactgattctgacctttctgcctatctctctgcaaaagtatgtaagtgtttgtaactgtgttgtgtgtgtggcgtttgcatgtgcacatgtgcatatgtgtgttctgtcttgttttcatttttatatcaccagtttacttttattaaaatttcacaaatgatggagttaactggcttctgtaaatgttccccactttttaatgacacattgttttttgccaagataagaatttagaagtccataaaaggcatcttctttttctctacaatttgaggttatgggttttttaagccacatgactttgaatataatttaatcagcttgcttttaggcctaacaagcaccagatatgaactgcttggcattcaaaaaatttttttgagagaggaaaacttatagataatttggggtgcataaagaacttctaggggtagtaaataagtaaaggtgattatttcccaattaggttaacaaagaaagtctaataaatctagggatgcaagaaagtgtatagtggaggaaagataaggaggagtgagcaaaaggagattggagtaaaacaaactcttctttcatgcatcttcataaaatcatgtctatgtcccagaaggaggaaactagctctttttctcctgcactttctattatgttttattgttctgttcaaaggcttcagattaattattataactcaaattaattagcctgagttagtattctcttttttagaacaattgcacagcatgttgaatatagctaataattgggtactatgcatttaaatattactaactgaataaacttctaatttctgagctagtattcttagcattgtatttagtactgtagttcagccaccctatgagtttagcatgtttttgtaaactaaactaggaatctacttaattatgacctttttaatgtagtaaaatttttctttgaattccaaaagtcaaaataaagaataaactttcagaaaataatttattttcagttgtagaatacacataggctcagtctttttgattgtatagtctaccagtgatgtttgttttctgtcataatcagaatgttgacttatccttttatttttactgctgttgttactattgttgagctagagaaagtcacagaaaaaaatttaagataagatttattcctgacttggttggatatttttgtactcttagatacctgttctctgatttcaagactaaaatgaataagaattcagctatataggtttgtagtctctgaaatttaatcacaacccggctgtacctgtcagtgtgccattttgttttgacatcaaagtgaaatggtttaaatgatttctctcttctttgtagccattgtcaaggataatgatgattacatggcttattatgtcttcatgactttttggtaggcattacagatcacaaaatctgctttctaaaacagtctagtaggcagcagaaattttgtagaaaagcaaaagtctatcaagcgtttttccctttgattataattctgataatataaaccattttttaaatctaattttgcattatatttctgagtcatcataatgattgatagataaatattaggaataattttaatttaatagctattccctattgtaaagcccagcttgctgactcaaatctctatccaaaaaaaaaaaacaaaaaaactactgaaaccctgaaacctaagatgtgggcacagtaattggaagccattatttgaaacagtgacaagggataatttgctatgctacaataaaacatgtattgatttttcatttaaagaaattgaaataacatggcggaaacattctactttgaacaatatcacaaaacgatgagatattttattgcatttgtgtgtaagatactcttgtcagttttcacacaccattaggtttaatcactttgaggtatgttatgtaacttggatagattgatttgtaggatctgcacttgctaaggacatgtgaatactataagtacatatacattatatcatgtgtatatgtgtatgtatatatgtatattatgtatatgtatatatacgtaatgtagaatttctttagcatcccacaaccagttataaagtttgtctcaatttctttttaaagctacttgacatttactcttctcctcctccacaacatttatttcatgaaatagaatgccttagagagaaaatatgacttaatattaatatagatataaaacccaaaagaaacaaaatatgtgcatttgtactaaattgagaaatgcctttgctaataacccatattgctaatatatagtatattttagtgaaatttagcataatatttcttaaggaaaatatatttctggcttttttatcttaatgaaaaatataatcaatgccttttaataaatgtataaatatgaaatatttttaatgtttaagttttcattttctagaaaagtaggaaaattatatattgtctgaaacaatgcagagtatcagctgttggcatcatccattcatattatccatattaagtatctgactaagaacatgcatgtatatggagctatatttacaaatataaagacatgtattctccttacagaagaagatctcttttgatcatgaatccaaatacccatactcatatgtgcacattttgtgcacatgtattgtcacacatttcatttaataactcactagtatatatggaaattttaagtaaatttatccctggagatgataccaaacatctgatatactatacctagaaatcaaacacagtacacaaactgaaaagagaagcttcatcagttttaaaaaataagcaaaaatagggtaggcacagtggctcacccctgtaatcccaggactttgggaggccgaggcgggtggatcacctgaggtctggagttcaagaccagcctgacccacatggagaaaccctgtctctactaaaaatacaaaattagctgggtgtggtggcgcatgcctgtaatcccagctacttgggaggctgaggcaggagaatcacttgaacccaggaggcagaggttgcggtgagccaagattgagccattgaattccagcctgagcaacaggagaaaaactcagtcttaaaaaaaaaaaaaaaatacccttacctttcaataggtgtcagagaaaaagcatcagattacttctacatgaaatccaggaaatgtaaatattaaaacacaaaactgaaaaaaaagcaaaaatagtgattaatttgtagacattttaagaaaatatttgtttcaaagtatttcgtatgatttggaacaattacatatgtgtttcttgggtgctgtcaattgaatcttacagtcagcagcatcaattttactggcatatgtacttacatcttttgccaaattgtttatttgtgaaccataaaatggaagacaaaaatttaattttgtcatttcagtcttgttttatctttccacagtctactttttaatttactccattgtcattatcagcagcagtgtttttattgctatgtaggcattttatattttgaagtttctttttcaacagcctggattagtttcctagggctgctataacaaagtaccactaactgggtggcttaaaacaagagaaatttattttctcatggttctggagactagaagtacaaaatcaaggtttagcagagccatgctctccatgatggtttattcttcatttcatcccatctctgtccttttcagtccaagttggcaatgtttctgctagtataaaattctcaaaaactttgttcatcttctgtgttgacaggatgagcaatagacaagagagttctctatagatccttcctcagtaactccatctctaatcctaaccactgttgaaatggtggattggatccataagtcagttgcttaatctttttagcaaatggttgttgagccacatccttggctctgtttccaaagcatgctatctgattggcagttgagaattttccaaatcaagtgctgcttccattttccttaagagttcattcctcaattattctcttttcctctaattaattttctcaattttcattttcttaattatgtaattttctcaattacaaaagtaattgtggtttttgttaaagaaattgccaaaaactcaagtacttttgcacctagctaatataagcatcaagaagtaaccacaccacacacatcacacttagcttggagatctgagctaagaatccaagttcatcacttacaagttctaccttctacttagtagtagatcacaatttggcaaagttttctgccactttatagcaaggattgtcttactttcagtgtccaaaaacatttccatttgagaccatttgcatttatgactatatatacgtatgtcataaaaaaactttctctgtagctttgtttgtgatatatgaccgtgtgtgtgtgtgtgtgtgtgtgtgtgtgtgtgtgtgttcataataaaagctttatctgtagattttcctttgcttctttctgagcccccagcagaatcaactttaatgtcattatttccttcaatagtatattcaaaacaatgtaggctttttctaccaaacacctcaaagatcttttagcttctacccatggcagaattctaaagccacttctacatttttagatattttttacagcagcacctcacttcacagtagcaaaattagtaatggttttctagggctgctataacgaagtactgcaaactgtgtggctaaaaatgacagaaatttattatttcatagttctggtggctagaagtccaacatcaaggtataaggaggaccatgctctgtcttatagttctaggagaggacccttccttgactctggtaattgccagcaatcttagacacacacttcaatctctgtgtctatggtcccatgatgttctccctatgtgactgtctctgtgtctctgttttctcttcttacaaggacacaagtctttggattaaggccaactctattccagtatgacctcatcttaagtaattacatctgcagagaccctatttccaaataaggtcatattctgatgttctgggttgacatacattttagggtggggggcagtatccaatcaagtacacagcctatagctgttttttcttcaacttggatgagatcaatttttctgattaaaggagttgtgtactttatgtgactctgcttatattattttaaaaatatatgacatattttgaatgtatctaaaatacattagatattgactactgagtttggattattatcaagtaaatgtaaagtgctttctacgtagtaaaatggttaatggatattgaaaagccttattgttggtaccattaaaaatctaagagggtcatgttatatgccgaaaagacaaatgagtttggtaacaaagtaagaatatatgaaggtcctagactttgaacttttttaatatatatttggcaagaactagtgctttttcagaatgtcaagacaaacataataacaaggtaatttctagattattctttttctctaaacaaacattcagtatattctgtattctctttactctgttaaatattacaatagtcatcatttaaacatgtgcgtgaggcagacttattttcaggtgtttccatctgttgtgagggtatactttaaaaataggacagaaacacacacaaattaaacacaaagccaggggaaaaagaaaagaatgaaagaaatatccccagggcaacagtgagaaaaaaaccatttgagctgcctgttattaattgttcaacctgttttaccttggaatcctacataattattttccaggggaggggcaaacaacagatgttgaataaaggttgaatctcagaaaatgagactattttaaaaataaagttactctcactcaccaacaggcattttttgttggcaagactttcaggcagcaattgatttctcatattcactgtgcatttcaataacattaatgcagaacaaaatattctttttttgtttgttttagtctaagaagtagatcaaatatacatgtacataatatatctaagttagaggctcataaaaagcaaaacaaaaacaaaagcaagaatataccacagcattttcttaattttgtattacatacatgtttcatgttaggtaacaaaaaaatagaagatgttacagaaatatatatatgtataaaatatatatatatatttctcattgctaaagtcagtacattcttaaattaggtgactgagtaaagggctaaattacaaatagtgtcttgtttcaagttctagacagcatatattgtataactaatattaagatgcagtacacatttttattaaaaccttggtaactagggatattacagaatagtttgtgactttaatttttggggcctgcttgttcacatcttctatccactattgcagaaaattattttatttaaggttaatgaatgcatcatcatcatgagtgtatttcttccatggacctaggaatacatcttgttactttgcactgttttcatctcatctaaacttaaatacccccagaaaagtaattttcttccaataagactaagtcttatgtagctggggaaataccaatgaccatatcttttagatattgatcattctaaagaattttaatataaaagttaaaatcaatagagaaggattcataattcagttggccctttttcctacttggttttttctatttgttaactaaaaatattttatttttcaagcattcccgactttgctttcctttgctatcctcaccctacacaccatcacaagtagacttcagtctgttgatctgcttcctccaggtgagcaatttcttcatctgctagctttcttctctgtgatccaaattttacttgttagatgatagcactcataaaactatacatttgcaaggcagaacatgtggactttatttctttaaaggaaaatagcatagtaagtgagtaattttctttattgtttctgcattaatgctcttagtatttccggaaaagctgtatagtgttaacggttgaaacaagaatctagtcttacaccagatttttaatatttgttattcttaagtgagtttaagtgggccaaatcttaattatttcatattttgaaaattctaccacttatattaatttcacttaggaaatagtgtagaataaactgatggaatggaaagtgggctgtacaggaaagaaaaacttgattattttcttttggtgtaagttgttggtgtagatgcaatctgcttcactgttgccacctgaataactgtgtttcacctgagaaactgagtccccaaattcctctttccttttggactcaattacacatcatattagctaagtgttactttgtgaaaatacgttaaaggcttctttacacaatactttaaaaaacctttacatagcagccccatatagtttcctaaaggcaaggcagaaccaaaattatataaattataatggctaatgaagctaaatatttaaatccctggaactccataaattatgcaatacatttcaatctctaagtatgctttacatgtgattcagataatcttggaaaacacattaacatttgaaacaactggaaaaattaagtaaaaaaacaggaaaaagtattcctatctcaggtgaaattttagctcaacatattataccattctacgtctggatatcatccaagtctctgaatcatttgaatgcttttgagagatttgattggtttctgcatagtttaatcactacttaagaaaaacttgctactggagaaaatgattatatcaggttgttgctgtgcttgaaaaacatacatgtatattatagtaatctaagaatcgcaatttttcttgctttattcatgccagagaaagagacaaggttgctttatttcttgtatggaaatgaatggaaactggagtaaaaatagaacagctttaaacagacaaggttatagttgggaaagttatacctgtccttgatttgggggtaaaaaggtgagaagtttgaaacacaagtgtgtcagtgtgcatgtgcatgcacacacacacacacatatgtaaggtctatataaagtcttccttgttacccttgaatagctgtgatttcacattgattaaattttaattagttgggaaaagtgttatatttttttcattcagcaaaaattaaattcaagggtatcatttataccaataatcattttggattttagaatgtaaatttttatacattatttcatgtgttcctcaatatatttctgccttgatctcacatccatttcctgctcaaatgtatgtgaatgctcactggtgcatacatgcacaggcacatgtacacctgtgcagaaccatggccatttaccaacaagaaacacagagctagtgttgtgattgagcaccaggaaaactggaaactgttgttaggtaaattaagccttattttatgtccactaagtggttctcagagattgttgtctttaggcaaggccccttctattcatttccatctggtatatgaatgtaattttttaatcatgtgtatgaagaatgcatgcataactatatgtacatttgctttttagctgtattccttgggtgataattatgtgacaaatttgaagttatcattttaaatttacattttctcaaagtgtcaagataatcaggatagcaaagcttgctaatattttctattgaatatatactataaaactcttcaatttagaatacaattgttgaggctactgaatgtaattttgcatatatatttttgattattataaaattactataacataatcattttgtctctatgttataaaataatcagaataataatatttttacttttgtttcaattatctcccaaatagttcatatagatataatctttgtgttttataggtaataaatacatcaatgagttatgtatcttaggatgtatactttttaataaattattaatctaacaatacattatttatatttgggattttatgcaaaattatgtgcagatatatttatttttagtaataaaacaactatactcaataagaaaaaagcctagatagaaagtttctttttactaaatactgctaacctaataatttttccattttataataatagcaggtaggtttcctttgtgatcataaatacttttatcatttaaagaatgagctttaaaataaatatgttactggaaatttgtcaaatcaaatagtttaattgtagttcacttatgggtagaccttggattttaatactggataactttagctcaagtcaaaaactcatctggaccttaaaaatgtacacattcacggttagagtgaaacttacttaaattcaagcttttttctcctttcagcagagacgttgtgatcccaattatgtgtccaatagaagtgtccacattctctgattgacttatgaattatatttctaaaggaattttagggtccagttagaagattactgctattttcctaagcattataaagaaatgtgctgtgaaagcaaatgtaaaaatctgacttgcctgaatttaaatttatttttttaataatagagttgcctaaaaaatttattttggctagattatgaaggtcttagaacaccaaactgaataattcatcatacatccatttttgataatgaatatgaaaattgttaaatggctccttgaaaatacctttggtagcaacaaaaaaatcacttatttctaagattgaatgaaaagattattaataagaaaaactcaaatatagcatgtttgaattaagaaagactgtcttaattagttcttctgttatattaatatgaattcctttttagattggattcagattaaaagtctgaaaataaaataattgcttatatatttctatttattttcttgttaaaattaccctttaggaatgcacttcactcttactgtctgttctttgctctgggtatggctgattatcaatggaatcgcagaaaatactctccaagataagaaagtatttaaaacatcactgttagacacttttttatctccatactgcatgatgcatggtaacattttctttaaaaacacatttttatctttactgtgattcagaaatagccctctccagtagcttttttgcccctcagtttgattacatagcaggataatctaaagagccacatctcctctcttttaatatgtaaatttcctgacctcttctaccaatttctccaatgcttcagtgtgttttaatgattacaaaacattaaagctgttactagaaaaacggcttgtcattgccaataaaacctattacaagaaacatttctgtatatttactttagaacacggatattgagtgcattgatttcacttaaagttttattcttgggatgaaccaattgtagaggataaaacacatcagcttccaataaatttatagcacagttacaggtaataagaacagaatggttttagagaggtaattccaagaacagcctttatttgaaatggcagttatcattgctttcctaccctttataggtatttttgactatttaaaataatagtagccataagattcacagtttcagcagcttagtggtaggggtattgtttgagtaagatcaaggccgaattgtttaggtccaaatgcctgtattttattctaaagttatctttggaaactatcattttaattgtcctcttagaaagattccacttcataggagacatttgtatgtatttattcaagtacatatttattattatttttctgtgtgtgtgcatgcatgcacatgtacgcgtatgcatgaacacattgagggtatttagctttagtttttacatttttgttatataagtacctgttgcagaatcatttatggagtagtatagtttcatacatatttctcactcatttgaatctttaaaaaaaccttttgtattacttctttcttcaaaaatatagtatttttgaaaatacttgtctgagcaagacacggatctgttcgtgtacacatgcccacctaatttaagttaacaaaggaaactttagacctatcccaagtagaaatctgtgagtttaataaatagcttctggaaactagaatgtcattaaaaatattaaaatattaaaaacattctttaaaaatctatcttctgggactcccatatcctattggcagaggttgattgctaaataataagccagagaagatgaactgcatctgaattaactgttttctgagagtgctaaaactgacacctgattctgtttgcttgtttctagcaatggaaaataagagctgctagaaacaagatgaacaacaggatttaaactggtaaatagatatacatcccaatagcaatcagacagcaggcagagagaaaacactaataagactctcttgcttgcttcttacaatgagtttggtttaataggcatgttttcattgaccttccttacaggattaccactttgctaggaggatgacttgaatcttagatgtattcatccatgtcatcaaaaatggtgtcattatcagagatggggttggcttacagaggcaataaaagcataaggaaaacatcctctccaaagatgaaggatagtagaatacttaaacagtcttgggtctgaaattcacagtattatttaagttgctagaattttaaatttgtccttgtaagccaaacagcttttgctaactactgcatgccagagcataggtttctcactgcatataaatcaggttctttcggaaattgcattaactctttcaagactctaaaattacaaagttttattaattaattcatatgttgatgatagctgttggctaaagtgtaagatacagagacagctcacttaaaagagaaaagtgtctcattcgacacggcaatgcagtagaagaaaaaaacaaaagagaaacgtagcagagaagaaagaaacctataggtgctgaggtgtagttttcaggatactcactgttttccataatttaaaattataaagaggtgattatttaaatataggctttgatttcaataacagtgtcactggtttccaaaatttcctaaagggaaattattctgacctccaagttcgagtagaatatatgtcaggcaggatttatctcataatttaaaatggtattttcaataataaatagataactttatattttctatataaacattgtttttaacagacatctgatattactgtaaacaatgcatatctcacagcaatagacagctattatgtacaacttcatttggtcctgggatcattctgaaaactgacattatgatctcacaaatgaatggtactgaaatgagtaatttataaagtatgtagttgttcccattataggttacccgtagtgtttgataacttttaatttaatgatcctttccatcaattaaagcgtctgttcaaattcagaagtgtacattgagtgtgtcatatattcaaggaatggaatgctgaagaatatactgtagtatcttgatttcaagggactttagggtctccaggtaaacagataaaaaataataaggaatgcagagtaatgctgtaatatataattcaatgggaaaattgctacattatcttcatacaaaatataaatgcttatttaggaaaaaattggaagtttttaaaatttattgttctttatatggtgtatcaaaaaccttttcaatggtgtatcaaatatgaaaactgttctgagattcatccatcttactctttgttgttgtctttgctttgttgatatattttttacctctcttttgaatacctagcgaatctcttttgttccagactctccattttctgattttctaaaataatcctttaatatttcaaatactttaccatatgaaatgttatgtttggttaatgataacagaaaattagaggaagagggaagaaagataaagcagatgtaggaaaaagaaatatttttctaatgaagaatttaaaaatgcaagatttatgctggtaacataaaataccagtttaaatgcacattaagactttctttagaagaagcaggatgatatgaaagatgaaagctgagtctgggggctggaatgcctattccagtgaatcattcaggtcttgttgtgtctgttggagatactctggcttgagccaaaaactctagatatccctttttagaaaaaatgctgatttggattctatttaccctatagctcatcccaattctatagtttcattaatggtgtctgatgactttccaatcaaccaccgaaataattcaagaatctttgagacatatgatacactgcttaaatacttatactagtgcttcattgcctgctgcattaaatttggtcttttacttagaacttttccattcttttttcagatcctagcaaattttctctacattgttatgtcaagtgttgccattgcagcttaagtcctttgacctataaagctggtctcttactgccctgtgaagtgcacattcccatgtgaggtgtgtttcttttcttaatcctttacctggagcgccctctctctgctctccactctctgttgaaaccctgatcagcctttgaatcacagatcaagcaccacctcttgcataaagcctttcacaatattacaacctacgcttttctctgtatttctgctgcttgacgttcatatgacatagttcaaaatgtaactgatcatgaataatttcccatatgctggtttcactctactttttagtttccaatcaaagtttaaactcatcggtaaagagatatagtcttacaaatttcagaactttagaagtagatagacctaggtttatttaccacagacctgtatgcaacaaaacactcattctacagcattctacccaagatacccctccttgaaaactttcaattcctaggcaaggtgtggggaggtgtgtaatgcatttttaccttataaattattgtgtgtaacttctttaaagtaattgctgaactacacacatctaatgtgcccacaaaatgtgagctgtctttatgctggtgggacgtttgaattgtattgtttttccttgaaagtctctgtaagcatacttttctcaaagtgaatataaaccttgttctggtggtataatattgagcttcagccagttctcttcggggtacctgttaggaaaaagatggttccatttagctgtgcctttacttccaagcatctgccgctgccccaggtgatggctgtgcctacagaagggaattcagggaaggggcagattaaattttcagtgttgatctcagtggcatgccatgggacacaaatgatatttgtgccataaattcccaatgcatggtttacattctcattgttttgtagtcctagcacttccatatcaaatactgttttgcatttattccttatcataaatttcatttcaatttgtcttaagttctgttcaccttagagcgttatctatgtgtggtcaatatatacgccagaaaattccactccggtaaacattttactatgtccaaagggtcacagacacttaaaaccatccctgaaggtgtgcaggtgcattgaacagtaagtgcaaatgctccaaacagctccaaatacccagctgtgattggattcacttgcttatgatataggacagtgatttctggtgtctgaatgcagccgtggcaatacattcaaaagcattgtgcgatgcaggtgcatgctagaggattggtacttcaaagctgccgtggtttgactatttgatagtattataacaacttccttttcaaaatgtgctctctgctatcaaaagcagatagaatagcacttcacaaagtaaaatctggaagccagattagcagtgtatactcctcaaaatgtatacattttttctcatagtagttttattacttgagatatattttaaatttataattctttatggggctgattttttaaaaaataattttatttcctcaggtcctatgtctaatttttcctcattatatcactgccaacatgttaacagacaacctcatgaaataagcatattgtaacaagatatattttcctcattatattaaaaaataaaagcagcaagacattccatatctgtgtatctctatattagttacttgattaagaaacaacatgtatccctgtgcacaagtgagacacatgggaaatacaatgctatagaagaatagcttagctaagcaagggatggattctccgattaacattttttcttacacaaccctgttcttccctgcataaaggataaaataagcttattaaaaatggtgttaaaataaaacttggaagtaggaaaaaaattccaggaaatttgtaatattagaatacccatttaaaaatctgacacaggaaaaaataattttgagacaacttacttatccagaactgtctctagaaataatattgaaagcaaaatttttactccttttagtcagatagtgagaacagaatattcatttttaacaatatacaagtaaatgggacatagaagtcataagtggaaataataatgtttatgaatatagattgttaaggtaccatttatatggaatgactcactctattattataacaagtgtaaagtttttataggatcagaaaagaaagtaagtcaataataatcaacatagccaaaaaaagaaagaactgtgtatgttagaaaagtgtcagttcacaggatgttgtaaattatgtcaactcactgaaagaaaaatccattttattagaggtatgttggaccattttctgatgagatttctgttttagcattgatgttttctctatgttagaatatattgggataaattgcaatttgttgtggtcatagaaaaatgtgtgcacatgcatgtgtgtgtaattgtgtgtatgtgctgaagaaagaaaaaggccataaaatcaagctgctgttataccattaaagcctcttaacagaaaactattactgagcatgaactgccagccaaaggtcttggcttggcttggtttgcagacagataaagaatttgtgatgggtacttagcttagattctgtagaattaatctacagaacacttgtgcagaccgtaaatagagatgagtgcttgctctctgatttggaagacagctaattagatattatgaaagcttacattgttgaaagaaggtaaattagaaacaaaaaaagaataacgggaacaaataaaaactggacttccatttatagagttgtctacttggaaaaactctaatattaagatgttgttagaaatgataccaactaccacagtaataggagaacacaatttctatttacatctgtttacaaaacagaaataagaccatttggttgacaatcataaagcacagataactttttgaaatgtccttttcccctggccacaacaatttagactgtctttattgatgccatgatttatagattttggtttttaagtgtctatgacacagacatttatctcatcattatagaaaagaaaatcagaggcaaatactggatgcagataggaaactcctgtgctgcaaactatatgtacgttttcaggtgtacaaatatgtaagttcccaaagcaccaagtaagtctgaaactcaggggaggaaatccttttatgctctctaaaatttccctaagtggtcacaaattacttttgtagtgctctgaagacagggaaaataagtttaaaattctgacttgtgacaaatttctgcctgagagcaaaacagaatagaataaagaggtagattctctccaaagtaagacttttttggctggttgctaggcatatttcctgtgcttggacactacagaatcagaatccacaagtgtttttccctgagctttccacaataactatgttcaactgaggcacttagtctttgttaatctttgttgattttaataacattttggtttcaactttctatcttataaatgataattttgggcatcattgaaatggctatgcactcctgtgatatagtgacattatacaattaaaacacattgtaaaattaaattatataacatttgtgggagactattaaaacccaacaatttaaaagcagataatttgatgtttttatctaagtattttttcctcacatagatataatttagaataatttcacaatggcttgattcatctgaaggtatattttgtcacaaaatgattgcttgcctgatatccttaagattaagctattaaactgcttagtgtaggttaaaaaagagagagagagctttcagatattatcagccaatatgaatatgcagatttcgggtatctttatgtccaaatccattttaattacatgaaattctaaaatcagagacagttaaagtgttgatctaatcataggttttgcacccaggcttgtggcaaaggggaagattaaaatgttgcttattggtgcttttagtctgaaagatttatacatatgtgtacattaatatatgtaagctttgttaatatataaacaaatacataaaatattgttattttatttacaataataaaatattgtcattttatttacaataataaaatattgtcttgtttatgtacccctgatattatgaatatagaacttcctgtgattcacctgtatttctcttatggtaattgctagtagttaatgttcagaaatgcataggttatgaatttaagattttctattttattaacgaatttttagtctgtgtcttggaaaaagctaagttttatcacaaacataaaaataaaggtctgtatacaatatgaatatgtgtgcatgtgtctgtgtgtggtttatggtgcaggtaaactgcaagtactacagtcttttgagttacttcatctgttttgcaaaaatgtcatataaattaagaggcacaattgaactaattaaggttactgcatttagatacttccctttgaggcttgcataacagtcagatgcagcaacaggagtatagaaagtgattcttaatactaaacaagtgtttaaagttatttgattgtcacataatatttcagggaatcatgcttttaaaagattagacattgtaaactaatagtttataactgtaaacactgtagtttacagtgtctaatataggcagaactgcccacagtcccaccttgtgtactttagaattgttttctttctgcaatataaacatgcttatctgtgagtatctctcatctgcatactatttaaattttgctatgtttcttggcaagggatgcattctatgaaggggtgatcatgttatattgaggaaagtaggaaaacaaaagtaagtaatatcttggcaatcccagatagaacctgaagaaaaaagtgaatatttgttcaactattttttatttgatttcttctgttcagggtttctggacttgttttctggtgtatatattgaatatatgcaaacggtggctatctaaataatttgctttttttttcatttccatagcttataatttaacatatctattccagaatccattccccttaaagtacagagagcagtttgatcatctatcttagaactgtagggcttaagtaaatactcttcaatgttattttttattatacacacttaacttattgagggcacttaaaaatgtgcaatagaaggtacacgtgtcagaaatactgtgaatacacccctttttgtcttaaacaaaccctttctttgtggcagctttccctccttctccctccacactacactctctcttcatctacccccagcccttgcctcactctcattctcgtttccctccttcccttcactttgttttgcttctttccctttctactttcttccttttttccatttgtctatcttttttgcccaaccagtcattcattgtatattatctgtgtctcttctttctgtatttacctattcatccatttatgttttttcaaaaatgatttccctctctcacaaattctaacttgacccttgacagttagagttcattttgtgctcatagtttctactgtttgtacaaaagtgtccattcaattttcttcactgactgtgaactgctgccatcaaaattatagtctaatcacaaggtgaacagcttgtaatgtatcataatcaatactcaaaatttgctccccacgatgtgacataaaggagttaagtaaaatgctgcagattttcagcagtgacaagcaaacaatcattttatgttggtggtttcaaattcaaggtcgatttacactttcatacgtctgcattattctttctttttctgtgtcttaaattcatactgaattcattcagtgttagctatccaaatagctgcaatgaaaggccagtcaatatgaaacatgaaactacattagcatatttcaaagacagtgtatgagttataaatgaattttttaaaaaatttcatgatgctagaagatacaaaagtattactgagtgaaatagattgtaaagttttctacttttccttctttctgaaagataaaatttgttgaaagttatctatttgttgaaatgatttttttaacatttactgacagatataaataaaggtaatatttatgattcccatttagagtaggtaaaggaaacaaatgactgatacctgatattgaacctttctttttgcttttctatgtatttatttacttatttattttgagacagggtttaactctgtcactcaggctgcagtgaaatggcatgattacagcttactgcagccttgaactcctgggctcaagccatcttccttcctcagcctgccgcgtagctgcatgcaccacctcacctggctaatttaaattttttatttttgtagaggggtgtcttgctatgttgcccaggctagtctcaaactcctgggctcaagcaatcctcctgcctcagactcccaaagtgctgggattataggcataagccactatacctggccaatattgaacttctgatacccccttttaaaaaatttcagttctaatttaaatacataaatagaggcttctgaaaaaaaataatgcctagtttctgctgttcttcatgtctgtctaacagtctttcgatttgtagatagtatttgcgtctgtggatgcactgtgtgactgcttttcagcattctttcctgcataataaatttaacagtgaatatttaatttactcataagaaaacatttcttttaaaaaatgacaaaattaaaatagaagaaagatacctaattttttttgaggtttcacaggtgtgaataaataacatagtatctttgttttctcaagacaccattttgatttcttcctaaaaatttcagcctcttaagaaattgttttatcttaaaaccttttgagataaaacagattgtgggctttttaatgtaaataattatttacatgctttaagtataaatttaggtttcatatataactttgagaagtgatatacaaatttatcaatgctattacatttgctgctattttaaatatatgtttcatgtggacatccttttcttgcacaggacactctaaatgtgtagagatcatctagcaccaattaaatggcaaatcccaagggcgcctaaaagtgtagggacttctattcccattacataaaggtaaattgtaaatatcctctcctaaaagtaaaagtctctgatttagaaacagtcattaaccacaatgggcacaatcatttatataagaaagggacaactgggacgatgtagctcaaagttatggtttaaaatattggggtcaatggaagtatgcagctcttctataattaaggattttttttcatattccacattcagcatctgtgaaatagagatcattaaaagaatgctttatttagagtctctattggcaaaggaaaaaagtaaaaattcccacagaaagcattattatttaaaatgggaaatcatgatttgtcattcattctgacctgtatctgttgagtaaatgcattttcacctacttacacccaaaacaaaaagctgaacagaaaactgattacatgatccatacgcctatctaataaaatagagatgtgcactttttgacaagcttattcataatacgtcctgataaaaaattccatttgccactctcagtaggaaaagtaagcatttaaaggaaaccttttatttcatgactgtcatccaaataacaattacaagcaaaatagtgataaaacgttttttaaagagcagcttagaacttgttatggaagtttgcaatccagtttttgccttgttatttgatttgaaaaaaataatcctgataatcttttttgaagttcactgtttctaggatgagttatacagaacaaagactaactgatattcccaggagtttagtttatggtgatgctctattctactgagaatgattctccaatggccacatcttacttcttcccaggctgtgggaattcattaatctctagagaatagacttaaattaaaccattgtctcaaccagcaggtttatgcaaccatcctgaaatgttttaattattgttttcttttcctttttaattaagagaccagaggtcaagcaagcccattgagagctgatcacagcctctgtagaaatttaaagaaaactctaatgattggatttgctgttttctcttttgttttgcagaaccagaagagtgtgttaattgcacagatgaatgccgagtgcttggtcattctgacaggtgctggatgccacagttccctgcagccaatcaggctgaaaatgcagattaccgcacaaatctctttgtacctacagttgaagctaatgttgagactgagacttacgaaactgtgaatcccactgggaaaaagactttttgtacatttggaaaagacaagcgagagcacactattctcattgccaacgttaaaccttatttaaaagccaaacgtgccctgagccctctcctccaagaggtcccctcagcatcaagcagcccaaccaaggcgtgcatcgagccttgcacctcaacaaaaggctccctggatggctgtgaagcaaaaccaggagccctggctgaagcaagcagtcagtacttgcccactgacagtcaatatctgtcacctagtaagcaaccaagagaccctcccttcatggcttccgatcagatggcaagggtctttgcagatgtgcattccagagccagccgggattccagtgagatgggtgctgttcttgagcagcttgaccaccccaacagggatctgggcagagagtctgtggatgcagaggaagttgtgagagaaattgataagcttttgcaagactgccggggaaacgaccctgtggctgtgagaaagtgaaaaaagaaaaaaaaaaaggcattggcattttcttgtctcttctgttgatttaaaaatgatccctcctggtgataacccattttacagggatgaagaaagaccaatgctgctttaaggcttttagtgaacatctgaagtgcccacaagtatgttctttccactgctgatttctttttcagagataacaatggtttcgttttgaccaaacttgtattaggacagaattaatgatgcttaaagagaaaagaaaaaaagagagaagaaaaaggagagatgaaaaaggaggatgaggagaagaattaccttttgacaatctgttaggaaggtatgcagtgtgagaactgaagtatttctgatcactctcagactgtcctccgtgatttatgctgacttaactgtttacctataaaccccatacaaagcagggtcataatttgtgatctgtggtggatttctagcagtcatcacaggcttctactgaaagtcctgaaaagaccttgcagtagtccaagctacaccaaacattaacacatatttgtggtaaacatttctgtataaagttacctgacacacatataaacacaaggaacattccatatcattagtcgaaaacaaaaacaaaaaaaaaacctttggtcatttgtaagacatctcatgtcatataaaagttaaatgtaaaaagatacagtccattttgtcctgcacacacgtagactaattcacgtcattaaagaagaagaaaacttaaagatttaaaatgcctatttagcattttagtgtccaacaaagatttaaacaatgatgaatatgttttaaatttgacatagaaaagttctaaaaaatagttaccattgagtggtaagattcagagaaaattaacttgattaatatgttttattcatttgtggacactaaaatagctcaggaaagtgaaaatgtcttagacatacgcaagtcacatgaccatttaaatgtgcaaatgtaagaagattcaatgtgtttacatcaaatgacatattttattgatttattgcagattcagtgcatatgagccaaattgttgagtgtgtaagagctatattgtgtattttattaaattaatatatagttgtgttgcaaaaatatttgggcttatattgtaaatggcaagtgttgccttggtagctgtcgaactctatgagttttgttttttcctgcttccttttccccatggagtgtgggaagcagtgcctcagagcaaagtctcttgtttaatgtatagtctaccaagtactacagtacataatctgttcaaaatgtgtttgagtgagctgatggagctaactgaaaggtcaaaaattacatccatcagtcatggttatgtgcaagtccttgtagaagcttttattaaagtcatgctaaatcacaagaattgacatttgtaccaatatctgaaacttcttcatgttttttcaataacatacagcttctgcctgtgtagatattatgccatcagttggttctcaaaagtattttaagtgcttcagatgtgtgttcccattatattttgaaaacatgaaaaatgctttaatgcatgtatgtaccagcagtggttacttgcattgtgtagtgtttttcaagaggtctgggtcttaacaaaatgttttcctttatctcagtgctcttctgcctctttttgttggtgtcctttgagaacaatacaccttctattccttcatttggttacacctttccttgtgacatttagcgagtttcaaacttacttccatatgaggctaagaaacctcaaatttcaggaattgggaaaaataaaattagcacttgcagaagtagcagcagatgggaaaatgccttgattgacattttctttcagcatttaaaatttttggcattttacagcttcatgacaaacagttttgtgcccataccttagaaaatgtggtgctgagttaaataaaggctgtttgagcactggagcagaaaaatgcattatttgcaaactggtggataattttgtgccttctcttctggccaccaagccagtgtagaaacagcaaaaatgtcataaaaattcttatatttaaaacaaaaacaaaagcaaaaacaaacattgaattaaattaagttttgtaattttaaactttaaaaacttctactgaaaatatttccgccaaatgccatcaatattttagactgtacctcgtttgcaaaactgctttgagagggaagagtggacaactcccatcagccttattctcttgagaactatattttggttcctagtaacagcctttccaaagctctactcttggtttttattactcataaatgtttaaattagaaaagaagggaccttgtacatgtgaaacctaattgactctctatattttggacaatttatgtatctgaaatgtgttgtctctgttatatgatgttatttttgccaggagactacaggttgatttagcttgatagctgaaatttgatggaaaactgatttccatttagtcttaccaagtgttgcttctctcttactagacagatatccacttagtaaaatctaaagcagtatgtaaatgaaaccagcaaagagagtagggtttattttataaacattcttaatgctaagtaaccagttgttcaatttattatatgtgtctgaggacattaaaacaccataaggttgtaataattggttgtgccaatgtgtgagggatttacctttaggctctctgtcaccagtgatttactagtgttagctgtttaacacattatctgtatttagtagtgattatttatttacaagttggtggtaattcagcagtcaggactctaagcttttatagttgaattgaggaaatctcgcttttattcatttagctggcaactgcctttattgcagacctctggtgcttggctttcaaggaagcctatgagatgccaaaatcacacctttagagagcaccttgctctaataggtgatgcatgagcaaacagtgagatttgaaggggttttaacataatttagaatgtgaaaaaaatatcaattcatatctttcaagtactaacccctcaaaaaagcccacacatacaaaatatgtgatgtgataccactttgtcttttaggtctttaagtaactgaagttaagcacagaaaaaaaaatcacttcatggaaatttcagtaagaaacccaaacttctaaaaattgcttgcagatgagctaaaaaaaaaaaaaaaaaaaaaaagcaacaaaataaccttttcatcagagttaaaagtagtgagaatctgttagttatacgtataccaaagtaaacattaaagagacatatcatgcaatttcaaagaattctttcatgctatttcttaacctgacatttctaactttattgcaggcaatatacaaagattggctcactactccataggttaattgaattcctggttgagaaactaacttgttttgttttccaaaattagctgaaatcttgtaaaacatgacttccctttaaaggatctagatattgttcaatttaaaatatggcaccataaaaaagtcatgtagtaatagagcatatgcttttttagaaccaggttaaaagctgtttgttatctaatagagtaaaagttactgaggtcaacagatagacaggtctggcataatatatgcccagtcataatagtctaattatattcttttgacaacagacagcattcatcagagcactaattcgaatgagagttttggctatcaagatgtgttgattctaaatattattgaatgagacctgattaaagtctgactttcctggccccagtgttttgcaggttggctatttccattatcagcccatcactccataaagttcttagctgcaccaagtgattggtgaacaaggacaacaacaaaagcagcatacattgtatggatttatctcaacgctattgtttaatggctgtgtttaatgtgatctatctggaaaatgaggactccgaataaaaagctattactaata

SEQ ID NO: 400 - DNA, 3972 bp, Homo sapiens
  source 1..3972: mol_type = genomic DNA; note = NC_000003.12:39329709-39333680 CCR8 [organism=Homo sapiens] [GeneID=1237] [chromosome=3]
gtagtgggaggatacctccagagaggctgctgctcattgagctgcactcacatgaggatacagactttgtgaagaaggaattggcaacactgaaacctccagaacaaaggctgtcactaaggtatgtgctacaagcatccttggggaagaagggcatgagtaggcaggggcatttttatatctttagaggataggcaaagggaagaccaaaatttcagaggtctagcacaagaagtaaaatttttttttaaatctttgcatttcctcagagcccacaaacatgcatgtgtcttagtggctgcccatgctctggctgaggagagcaaaccgtgccatattctctgcaggcctttaggagagagtgaaaactcctacaagagtgggaaggtagataagagaagatcctttataataccaggcatctgggaagatctgtccttgtgctgggtacagggcttctatcaggtaactgaaggacacctgggtgctgttcttaaggaaagaagccagcgagcaaactttcatatgactaaagaagttgctggtgggtgcctgtagtcccagctactcaagagcctggggcagaaggattgcttgcgcccagaagtcagggctttgtgtgagatcacacctgcgtataactactgtactccagcttgggcaacatagtgagaccctgtctctaaaaaaataaataaattgcttgcttgcttgcttgtgctttcaaatcatagaaaagtagcagagtggagaggggtgtctgaatgtaaagcaaacaaatgccttggaaaaatatgtctggattgaaattgcattgaatgtatatatcaatttgagaagaattgtcaagttttataatttttatgtaactgaattgcatttttattagttttattcctagtaatgctagtaattttcattgctagtataattgggatcatttttctattgcatttataaagttattttttttctggtgcttaggaaagcaattaaaagaataaactgatgaatatcatgcagatatatctctaaaacaataagcaaaatacaaagggaaaaacaatatatcatttatgtaagttaaaacaatatatcatttatgtaagttaaaacacacaaaaatatatattgtttatggatatatataaatatgtaaaagtacagggggaaattgtttggaatgatacataccaaattggttttagttgttgtttctgttatggggataagttgtgtagttaaagggaacattagcttcatctctattgcatcagaaataaaaaaagaaagagggatggaaggaagagagggaatgagggagggagaaaagaagggagaaaaaaagaaggaaggaaggaaaaaaaaataacccaaagcattgtgagaatatgttagcagctgctaattctaggtgatggaactatgggtatttacattttctttgtaagttttggcttttctcatctcagctgactccctttggtttacataacaaaatacaatagactgagtggcttaaacaacagaaagtgttgtttaacatacttctaaaggctggaagtccaagaccaagctgccaatgcagttgatttctggtgaggcttctctacctggcttgctgatttcagccttcttgctgtgtcctcacatggtctttactccatgcacaaggggagcaaaatttcttgtgtctctttctcttctgttaaggacactagttctatcagattagggccctgccttttttggttttgtttctgttttcttttttttgagacagagtctcactctgtcacccaggctggagtacagtggcttgatctcgagtcattgcaacccctgcttcctgggttcaagaaattgtcgtgcctcagcctcccgaggtagcttggattacaggcatgtggcaccatgcctggctaatttttgtaattttagtagagacggggttttgcactgttggccaggcttgtctcgaactcctggcctcaagcaatccgcctaccttggcctcccaaagtgctgggattacaggtgtgagtcactgtgagagccagggccctgcctttataacctcatttaaccttttttttttttttttaattttaatttttttttttttttttgagacagaatctcactctgtcgcccaggatggagtgcagtggtgtgatctcggctcacagcaacctccacctcttcggttcaagtgattcttctgcctcagcctcctgagtagctaggattacaggcatgcacccgccatgcccggctaatttttgtatttttagtagagacggggtttcgccatgttggcaaggctggtcttgaacccctgacctcaggtgatctgcccaccttggcctcccaaagtgctaggattacaggcatgagccacagctcccggtctatcatttaaccttaattacatctttaaaggcccaaatagtctcacccactccaaatagtcacacccacaccggaggttgagcacttcaacacatgaatttggggaggacacagttcagtccataacatccccctaatttttaaaaaataaaaatgtttttaaggagtgaatgtcttttatgtgtctctgtgaccaggtcccgctgccttgatggattatacacttgacctcagtgtgacaacagtgaccgactactactaccctgatatcttctcaagcccctgtgatgcggaacttattcagacaaatggcaagttgctccttgctgtcttttattgcctcctgtttgtattcagtcttctgggaaacagcctggtcatcctggtccttgtggtctgcaagaagctgaggagcatcacagatgtatacctcttgaacctggccctgtctgacctgctttttgtcttctccttcccctttcagacctactatctgctggaccagtgggtgtttgggactgtaatgtgcaaagtggtgtctggcttttattacattggcttctacagcagcatgtttttcatcaccctcatgagtgtggacaggtacctggctgttgtccatgccgtgtatgccctaaaggtgaggacgatcaggatgggcacaacgctgtgcctggcagtatggctaaccgccattatggctaccatcccattgctagtgttttaccaagtggcctctgaagatggtgttctacagtgttattcattttacaatcaacagactttgaagtggaagatcttcaccaacttcaaaatgaacattttaggcttgttgatcccattcaccatctttatgttctgctacattaaaatcctgcaccagctgaagaggtgtcaaaaccacaacaagaccaaggccatcaggttggtgctcattgtggtcattgcatctttacttttctgggtcccattcaacgtggttcttttcctcacttccttgcacagtatgcacatcttggatggatgtagcataagccaacagctgacttatgccacccatgtcacagaaatcatttcctttactcactgctgtgtgaaccctgttatctatgcttttgttggggagaagttcaagaaacacctctcagaaatatttcagaaaagttgcagccaaatcttcaactacctaggaagacaaatgcctagggagagctgtgaaaagtcatcatcctgccagcagcactcctcccgttcctccagcgtagactacattttgtgaggatcaatgaagactaaatataaaaaacattttcttgaatggcatgctagtagcagtgagcaaaggtgtgggtgtgaaaggtttccaaaaaaagttcagcatgaaggatgccatatatgttgttgccaacacttggaacacaatgactaaagacatagttgtgcatgcctggcacaacatcaagcctgtgattgtgtttattgatgatgttgaacaagtggtaactttaaaggattctgtatgccaagtgaaaaaaaaagatgtctgacctccttacatat

SEQ ID NO: 401 - DNA, 53994 bp, Homo sapiens
  source 1..53994: mol_type = genomic DNA; note = NC_000001.11:c20718007-20664014 KIF17 [organism=Homo sapiens] [GeneID=57576] [chromosome=1]
gggctcgggttctgcggcggcgcctgcagcgcggatcccccacgtccccgctcgggccgggcctcagaaacgggcgagcccgggcgcgggaggaagcggcggccccggctcgggtcctgcgacgcccagctcccctccggggcgccccccgaggggtccccgccccccgccgcggccccgcccctgcctcaaggccccgccccccgtggccggcgctggccccgccccttggcccgggctgctgggagtccccggcggggcgggggtcagctctggtcccgttggtcctgggcgcggcgccatggcctccgaggcggtgaaggttgtcgtgcgctgccgtcccatgaaccagcgggagcgagagctgcgctgccagcccgtggtgactgtggactgcgcgcgcgcccagtgctgcatccagaacccgggcgccgccgacgagccgcccaagcagttcaccttcgacggcgcctaccacgtggaccacgtcaccgagcagatctacaacgagatcgcctatccgctggtggaggtgagggcgcccggcaggccgccctgcaggcggcagggcatgaggccgccccgagagtccccagggggctgcgctgccccccagccaggaggaaaggccctcgaggggcgcaggcggacgggaacaggtaggtccggaggcttttgtccaggcgggacacaaccagagcctgcctctaatgtcgcctccgggtctgcactatccccagcgtctccgcctcccgggttcaagcgattctcctgcctcagcctcccaagtagctgggattacaggtgcctgccaccacgcccgtctaatttttgtgtttttagtacagatggggtttcaccatgttggccaggctggtctcgaactcctgacctcaagtgatccgcccgccaagtgctgggatcacaggcatgaggcaccgcgtccggccgaatggtgactttttatcttccctcactggcaagatggggcacacctagccctgttttggttacagcatgggtctttgcagtggaaccgggcatagatgccatgtgggcccttggggtctcagaacaattctctgggccaatctacccatacaggatccaccccaagcccacactaaggtctagaatttgcaagctcatgagctctgcaagggcaggaactgtgtctgcctcgttcaccactttgtccgtaggctgagcatagtccctgtcgaatgaatagaaacagcgatgaatgaagaatgactttgggaatgactttgggaacagcaccgggtttgcctcctctcttccttccaggcctcatcttccacccctcccctagtccctcctgctctccacacctcatctgtgtggctttactcaagctgacccctcagcctggaatgccttcctcttcctgtcacctggcaaagtacgagccccactcccagctcccccagttctccctgtctttgccgcctggaaagctgtgcttcgttcttcctgtgccatcctgttttcgcttctttgtactccctgtccctgccggctggctgcctggactcttgtcgctgtgtgccccgccccatagcccgccacgagaatcacctgtacgtgtccagctccctgcattgcaggcagacattgggccatcacctgtgtatggcagtgcttcctgtgcccatgcacgaaagaagccctgtatgcaccctgtgagagccccgcaggtgctgctcttaccctttaagatattgattttttttttttttttttttgagacggagtctcgcgctgtcgcccaggctggggtgcagtggcacgacctcggctcactgcaatctcctgggttcaataaattctcctgcctcagcctcccgagtagctgggactgcaggagctcaccaccacacccggctaatttttcgtatttttagtagagacagggtttcaccgtgttgccaaggctggttttgaactcctgacctcaggtaatctgcccacctcagccttccaaagtgctgggattacaggcatgagccaccccgcctggcccaaggtgtttttcttatcatcttatcaatttgcctcagtaaggccagcccaagggcacacggtcagtaaagtggagatggatgtgagcccagggggccaagcccacagctcaggctcttccccatccacacacagggacagctcctaccccaccagagagtcaactccttgaggacagagctgcgccttgtttatctccacagtccagtgccattgttggtggggggaccaggaagggccctgagtctgtgggttagggagccctgtcccgagccctgctgtgcctgctccactgagcacggggtcctgccttcctcccatgcagggcgtcactgagggctacaatggcaccatctttgcctacggccagacaggcagcgggaagtccttcaccatgcagggcctgccggatccgccctcccagagaggcatcatccccagggccttcgagcacgtgttcgagagcgtccaggtacgggcctcgcagagggaaggggcagggccagagctgcagctgggcccagagcacttctgacaggtggcagagacacgggaagtctttggagcccggcctgacccgtgcagatcagcagagaaggctctgggttctgaaaaggtggtgggaaaaaaacttagaacagagaaaattctgtccatgcttttctctcaccatttttgccttctaacccttagttgagcatttcccatggatctgctgaccctgtgcactgggccaggaagtggttgtaacaatcacagcttccctctttattgagcaattgttatggaccaagtcatatgtgaagcccttggcatccttatctcactgaatctccagcctgacccaggaggtagctgataaccccatttttgagatagggaggttgagactgagcctttattggccaagttgagactggactctgaattcatcccggcatccaggctgcaggtgagaattacctggcgaccatttgtggcagtgcacggggaatggcggatggggacaaccctgatcagctgcagaacccactgtgccactctcaggactcatcatggtggccacagcaacatgtagggccttggagagctgccagggaccagcccagagccagtgcttggcccaggccttccctgtggcctcaggtgtttttttttttttttttttgagacggagtcttgctctgtcacccaggctggagtacaatggcatgaccttggctcactgcaacctctgcctcccagattcaagcaattctcctgcctcagcttcccgagtagctgggattacaggcgcccatcaccacacctggctaatttttgtacttttagtagagatggagtttcgccatgttggccaggttggtcttgaactcctggtctcaggtgattcattggcctcggcctcccaaagtgttgggattacaggtgtcagccaccgcactttttctttgtttgtttttgtttttgtttttgagacggagtcttgctctttcgcccaggctggagtgcaatggcgcgatcttggctcactgcaacctctgcctcccgggttcgagcaattctcatgcctcagcctcctgagtagctgggattacaggtgtccaccaccatgcgcagctaattttttttttttttgagacggagtctcgctctgttgtccaggctggagtgcagtggcgtgatctcagctcactgcaagctccgcctcctgggttcacgccattctcctgcctcagcctcctgagtagctgggactacaggcacccaccaccatgcctggctaattttttgtatttttagtagcgacagggtttcaccgtgttagccaggatgatctcgatctcctgaccttgtgatgtgcctgccttggcctcccaaagtgctgggattgcaggcgtgagccaccgcgcttggcctagctaatttttgtatttttagtagagacgggggtttcaccttgttggtcaggctggtctcgaactcctgacctcaggtgatccaaccacctaggcctccgaaagtgctgggattacaggcatgagcagcgccccgccctgttttttttgttttgttttgtttgttttttgtttgtttttgtttttgtttttaacctgaataacgaggaggcctctgtttcctttcccatgaggcttgtagacagagcattagacagcaatatgaagattatgcaactcaaagaggcctgagcgcccaccaagctggagacaggagagagcttgccaggaaggccagcagggcgggttgggttggagactcctcttgccccgatgtcccttctcctcccatgatgtcctggtggcagagggcccaggccccagggtcagacctggcagcaggtggacttcgagctctgaggtctaggttctttctgtgtactccctgcagtgtgcagagaacactaagttcctggtccgggcctcctacctggagatctacaatgaagatgtccgggacctccttggggctgacaccaagcagaagctggaggtgggtgcagacccattgtgggcaggtggggctggtaggggggaggttggcattggtgctgctccctcagaaatatgggaaagtgtcctgagggtgccggcactgggaggctagagtcgggacttttttttttttttttaattaaaaaaaacttttttaggcaggtgcagtggctcttgcccgtaatcctaacactttgggaggccaaggtgggcagatcacttgaggtcaggagttcgaaaccagcctggccaacatggtgaaaacccatctctactaaaaatacaaaaactagctgggcgtggtggtgcatgcctacagtcccagctactggggaggctaaggcaggagaatcacttgaacccaggaggtagaggttgcagtgagctgagattgtgccactgcactccagcctgggcaacacagtgagactccgtctcaaaatatatatatctatattatatatagtatctatatatagataatatatatataatatagataatatagataatattatagataatatagatatattatatatataatatagataatattatctatattatatatagataatatctataatatagataatattatctatatctataatatagataatatctatattatatatatagatattatctatttatatatagatattatctatattatatatagatataatataattttatatatataatatatatagatataatataattttatatatagataatattatctatattatatatagataatattatctatattatatatagataatattatctatattatatatatagatattatctatattatatatatatagatatatatagatatatatatagataatattatctatatatataatatagataatatctataatatagatatatatatgacaaggtctcgctgcgttgcccaagctggcttcgaactcctggccttgagccttccacctcagcgcccccggtagctgggactacaggcatgcaccaccacatgcacccagccacttggtgttttttatgcaggagcctccagcctcccacctagagtttttctactgcgttccctctcctagtgcagctgaatcatagctcagcccccagacagggaagcagagacaggaggcaacagagggtgttgctcccacatgtcagccccagaaggccagcctgtggagttagggcactctggccccctgcaaaccttctgctaacccgcactggagcagcagggagccctcctccccttcgtcactaccctggaccctagaaaggcctcagttacccgggcctagaggggccgaaggctggcagctgctcacacttgctgcagctgagccatgggtctcaggcctattgaaccagctgccttgggggctgcagtgacagatgcgcttgctgaaacacactccagaggtcaccgggctttagacacgctccctcgtggaggatgtgcagatggctctcatgtaaacctcctggcagtccaggaggaggcaccgttcctattccttgtaacaacagatgaggaaactgaggctccatgtgcctaagtaagaccaacccaaggacacacagtcagtaaagagtggcgatgggatttgaacccgggggctccacagcacacactcttaacccgtgcttaacacaggcccgatcgtggttgtaatcagaggttattacatcacctaaggccagcaagaggtttggggaagcagagttctatcccctccccctagccactgtaaactaccatcacagaacccagccctgaactgcctgatctggtgaggcctgagggggcctctccagcgggttcttcccacccatgtccaggcaaagtgtcaagggctcccctccccgtggcagcgatggacacattcctgccatgctcccctctctcatccttgccgcatcccagctggttgccatggtgacccggctctggcctctccgcagcagagatgagcagttaccaaggaacctggtgcgcggctgagggctgtcactcagcgcctccccaggcgtcgggggtggagtggggttgggagcgcggtggagggggacccctgaggccatcacaagtgtgggagcagagagccttcctaggctggaaaatatcgtggcgggagacccctcgggtgaggtgttgtctcctggggttgctcaggcccgagatggcgacctcatcctctttgtaactgagcccccactgagtacccgcagaaccgttttttagatctgttctcttcctaatcctcataataatcttgtagaaataggagttatcatccccattttatggaagagaaaattgaggcttagagaggcatattaacctccccaaccagcaagtcacagaacaaggtgccctcaggccacacgcggctccgtcctctgggctccctcctcacagctgccgcctgggccgagacctgccctctgtcatctcaagcttcagctcctgcaggatgctctggcctctctctgtgccctgaaccctggagccttccatcggctgtgaccccactaacagctatgaccccactaacaaacagctgtgaccttcaccttctcctttctgggtgtcagttactcctctattccatgaagcccagtcccttggtggggcttggctgtttctccacgcttcagcagataggaccagctgtgcctcgccccgacccccacccacgcctctcccacagcaggggcctgagcccacctgggacccccctagagctgctgggagcaaagcagctgagcctcctgtggctctgacccacaggaccacttggcagacaaatgccttttgtcctcattcattctgctctggtgccagagtggttttatttcctctcacacttgaaaaataccgtgtttcacagctccgtgtccgcagcaaaatgactttgctgcctggaaagccagcagggagccatcagataaattaatttactgctgccatcgccctgagggctgggggcctctgggctgtgagcctgcggggttctggggagcaagtgggctcacctgtgatctgagggtttggggatattcctgttgttctagagccacggcagaggggatctggagccttagcaacgggcaaagggagacagcactcagggctcatgggtgacgacaggctcagcccctgggatctgaagctccctaaaggaaacccacctttgtaatcatagcactaacaacaacagcacagacagtggctggcatctatggggcacttaggtgctggcaccatgctaagcattgtgtgtgccttattttacggattcctccccatatcctatgagatagctgtctcatgcccattttacagatgtggaaactgagtcttaggttgtcattggctgaaggtcccatagcaagtaggaggcaggggtaggtctgaggctggctgggcctggaacacacccctccctgtgacaggcatgtgaggtgccagcctgcattacaggagggcgagggcggtctggatggggcccttctctctggttccttgaccatccctggtcctaacccttggcggctggaggttccgcccctgactgttcctcctccctcagctgaaggagcacccagagaagggcgtgtacgtgaaggggctgtccatgcacacggtgcacagcgtggcccagtgtgagcacatcatggagactggctggaagaaccgttcggtcggctacacgctgatgaacaaggattcctcacgctcgcactccatcttcaccatcagcatcgagatgtctgccgtgggtatgcgaggccattgttgggggcagggggacagatgacccagccactcccactagccaaggcacgccacctctcggggccgcaggagcccctggaaagtgggaagagatgctctaacagcctggaggaaacccaagaggacccttgggatgctgggacccgtgttcccaggataaacagcagcaaacacagtaacactgggagccaacattgagcgctcactgtgtgccagacaatttttatttatttatttgttttttgagacaaagtgtcaccctgtcacccaggctggagtgcagtggtgatctcggctcactgcaacctctgcctcccaggctcgggcgagcctcccacctcagcctcctgagcagctgggactacatgcacaccaccatgcctggctaattttttgtagagacggggtcttgctgtgttgcccaggttggtcttgaactcctgagctcaagcaatactcccgccttggcctcccaaagtgttaggattacaggcttgagccactgcgcccggccagtgtgccaggcaatgtgtgtgcattatctcacttactcctacagcactcccatgaggtggatactgaatcatccccattttacagaggaagaaattgaggccacacaactaggaactagtgtcagagcctggcttctatcccagggtcttcctctggagtgtgtgtcactccaaccttgtggattctcctctccctctgtaacgttctctactcctcagtcatctcattattatttttttctggaaatgctgccgagaaagcaaagaggaaggaaagaaatccatgtttatttgggggccccattggccatctgcagtgccaaaccctttatacccttcattccatttaaatctcacgacagtcttagagacaggcactagaatcctcattttatagacgaggaaacagaggctctgagaggtaaagtgatttgcttgttcaaggtctcaccgccgctaattggtggagctgggatttgaacccgggtctccgtgatgtctgggttttcccatgaatgctgcagctgcctccaagctgtggtccatcatgactagaactccaaagagcagtggagcaggaggtggcctcagcccaactgggaacataattctggagagatccctgacccagggatcagggtcaggaattagctgggtgtgatggtacatgcctgtagtcccagctacttgggaggctgaggtgagaggattggttgagcccgggagaccgagggtgcagtgatctgagatcgcaccactgcactacccagggtcaaggcctgagtagatggaacctcctggacgcattgcccagctggtgtggtgacctggccttgggccaagccccagtgcttgcttaggtatgaggccatgagtctgagtgtcccggggatgctgatatagggagggttgagaccagagtggtcacagcctcaatactgcagctcagggaggggcagagaccagggcaactgaggacagatcaggagggaggaggagggagcgggtttagggggcacctcttggtctttgcaggaggatttgaaggatgaggcaggctggttgcacattcaccttataaaataatgtgagctcagtgatgatggtaaagtagggaatggtagggaacagttactcatagttctgacacctaaataccactaacatttaagcattatattaatatctaataattatttatatttataattctttatatgtttatttatatataaatgtatatattatatatatacatatatattttttatacacacacacacacacacacacacacacacacacacacacacacacacatacacattggtttgtttttttttttgagacagctctgttgcccaggctggagtgcagtggtgcaatctcagatcactgcaaccttggtctcccaggctcaaccaatcctcccacctcagcctcccaagtagcttggaactacaggcatgcaccaccacacccagctaatttttatgttttgtagcgacaggatctcgccatgttgcccaggctggtctcgaactcctggattcaagcaatccacctcagcctcccaaactgctgggattacagacatgagccactgcgcccagcccatattttcttttgatccttttttcctgtgaatgttttaaacataactgaaatcttacgccatgtaggtttcccctggttccatctcccttgctgtcactaagcatttctgcactttactgtcaccgtgtcttcatgaccatgtgtggtggcctggctcatgccattttccaaccggtccttgacaattggtttccagtttcccagtgctgcaagtcatgccacgatggacatctgtgtgcacaaagctttttctcatctgagagtcatttcctcagactcggttccctgcaatggagtcctggagcaaagataacaaacgtggttaaggcttctggtccgttctgcaaagagcttcccaaagaggcagcaccaagttccttcctgtccttttttgagaggcagagtctcactctgccacctaggctggagtgcagtggtgcaatcatagctcattgtagccttgaacttctgggctcaagcatccctcccacctcagcctcctgagtagctgggacaacaggcacacgacactacacacccagctgtttttggtggtgtttttgtttgtttgttttcttttacttttctttctttttttttttgagacaggattttattttgctgcccaggctagaatgcggtggcatgatcacagctcactgcaaccttaacctcctaggctcaggtgatcatcccacctcagcctctgaagtagctgagaccacaggcatgcaccaccacaccctgctaatttttatacttttttttgtagagacggggttttgccatgttttccaggctggtctcgaactcctggggtcaagcaatcctcccatctcccaaagtgctgggattacaggtgtgagctactgcccctggcctgttgttgttgttgttgttgagacagaatcttgctctgtcgcccaggctgaagtgcagtgttgcaatctcggctcactgcaacctttgtctcccaggttcaagcaattcttgtgcctcagcctcctgagtagctgggattacaggcatgtgccaccacgcccggctaatttttgtatttttagtagatacaaggtttcaccatgttggccaggctggtcttgaactcctgacctcaggtgatccgcctgccttggcctcccaaagtgctgggattacaggcatgagccaccgcacccagcctgttgttttttaatagcctaaagaaccagctggctacgaatgcgctgtctgtttaccttacttctccagaccaccaacctgtcaactaaagaaaaatcaacaagtctgggcacagtggctcatgcctgtaatcccagcacgttgggaggccaaggcaggatgatcacttgaggccagcagttcgagaccagcctgggcaacatagggacaccgtatctctaaaaagaaagaaattagccaggcgtggtgatgtacgccttcagtcccagctactcgggagactgaagcaggaggattgcttgagcctgggagttcgaggctgtattgagctaggattgcaccactgcactccagcctgggcgacagagtgagaccctgtcccaaaggcaaaaaaaaaaaaaaaaaaaaaaaaaaagagacatcctactgaggattatagactgaggcctacagcccagagcggctctgtcagtatttcagttcacagtttatatacaggtggtgaagactcagcacctgcagaatcacatctgacttgctcagaatcacatcaaggtttgggtgcaagagcacatctggtgatagattccagaggcttccgcacgaaccccggcagacattatctcatgtgtaggaaaaggcatggcctaggctctgtctttaagtgatgtggtgactcagcgacagacatgggggaccgtagactccatcctgttttgtcttcaaagcgtgtctgtggagctctgcacagttctgcgcgccggcacagaggcagcggctttgtgagctgattatgctggcaagcggaaaagagcaaatgtggcttctaacatctgccgctttgtctcacaaaccctaatggggaaccatgggtagtctcattttgttgatgtggggaattgagaatctgggaggtaggtggctctgctaatgccacactgcaaggagaagacacgactgggttgggaaccgggtctgggagtctccaaagcagatgttttctgttttgaatgacatcactccctggtgatccagcccacacccctgcccttctctaccttgaccttgcaggaagccttcgggagctgctgtggcagccagaggccctattgcactcagaatggtctgcaactccaggccctgctcctggagacagcctgccctgggttctgatggtggctatagctcttagcagctgtgtgaccttggacaagttccatgccctctctgaacctcagtctacccatctgtaagatgaacccaataatagcacctgcttcctggggctcctgtgcagctgaggggaaccctcggtgggtgggcattgagcacccagtgcctggcactgattgccctcgatacatagggctcacccgaggccctcgccactttgcctggtctgtgtgcagatgagcggggcaaggaccacctccgggcgggcaagctgaacctggtggacctggcgggcagcgagcggcagtccaagaccggggccacgggcgagcggctcaaggaggccaccaagatcaacctgtcgctctcggcactgggcaatgtcatctcggcgctggtggacgggcgctgtaagcacgtcccctaccgtgactcgaagctgacgcggctgctgcaggactcactgggcggcaacaccaagacgctcatggtggcctgcctgtcgcctgcggacaacaactacgatgagacactcagcacgctgcgctacgccaaccgggccaagaacatcaggaacaagccgcgcatcaatgaggaccccaaggatgcgctgcttcgcgagtaccaggaggagatcaagaagctcaaggccatcctgacacagcagatgagccccagcagcctgtcaggtgggaccacgttggggtagtggcgggagggccaggtccccaggagaaagcttccttccctctgtcttctcgcctccaacttcccacctaaaagacagtgggagcagcatcctcccacccctcagccccatgtgagcgcagggccctggttggagacggcccagatggtatctgcttgtcagtgtcctgggaggagggcagtccgtctggcctgtcccatctgacgcaggctgttgcccactccccgcctctcatctgctcatccattatcccccccacccccaccacaccccccaccacacccccgtctgctgctgtctgtggcattgtcgcaatgcgtgttcgctgctcagcagctggcaactcactccccacggccacacctgctcctcgcaggcaccttgttactgcagcttttgcgccctggcatttgcctgtcacctggcaggtggaaatccacacttggagcattggcctgaaggggctttggaactgaaggactctttttttttttttgagacggagtctcgctctgtcgcccaggctggagggcagtggcatgatctcggctcattgcaacctctgcctcccgggttcacgccattctcctgcctcagccttctgagtagctgtgaaggactcttaagattttcttatctcagaagctcttggggaagggaacacaaaatacttgggtctgtctgtccattcatccccctcgcacccaccttcctctccatctattcattctacacacacccattcacctacccgctcatccacccatctgtccatcctcccacttacccattcatccacccaccttttcttccacctacccaccttcccacccaccccattacttatccatctgcacactcatccatccatccacccactcacccacctatacatctatccatccatccatccatccatccatccatgcatccatccatctatccatctatccatcctcccatctacccatctctccctccattccatcaatccatttcttccttccatccatccatctacacagccacccacccacccatccatactgacccttccttcctttcttccatccattcatctgtcatccatccatgcatccattcatccactgatcctttcttccatccatttgtccatgcatccatctattcatcgatcttcctttcatccactcatctattcatccagagatcctttcttccttttttccttccatccttccatctcccatccatccgtccatccattcatccatccatctccatccttccttctatctacccacctacccatcttccattcattttatctacccatccattcacccattctaatcacccaccccatccaccctaccatccatatacccacccattcattcactccatcctatcatccattcttttatctatttttccactcacctacccatctatccactgaaggttccctgagctgctcctctgtgtggacacgtgctgggtactggatacacagagatgaatcagatgcaggctgtgcctcgtggggtacctaatctcctgaggaagaaggacactccaatggaccatcacatgcaacgagacacactctagggcagacagctgtacagggcagagaggagtgcatggtcagccaggtctatctgtgggtgggataaggtcagtgagggaaagcttcccggaggaggcagtaattgagcagtcttggaagaggagaaatttccctgttaggatgagagtgtccagtgtgtgcagagatgcataaaactctaaggtgcatttggggaactacaaagccctctgctggctgccttgggcataggggtgatgggaggtggtcaggcaggactggggtggagagggccttgaacaccattgcaaggcattccacctcagccatctgccttcctcctctttccctactcttcaccccaaccctactcacccccaagattggtaagggggaagacaagaatggtgagggtaccaggagggagtgggggaggctcggcccgcggcccccgcacccagcagctaacacctgtgcagtccttccagtggtgatggaggcagcccccaggatagctgttagcatcccttctccctggattaggagcaaggagcccagccagcagcatgactgaggtggtgctgggtggatagctgagcactgagcagttatcaccagctccctcccagctcctcagacaagcaactcagccactgagaacctcagtctcttcatctgtaaaggggacatcatagcgacacctgccttgtgtgtgctgtgaggcaactgggaaaattgcctgaggtcatgcatgtgtgggctcagcacgaggcctggcacggtgggctccagagacaatgcatgcggccttcactttggagctgggccttcagaccaggcgtgcctgacccaaagctccctgtgtttgcccctccctggactcactttagacatttcccccttagccctggttctccctctagcatatccctctttttccctttcaacaaaacttgaaacatctgtctacttttactggtcccactctctctccctctgctctctcttgcccctacccaggcaggccctgtcctggcccattgacgttgtccttgtcaccgatggcctcctgtcgtggagcccggtgactgtcctggggcaggcctcaccttgccgtctcagcaccagttggctcagcagatcccctcccttcatgagacctttgcttcctacatgccctctgccctggctcccttcctgcctccccacccacctctcctcagttcccaagggcgagtcgtccctgctccctggcctcttaaccctgggctgtcccaggctggtcctctgctgtcctctctctgcactcgctgctcaggtggcttcgcctgggtccctggtgttatcaccacctctgcattcctgacttcccaaatgcaccctgcagcctggccatgcaatttgtgtttgtgtctttttttttgagacggagtcttgctctgccgcccaggctggagtgcagtggcgcgatctccgctcactgcaacctccacctcccgggttcaagcgattctcctgcctcagcctcccaagtagctgggactacaggcacgcaccaccatgcccagctaattttttgtatttttagtagagatggggttttaccgtgttagccaggatggtctcaatcaggacctcgtgattcgcccgcctcagcctcccaaagtgctgagattacaggcatgagccacctcgcctggcctcgtgtcttaatttataaaggtgactgggtgacagcacagagatccgcgccactgaaaggaaagcccatcgtgactcacagtgctcctggaaacccggggtcaggcacacacacatggggaagcaccagcatcggtctggagggagaagggagtgggggcccgggccacagcctttactgggcttcctgtgggaaacacacagcaaggcctgggaggcaggttgggaccagctgatctgaataattctggtgggcgttggggttgaggggctgttcctggttgtctctgcctggccctgggcctgttcagggcagggggaatcttggcttggtgtgagagttacatacagcaggtggcttggggtgtggactcgggttcggctggtttatataccaaagatggactcactgactcgtggtttacggtttctaggaattcgctcgccctgaagggcagtctaaccctgcccagcaagtccctcaagataatagaacataaagcaatgtagaaaagaagtaaaacatactataccatgtcctctgaattccggacttgaatctgtagctgtgtaataagcatttcaaacccaacatatcccactgtcaactcgatgggcccccaaatctgctaggctgcagctccccccaacagctgacagaggcaactcaggtgttcaaaccagacacttggggtcgcccctggcttctcacgttctctcaaatctacatccagttggtcagcagatcctgccatctccaccttcaaaactggctacagcctggccgggcgcagtggttcacgcctgtaatcctagtactttgggaggccgaggtgggcagatcacttgaggtcaggagttggagaccagcctggccaacatagtgaaaccccatctctactaaaatagaaaatattagccaggcgtagtggcgcacacctgtagtcgcagctactcgggaggctgaggcaggagaatcacttgaacctgggagagggaggttgcagtgagccgagatcacacgattgcatctagcctaggcgacagagcaaagaccccgtctcaaaaaacaaaacaaaacaaaacaaaaactggctacagccagttcactgctgccctccagactgagtttctgcacgcccccgcaacgggtctcctcgtgcctaaccctggttcccctcagtgcactctccacgcagcagccagggagagcctgttcaaatgcaaggcctgtgactgccctgtgcacacctgcctcgttcaacccagagtcacagccaaagccctcacccggccctccacagctgtcacaatctggcattatccctcttggacttctccacctgtcctgcccatcactccctcccctccagccacactggcctcctggctgggccaggaacagtgcagtctcacaaccgcctcagggccctcgcactcaccgctccccctgtctagcaagctccccctgtctagcaagcgcctcctgtctagcaagctcctcctgtgcccgccctctcctcgctgcttccttcatgccttgactaaaaggccttcaataaataagctatttatttatttatttttgagacggagtcttgctctttcgcccaggctggagtgcagtggcgccatctcagctcactgcaacctccgcccatctggttcaagcaatcctcctgcctcagcctcctgagtagctgggattacaggctcccgccaccatgcctagctaatttttgtatttttttggtagagacggggttttactatgttggctgttggctgggcttttcttgaactcctgacctcaagtgatccacccgcctaggcctcccaaagtgctggggttacagacatgagacactgtgcccagcctaacacactatttaaatggcaacttgggccgggcaaggcagctcacccctgtaatcccagcactttcgcaggccgagatgagaagattgcttgatcccaggagtttgagaccagcctggacaacatggcgagaccccatctctacaaaaaataaaagattagctgggtgtggtggtgtgtgtctgtagtcccagctactcaggaggctcaggtgggaggatcatttgagcccaggaatttgaggcctcagtgagttataatcccaccactgcactccggcttgggtggcagagcaagaccctgtctcgataaatatataagtaaaaaaattgcaacccttctaactgcttctgactcccaagcaccctccctacttgctttttcttctcagtacacatcgccttgtaacgtgttacccattttgcttatttattttgatgggaggtgcttaggcagggctggagtggagagggcctcgaacaccaccacgaggcatttcaccttgtccatctgcttttctcctctttttcccagtggaaaactcagcgtgggtgtggagtttttgtctttgttcaatgccgcatcctcagagtctggaacatcgaggtgctccataaatatttgttggatgactaacagccttttacatggagatgtgtttgaaataagctgaatactttaaagtcttcttgaatgaccatgaggtcgtctttttatagatttctgcttagttcctgcacacaatgtgcccctcatcctggctgctaatttctgtttctcccccagccctgctgtccaggcaggtgcccccagaccctgtgcaggtggaggagaagctgttgccccaacctgtgatccagcatgacgtggaggccgagaagcagctgatccgggaggtgagacccaagcgggtgggaacatggagaagggacaggcaggtggggcccagcgggaagggcagggctgccgctggggtccaacgcgatatcaccgtaccttcaccgtgggtttggtcctgagaaagctgaagctcaaagagatgccaggacttgcccaaggtcacacagcaaagagtctgagccaggatttgaacttgagttcttgactccagactgcattcaatgccgccttagggcctgcgtggtgagaacagaggggtgtggaggtgtctccaggggcgtggtctcccctccgttttgaaggaaggggtggctgtgcattgatggaagcagaaaaggcatccctggctgtggaaatggcctgtgcagaggcgaggcagtcagggtggggaggagtctgtcccccagcagccgacgacaagtctgagagccaggcagcccgtttgaccagcgggtgagtgtggtgttggcctcctggaaaaagctgtcacctggggcacctctcatctgagtgcctcccaacacccctgggaagcagcgggtcagacgatgcctgatttccagaggcggagctgatccccagagcgggacttccacagccaggcatggcgggggcccccccactcctgcctttggctccatccctgactccacgctctgttggtttccagagattcccgcctaaatgctgcatcctgagacctgagcatgccgtggagtttgacatgtggcagtccctttattcatttatttatttacttacttatttttgagacagcgtcttgttgtcacccaggctggagtgcagtggtgcaatctcaactcactgcaccttcaaactccctggctcaggtgctcctcccacctcagcttcccaagtagctgggaccacaggtgcatgtcataacgcctggctaatttttaaatttttttgtagagatagggtctctatgttgcctaggctggtcttgaactcctgggctcaagagatcctcccacctcaacctcccaaagtgttgggattacaggcgtgagccactgtgccgggcctgatagtccctttagaaccctggcttttcctgatgtgaaacctgatgccaggcaggacgagctatcccggggctaggcctggatgtatccgctgctggacccctgccactcacctaccacctcccactggggtccgtcctcaggccccagaagcccctgttgggctgtgggtacctggggcccagcctctggggcagacaggagaaggactgtggagatctctgtcctgtgggccggaggcgtgggagaaatccatccaagagcctcgggcgctgcacgtgacgggcggggcctgtgctgtttggggagaggctcgatggtgcccccagtgaacgccgtccgcccctgcaggctctggagctcggcagcgggcactgcctttctccctccactgccgtttccagcccgggtgtcaggtcccttcctgtagctctggggaggctcccggggaggctttagcaaggaggggccctgggggatggctgagctcagacaagcccgcagaaaccagagaagtcagcctgctgttgttcggagtgggcatggagtcacacagcggggctcggaggctgggagtcacacacggagtcacagcccggggggctctggtcacagatggaggggtggggcgggctgtgcaggacggggacggaggcttccttcccgggaagcccggtggggccggcggcccccgctgtccagtaagtagggcactgcctccccctggtggtcaccagggagtagcgacgccgttcctggcgggtccctggagtgccacggatgggggtgccttctgccctggggatggggtcgcctgcctccttctcgtggggcggcctagtggacactgcgtcagagtggtgctggctgacgccaccgccaccaggattccaagaaaccctgaggtttcttctgtgagccatgcttggaggaagcgttgaagatgtctgtgcccctcccccaccccgctatccctgcgtccctcctgcctgccatttgttctttttctcaactctcatatttattgagcacctgctatgctcctgggaccgtgtttccctttgtattccagaaccattcagggaaagggaggagccccctctgtgtagggaagaggacacgggccaggagccgggttccggtccccagtctgaaccaggggtttggaccagaagattcctagggtccgtccagccttctgcaagtccatccttatgggctctgtgaccttgggcaggttgtttgagctctctgagcctctgtctcatctgcagaacaggcatcatagcggatttcctgctgcttcttagggatgtaagaggatgaaatgaagggccatcatctccttggcgggctgtgtatcatgtaccaagcaagagctgggggtcagctccgccattcagtccttaacaggcatattgtgagcgcgtgctgggtgctggacactctagccggagggggatgtggggccaaggaagggtttttcatgctttaaatgttggaagtaagagagcatgtgttgtagactgtcgggaattatccagcacagaaggagaagtcgaggttataggaaggagggggcggattgcaagcacaaggtcctggagctgggtggcgtgggttcagaggaggtggagcttccgggtagatctccaggtgggtgggaaggtgagggagtcctgtacctccctgttctctgtgacttaccaggcaggggatgtggggggagaggagggttgggaagacagagctaaagggtaggactggggctgtgggctcagccatgtcgaaacccgcctgcctgagattcaggtcccatgtttaaaagtgagaatggggttgggtgcagtggctcatgcctgtaatcccagcactttgggaggccgaggcgggcggatcactggaggtcaggagttcaagaccaagcctggccaacatggcgaaaccccgtctctactacaaatacaaaaattagtcgggagtgatggcacgtgcctgtgatcccagctacttgggcgactgaggcaggagaatcggttgaacccaggaggtggaggttgcagtgagccgagatggcgccactgcactccagcctgggcgacagagtgagactctgactcaaaaaaaaaattaaaaattaaaaaaagaatggagattggtggtgctgtgcacatgcatgtgtgtgtgcgtgtgtgtgcgtgtgtgtatgcgtgtgcgtgcatgtgcatgtgtgcctgagggtgcatgtgtgtctgtgggtgcatgtgtatgcatgtgtgcacatgtgtgcctgcatgtgtgtgcctgcatgtgtgtgtgcgcatatatgtgtgtttccatccacgtattgctaaggtgaggcctgggtttaaccagggtcagggctgtgctgggagaaaacaatagaggggctgggtgagggagtcagggatgtttgctgactcgagtcatgggccctgggatgccagctggtgaggagggcagtgagagcagggggcagtggaggagagggctgcagggctctgaggagctgcctggtcatggaacctccctgggcctcagtaacactgtgggcattgctttgaggttcaagtgtatctaaaaatgtactaaagaatgcgtggttacatctgaattattctccgtccccttctctccctccctaggagcctaaatcagtgctgtccatgccagtttctatttgccaaagggatctggagaggtgggagtatgacatggtgcttgcccacgccatccctgtccttgtcccctctctctggcttactacagtggcaggcacctctgtcagcagtggctccaggagacaaaggatcccagactatctttaattcataaatgccttgcccttctcttgagccatgtgtgtcagaggcctgaatatgttgcatgcccattaacctgcagttctgctctgccatttactggctccgcaggtgtttcttgaatccctcctctggcaggatctgaggttacaagacaggatggtccttccagcctggccaagatggtgaaaccctgtttctaccaaaaatataaaaaattagctgggtgtggtggtgtgcacctgtagtcccagctactcaggaggctgaggcaggagaatcgcttgaacctgggaggtggaggttacagtgagccgagatcatgccactgcactctagcctggggaacagagcgagactctgtctgaaaaaaaaaaaaggacaggatggtccttgctctttggagggtgccttctgataggggagaccaaggagaccaacaataaactgtaatcaaataagtagagactatcatgaaggaagcaatggttcagaaagaaaaagcagctcctgagattactaggaagctggagagacagaagagacccaaggaaggaaaagaagcaactggcggcccttgccctggtgtcagaagacagcagctgtagagggctgtgaggaaggagggtgctgctgagagagctcacacaccattcacacccattcacacccattcacacccttccctgggcaagtgtgtcctgcccttggctgtctcccaggagtcctcatcctggagtagtgaaatggttgaaaacccccaaaagaagcaaaagccaaagccccaggggtctcctcaggagaataaaatgggagactcgtctctccaaacccaagaagaagaaatctttcccaaggaggagcaggctagtggtgatcctggggagacagctggcagcatgtcttcccaaggtggaggctgggtgcggtggctcactcctgtaatcccagcgctttgggaggctgaggtggtggattgcttgaggtcaggagttagagaccagcctgggcaacatggcgagacccccatctttaccaaaaatacaaaaaattagccgagtgtggtggtgggtgcctgtggtcccagcttctcgggaggctgaggtgggagaattgcttgagccggggttggggttcgggttcactggaacttgaggtggcaatgagctgagactgcgtcactgcactccagcctgggtgacagagtgacaccttgtctaaaaaaaaaaaaaaaaagatgaggacgtaatcatccaaggaggaaacagttagtgaccctgagggagaggcaataggagcattgccaagaaaaagaggagattctcttccaaggagaaaccatcagcaatgggcctggagaggccactggtagcaagatcagctccaagaagaagaaaaagacccacaaacaggccaggcgtgatggctcatgcctgtaatcccagaactttgggaggccaaggagggtggatcacgaggtcaggagtttgagaccagcctggccaacatagtgaaaccccgtctctactaaaaatacaaaaattagccaggcgtggtggcatgcgcctgtagtcccagctactcaggaggctgaggcaggagaattgctgcaacctgggaggtggaggttgcagtgagctgagatcacaccactgcactacagcttgggtgacagagtgagactttgtctcaaaaaaaaaaaaaaagaaagagtcccacaaaccatcccaggaagatcagaatgaacatttcctgggggagaagcatgcccccaaggtggcattttccaaccctacaccccagtaaaaacaaattcatgagcacacacacagaaaataaatagcataatagaagctcaggaagtgtgttaagaagaaatagaagccgggcacagtggctcacgcctctaatcccatcactttgcaagaccgacaaggcgaaaccccatctctgccaaaaatacgaaaattagccaggcatggtggcatgcacatgtaataggctacttgggaggcagaggcaggagaatcaggagaatcacttgaacctgggaagtggaggttgcagtgagctgaaattgagccactgcactccagcccaggtgacagagcgatactctgtctccagaggaaaaaaaaaaagcaatagaggaagggacagggagcagtgcaggaggccttctgcttctgagagtatggtcagggaaggcctctctgagggatgttactaagctgaggcctgggaaggtgcttgccagggagcagggcaaaggccttggggcagggaggaagtgggtgtgtctaggagtccccaaatgtgcatcatagcagttgagggggaggcagggccaaatcacttgggtctcaggtcaagttgaggagcttagatttcatccatgaacatgggataccattagcagatcctaagcaggggagacacctgggtgggcactatggctgtgtcagagagaggttggggccagagtgagaacagaggtgagaaccaggtggctgtttggacgagagctggcagtgatagcaaagatggagagaagtgggtgaataaaaacatattttgtcattgatgggttgaggaccattaggcagaaaggtatttgccaacatggaaaggtgttcatgatatattgctgtgtggataaaatagattgcaaacaaatgcatatattattcgtctgttaaaaaatgcactgagcaggctgggcatggtggctcatgcctgtaatcccagcactttgggaggctgaggctggtggatcacctgaggtcaggagttcgagaccagcctagccaacatggtgaaactccgtctctactaaaaaaaaaaaaaaaaaaaaaaaatagccagacgtggtggtggacaactgaactgtaatcccagctacttgggaggctgaggcaggagaatcgcttgaacctgggagttggaggttgcagtgagccaagatcatgccattgcactccaacctgggcaacaacagtgaaactccatctcaaaaaaaaaaaagaagcactgagaggctgggtgtggtggcttatgcctgtaatcccaacactctgggaggctggggtgggaggatcacttgaggccaggagtttaagaccaagctgggcaacacagtgagacccctactctataaattttttatttatttctgttttatttttatttttgagacggagtatcactctgtcacccaggctggagtgcagtggtgtgatctcggctcactgcaacctccacttcccaggttcaagtggtctcatgcctcagcctccccagtaacagattacaggcaagccaccacgcttggctaatttttgcatttttagtagaggcggggtttcgccatgttggccaggctggtcttgaactcctggcctcaagcgatctgcctcagcttcccaaagtgctggggttacaggcatgagccaccacgcccggcctacaaaatttttttaaaaaattagctgatggtggccgggcgtggtgtctcacgcctgtaatcccagcactttgggaggccaaggcgggtggatcacgaggtcaggagatcgaaaccatcctggctaacacagtgaaaccccgtctctactaaaaatacaaaaaaattagctgagcgtggtggcggatgcttgtagtcccagctacttgggaggctgaggcaggagaatggtgtgaacctgggaggcagagcttgcagtgagccgagatggcgccactgcactccagcctgggcgacagagcgagactccgtctcaaaaaaaaaaaaaatttttttttgctgatggtggcatgcccatagtcccagctatttgggaggctgaggcaggaggatcacttgagcctgggagttcgaggctggaatgagccatgattatgccattgcactccagcctgggggacagagtgagaccctgtctcaaaaacaaaacaaaacaaaaaagcattgagaacagtttggaaaggtcttcaccggcaagtaattatcacagtgttgtaccattggattctcttggcttacttataggttctgtattgtttgaataaccaaaaaggaatactgaaagctgggtttcaaaatgatgataaaatgctgcctgccctctggtccctcccacccccccaggagtatgaagagcgcctggcccggctgaaagccgactataaggccgagcaggagtctcgggccaggctggaggaagacatcactgccatgcgcaactcatatgacgtcaggctgtccacgctggaggagaacctgcggaaggagacaggtgggcaccccttgccccccgaggctgtctccagggaaggtggcctcctttccgcctcactgcagtaactgcatcacagagcattttctacacccgaggatcaggtctgttttatcctcacaatggtccagtaaggtaggtaccacaattatgctcgctatatagatgaggaaactgaggcacagagagggtaggtaacttgcccatggtcacacagctggtaaaggagagccaggatttgaacccaagcagtctggccccagagccagtgttctcacccacagcactgcactgggatggcttagccatggactgggccccagctcaaggctgactgtgagctgtgaagtgccaccctttctttagaggccagtccctgccccgaattgctgtgttttccggtctcctcttacttttgagcctctctgttagcaaagcaaacacattccataataaggatttaatccttagccacagctgtttacctatctggaggtttttgtgttctttttttttaaaaaaaaatttctttgttttgagatggagtcttgctccatcgcccaggctggagtgcagtggcatgaccttggcttactgcaacctccccatcccggatttaagcaattctcgtgcctcagtctcctgagtagctgggattacaggtgcacactaccacacccggctaatttttgtgttttcagtagagacgggatttcgtcatgttggccaggctggtctcgaactcctgggctcaagcgatccacctgccttggcctcccaaagtgctgggcttacaggcatgagccactgcactcagcctttagtttttgtcttctttttgccaccctaggatattctgccataccagtgtcagtcaaacacgcatgctgcctggaggtccagacttcctagcactcatgaatagtgtagaatccaggcctggaatgatgatgatactgatcgcaccgtcggtaccgcttgttggcacattaccacgtgccgggtactgtgtgggtgctttacctgcacctcctcactgagcctctggtctccccagtccagcgaggtaggactccctgaatcctcccataactgtgtggaaaccaaggctgagagagatccaggccatttagctagggagtgggtgccatatttcagcaaagggaaaaatcaagaccctcttacaggagtctgggacataacgataaagaaatgggtgggaggtatgagaggcgccgggagccccctgaactggagcactaaggggcccatgtgaatgcagccctgtctccgctgcaagggagacgcgctcctggaggagacccaggggaaggggagggagcagattctagcattttatgccctttggagtgttccctccagtccagattgaatatgaggcctccagcagatcttcgtctggcttctggagctctgacattcatccacagcattcatttagctcccgtggatctagcatatccagtggacaagagccctgggctggccactccagtgagggctccgagggcacccgggcatgaaatctgctgagctctcagccttggaaggcaacaaggccccaggaagcctgccagtgtgcgaagagtggtcccaaggctgggtgtgacttaagagcccagcactcagtggctgtggaggtcagaaaatggaggaatcccagcgttggtcagggaaggcttcctggaagaggtggaaggtggtagggtttgggttctgataaaagcagagatgggaaggcaggcaggctgtagccagcctctggagggtctgggaggctctgactcttaagctggtcttttagaaacagtgggcttgggccaggcgcggtggctcatgcctgtaatcccagcactttgggaggccgagtgggggcggatcacgaggtcaggagatcgagaccatcctggctaacatggtgaaaccctgtctctactaaaaatacaaaaaaaattagccaggcatggtggcgggtgcctgtactcccagctactcgggaggccgaggcaggagaatggcatgaacctgggaggcagagctttcagtgagctgagatcgcaccactgcactccagcccgggcgacagagcaagactctgtctcaaaaaaaaacaaaaaaaaaacaaacaaaaaaaacaacacactgggcttggagccaccttctagggaagggtctctcattctgaccctttaaaaacctgaaggaagttctccattttgcagaggctgtcctgcaggtgggagtcctctacaaggctgaggtcatgtccagggctgagtttgccagcagcgctgagtacccgcctgcttttcagtatgagacagtggtgaaacccaaggtcttctccacgactgacactctgcccagtgacgatgtctccaagactcaggtttcctccaggtttgcggagctgcccaaggtggaaccctccaaatctgagatttctctgggctccagtgagtcatcctcgctcgaagaaacctctgtgtccgaggctttccctgggcctgaggagccctccaacgtggaggtctccatgcccactgaggagtccaggagcagatacttcctggatgagtgcctcgggcaggaggccgctgggcacctgctgggggaacagaactacctcccgcaagaggagccgcaggaggtgcccctgcaggggttactaggcctgcaggacccgtttgccgaggtggaagccaagctggccagactctcctccaccgtggccaggacagatgcaccccaggcagacgtccccaaggtccctgtgcaggtagctgatgtcacgcatggtgccatgtgaacactgagcaggcagagcttgcccagggcccggagctcactgtgcacacactgttcacacacatggcctccgacactcaggccgtggctccactgtgtctgctgcggctctggcactggtggctggctcaggggcactggtgtccaggggttagggaaggagaagctctgtctcatgctctgtaattcaataagaaagttggggtcgcgatgcaaggttatgccaggtgggctcccgttctgcagatggagggacagctgtacagggcgtttgcccagttgccatggttacagtgagtgtccaggcctgacggagccctgggcgacgctcactggctcgtgagctctgtagtgagctgggtggggggtctgtgggaatccagccacctttcagtgaccacgaggcttctgggatactgctcttcctccatctggccccctgaccaacatcttctcccttttcaacaaccctcttgtttttaaaacaatgttcctcttggccaggcacattggctcacgcctgtaatcccagaactttgggagaccgaggtgggtggatcacctgaggccaggagttcaagaccggcctggccaacatggtgaagtgaaaccccatttctacctaaaatataaaaattagccaggtgtggtggcgtgcacctgtaatcccagctactcaggaggctgaggcaggaggatcacttgaacccgggagacggaggttgcagtgagccaagatcgcaccactgtgctccagcctgggcgacagagcgagactccatctcaaagaaaaaaaaagtcctattttctcctctctttgttctctgctttcctttcctctgtgtgtgtgtgtgtgtattttgtgtgtgtgtgtctgtgtgtgtgtatttagagagagagatcccaggtctaccacttccttggttgtgtgacctttctgggctgggtttcctcatctgtaaaatgaggttgcttcagaggagtggatgcaggcaacgctcctggcacacagcaggtgcccaccacacgcctgtcttccgtttcctctcttccctgttctctccctcatctcttccctcctttgtgctccttctctcgggagtgacaggcaggggaggttggggggtggtgggaggccttggggagttgaagtgaggccaggggtgagggagtaaaggatggttctggcccaaatcagccttctttctcctccatcccctctttcctcccaggtccctgcgccgacagacctgctggagcccagtgatgccaggcccgaagccgaggcggctgatgacttcccgcccaggcctgtgagtacctccccgggcctccatgtgggggacggggttctcttcaacttcctgggaaactccagcttgtcttctccctccctgagcttcagtttcctcatccatgagctgagaacaacaactccagccttccccgggcttgtggcccgtggccaggcagtgtgcagtgggaggaaccatcatcttcttcttatggagtgaaagtggcctgttgttctagatggtggctttcaaaccttccttagccttgtcgccctttgtgtaaaggaattgaggcccagtgtgtgcaaaggacgagggctgcaggtcagggctggtggcccctatgacaccatcggggaacccaatttgaacaccccaggggagcaaaaggagaggaagctttaaatctccctacatttatagaggaagaagacagtttggactcaagtgtgggctgggcaccgggcctgcagcaggctctcagcagggcgtagatggagcagccggggcagccctggctaggaagtgactctggggtgggacccaggcgtgaaggagggacggggggaagcagcaagcagaggggatagcaagtgccaaggtcctatggctggaaagaccttgactttcttagcaatggaaaaggaggccacggtggcgggggaggccgtggaggcagggagccggcagggaggaaagtggactttcctgcgaacgtgacgggaagtcacatggggctcatcgggaacgggatgtgatcggtttctattttaagatggccctggctgcctgtggagactggattgtgggaggtgagagaggaagctgggagccttcctcctagcgtgggggtgtcagtgggaatagcggcagtaagaactcaacagggcgtgtttttgtgtcactggtgtccctgagctggaggtgatctgtcggggctgcagcaggcggaatggccccgtctgggattgagccacctgggagctgtcggcgggggttggggcggccttcccacctccacctgggtttctcttcacactcaggaggtagatctggcctcggaagtggccttagaggtggtgcggacagcagagcctggcgtgtggttggaggctcaggccccggtggccctggtggctcagcctgagcccctgccggccacagctggtgtgaagagggagagcgtgggcatggaggtggcagtgctgactgatgacccgctgcccgttgtggaccagcagcaggtgctggcccggtaagcagcagagcatggggctggcgggaccccacggtgaggtgggaaggggctgccttccaggatggaggcgggggtgccatagcttcctcccagctctcccttctaacttggcagggcggccctgatcctctctccaggcgcagtggggactaggcgggcagggctctgctccagacacaggctgccaccagcatcccttgtcaggcctgctggccttcaggtttcaggagtcccagggcagagtgtcgcaggcttttctcccatcccagccaagcccccagccccctggcctccagtgccctcctgaatgtgagacccactcacccacaggacaagccatccccaggcactctctgggaccgccgggggagctgggctttcctcacttgccgtgtggctttgttaggttacttaacttttctgagcctcggttctcacttccgttaatgatgatgtcagcccgacctccatgtcgtggtcatccaggggttcaacaggcggagacccagtcccagaggccacagttcaaacactgagcgacccctgagtgctgggcccaggacacaaggatgagcaagctgctgcctcagccccaagggcccacaggccagggcggaggacaggcagggccaagagggtcctgttctctagcagttcccagcctgcctcctccactagctctgccacctcgggccaacttgcaacctctctgtgccttcactgcccatcttcagaatgggcgatatcagtagtcccagtgtgagaagcttgtggtgagggtcaaaatgggcattgcctgcagcgtggcagccccgcgctgggcacgcagtaaacacttggcacatgtcctggctgttttcacagtgtggtgtggagggaaggctggggggccttcacagaagtggagacagctgaaaaaggtttgctgcaggggtggcatcctagagaaagggcacagcacctgcaaaggtgtggaggtgggacccggcccgggcatttggagacgtgccagccgtgagtgaaagctggagtgaaccgcagagtggggtgcaggggagatagagggaagaccctatgtgccctcctcgggtgcttgggctccatcctgatggagacccacagcaggatgtttttttctttcttttttttttgagatgaagccttgctctgttgctcaggctggagtgcagtggtgcgatctcggctcactgcaacctctgcctcctgggttcaagcaattctcgtgcctcagcctcccaagtagctgggattacaggtgtgcaccatcacgcccggctaatttttgtatttttagtagagatggggtttaaccatgttggtcaagctagtctcaaactcctgacctcaaatgatttgcctgcctaggcctcccaaagtgctgggattacaggcgtgagccactgcacccagccaaaaatttgtacctctaaaggacaaaactctaaacgtttttgagcattttggacataaatagtcttaacaatgtattgtgcatgtccctgcctgattaaatattgtgcgctgagtgtattgaacatttttcacaacccagggttcttctcatcatgccagtggccttagacacagaactagcctgctcagctgcagggagcaccagcgtgggaagtccacgggtcaggggtgggttagctgagcccacaggaagattcccgccctgacctgccactgtggtcaagtgcacaggcagggagttgggcaggaatcctggttgtgaccctgagcaagcagcgtcctgtcgccgagcctcggtttccctccctgtgaagtggggttgttggaaggatctggggggcccacgcatagcctggagcctgctggatggcacgtgctcggtgatgggcagatattgtcttgtttgctttctcctccacgccggcagtctgcagctgttggagcagcaggttgtgggtggagagcaggccaagaacaaggacctgaaggagaagcacaagcggcgcaagcgctacgcagacgagcgcaggaagcagctggtggctgccctgcagaactcggatgaggacagcggggactgggtgctgcttaacgtctacgactccatccaggaggaagtgcgggccaagagcaagctgctggagaagatgcagaggaaggtgaggcccagatgcagccccccatgcccagctgcccagagatgggtgagaccccccgatccaggcatccctacaccttgtaggaagccaggcagccctctactctttacacagcaggcatgcatgcatttattatttatttttagagacagggtctctctgtcgcccaggctgcagtgcagtggtacaatcagctcacctcccagaatcaagccatcttcctgtctcagtctcccgagtagctgagactacagatgtgcaccaccacacctggctactttattaaattttttggacaggcagggtctcaccatattgcccaggctggaaagcacttattaagtgcctgcagtgtgacacaccctgttctgatgctggcaggcagagcagtcacagtgacagatgtgtccctgtcgctgtggagcttgcctcccagtgtgtgtgttgtgtgtgtgcacgcatgcgggtatgttgtatgtgtgtgcacgcatgcgggtatgttgtatgtgtgtgcatgcatgcgggtatgtgttgtgtgtgtgtgtgggtgtgcgtgtgtgtaagaaataacacaggagagaaataagtaagagaatattgaggagtggtcagtactgtgaagagaataccagggcgagacaactccgtttttatgttctcatttttgttgatggttaagtgcacaaattacaaacgcacaacttgattcatttctacgaagtgctttccacaaagcatgcccatgaaacgagcacccagactgggaacctcagaaggacctgggctaccacaggtgggggacagggacattctcctggaggtagagacttctgggggaactgagagagagaaccagtgctgggtggcatgaggaggagcattgggatggagcctgaagcaggagtgaggtcagcatcttctaggagcagagaatgggcagatgtggctggagaaagggagtgaggcctgagtcagggagagcgtgattctgcccacggtgagggtcatgtgcactgcctttggagctttctctgtgctgtccgggtctcctgatcctcatgatggctccttggccatctgcagggtcctccccaccccctcgcccccaccaccgtcctggcatcctaaggatcttgccaagcataaaactttgcctcttttggctgggcgcggtggctctcgcctgtaatcccagcactttgggaggctgagatgggagggtcactggaggtcaggagttcaagaccagcctggccaacatggtgaaatgccgtctctactaaaaaaaatacaaaaattagtccggcgtggtggcgcatgctgtaatcccagctactcaggaggctgaggcaggagaatcccttgaacctgggaggtggaggttgcagtgagctgacatcacgccactgcacttcagcctgggtgacagtgcgagactctgtctcaaaaacaaaacaaaacaaaacaaaacctttttgcctctttaacctctttagttttttattttcctggattttttttttttttgagacagagtcttgctctgtcacccaggctggagtgcagtggcgagatctcagctcactgcaagctccgcctcctgggttcatgccattctcctgcctcagcctcccgagtagctgggactacaggcgcccgccaccacacccagctaatttttttgtatttttttagtagagacggggtttcactgtattagccaggatggtctcaatctcctgacctcatgattcgcccacctcagcctcccaaagtgctgggattacaggtgtgagccaccatgcctggcctttcttggctatttttatatcttttcttaatgctccttgttatatttccagttgaattcattctcccgtagatatcttgaattaggtctacatttctaatattttttcctttcttttcattgatgtcctatttcatatcttcttgatttttttgtccctttctaagtttttcaattttggattagaaatgttcatacctgtgaatgcctgtttaagaacgttttattcaaatgtattctaattggagttattttttatttcttatttttaagagtctcactctgtcacccaggctgaagtgcagtggcacgatcatagctcaccataaccttgaacccttgggctcaaacaatcctcccgcctcggccttccaaactgctgggattacaggtgtgagccactgcacttggccttgtgttacatttttatctgctggcttggttctgtgagcttgtgctttcggggagaattttcttcactgaaatgttttgatttttattttctgtttcttctggtagctttggttagacacatctgttcttttctgtttactttgtaaacagtcatgtttttctggactatcaataacagctgaaggcagagatgaagtttgaggtggtatcttagttttcttcattcgatagcacactcttctctttgtatagtgaagtgtagttttaaatagaactctaggccaagcacggtggcttatgcctgtaatctcagcactttgggaggctgaggtgggcgaatcgcttgagcctgggaggtggaggttgcagtgagcggagatcgtgacattgcactccagcctggatagcagcatgagaccctgtctcaaatcaatcaatcaatcgatctctgatttgtttcctattgctgtgttaacaaattactataaatttacttacttaatatacacaaacatatcatctcacagttctgtaggtcagagtccaggtacagtggggctggcttctctgcttagaattccacaaggctgaaatcaaggtgttagcagggctggacttctttcaggaggttctaggggaagaatccttgtccacactcatttcaggtgttggcacaatttagtccaatgaggttggttgcgggactgaagtccccatctttttgctgactgtcgactgtgggtcactcttggcttctagacaccgcctgcattcctgggctcctggatccctgcaaagacagccagagtgggaagcagtccctctcacgcgtggaatgtctctgactccactcctgcctcatctttcagaagcatctcttctaccacatctctcctgcctgcctctctgccttctctgttgcttttatttttatttttcattttattttgagatagggtctcactctgtcgcccaggctggagtgcagtggcacaatcatagctcactgcagccttgacctcctgggctcaagaaatcctcctgcctcagcctcctgagtagctgggactacaggtatgcaccaccacgcctggctaatttttttattattattattttttgtagcggaggggtcttgctatgttacccaggctggtctcaaactcctgggggtcttgctgtgttacgctggctgtcccaggctcaaacgattctcttgcctcagcctcccaggtagctgggactgcaggcgcatgccactgcacccagctaattgttttgtagagaaggggttttgccatgttgcccaggctggtctcgaactcctgagttcaaatgatctgccggcctcagcctcccaaagtgccgggattacaggcatcagccactgcacctggctgcaaagtcctttttttttttttttttttgccaaggaagataccatattcacaggcacaaaaacagggggcaaaaatcttgggggtgaaagcttatttttttggtggtggttgtcttttgtggttttctcttgtttctgcaggactttcagtttccacctcaagggcgcttcccacttctaaatgcagcaccttccggagactaactcctctggtcctgcacacgtactggtctcttccatcagtttctcattttcaggtttcagatccgtttttaggattgtcttgctccttgtggagggactgcaccctgccttccatcacctcattcctcctcgccccatgctgtcctggatgctctctgcttacctccccatggggtggctccggggctgtctgctgcacttgggggtttatctctgtacttccatgtaattcaaaggttccagcgttctctgtcttcaggtcatgctgtaggctggttaagggtggctttatttttctctcctggttcttctgcatgtttttttggaggtcttgttggagagattcaggcttagatggatgttttcatcctcaggtacctaggatgctgtttattttattttatttttaaattttttttgtataaggaaatatgtacgtatgtgtgtatacacactgttatggtttggctgtgtccccacccaaatcttatcttgaattatagctcccataattctcatgtgttgtgggagggacccagtgggagataattcagtcatggggtcggtttcccccatactgttcttgtggtagtgaataagtttcatgagatctgatggttttataaggggaaacccctttctcttggttctgattttccttttgcctgccaccatgtaagatgtgcctttcaccttccaccatgattgtgaggccgccccagccatgtggaactgtgagtccattaaacttctttttctttataaattacccagtgtcgggtatgtctttatgagcattgtaaaaacagaccaatatacacacacacaagaacacacgtgccatctctttcttagataaaagtagctctagtgcacgctttcttctacctagcttttctcacacaacaatgtatagtatcctgaaggtcacagcagtatggagagatactcctcattcttttctgtttttgagacggagtctcgctctgttgctcaggctggagtgcagtggcctgagctcggctcactgcaatctccacctcctgggttcaagagattctcccacctcagcctcccgagtagctgggactacaggcgtgcaccacccatgcccggctaatttttgtattttttagtagagatgaggtttcactgtggtggccaggctggtcttgaactcctgatctcaggtgatccacccacctcggcctctcaaagtgctgggattacagacgtgagccactacgcctggcctcctcattctttgacaactacatagctctccattgtgaggctggatcattgcttattgagtcagtcctctcttgataaacacttggggtgtttccaatatcttgtaataataaaggctgctgtagtaaacagcctgtgcatatgacttctgtattcttggtaggtttctttggaatctattcctccaactagggatgctgggacaaagggtaatgcaagtgtgattttgctcgatgtcactagacatgccaacttctcctccataaggattgtattgtttggcatttccactagcatgtatccatgtgtttctcaccaacagagtatatttacaaaaacctggattttccttttctttattgagacgaggtctcaccctgttgctcatgctagagtgcagtggcacgatcacagctcactgcaacttcaacctcctgggctcaggtgatcctcctacctcagcctcccgaatagctgggactacaggcatgcaccaccatgcctggctaatttttgtattttttgtagcgacggggtttcaccatgttgcgcaggctggtcccaaactcctgggctcaagtgatcctcctgccttggcttcccaaagtgctgggattacaggcatgagccactgcatacagcccctaaaacttggatttttaccactttgttaggtgagaaataatatctcagtgtagttttttgttgttgttgttgttgtttattttattttatttttctgagatggagtttcgttcttttgcccaggctggagtgcaatggtgcaatctcgactcactgcaaccttcgccccccaggttcaagtgattctcctgcctcagcctcccaagtagctggcattacaggcatgtgccaccacgcctggctaattttttgtatttagtagagataaggtttcaccatgttggccaggctggtctcgaactcctgacctcaagtgatccgccccaccttggcctcccaaagtgctgggattacaggcgtgagccactgtgcccagcatcaattttaatttgcatttttcttattgtgagcagtgttgaatagtttttcatatgttttgtggccatttgcagtttttctccaaattatttttatttcttttgctcatttctctattagcatgtttgttctttttcttttctacatgtagaaactctttatacattaggaatattagctcttggtctgtgatataaattgtaaatttttttccagtttgtcttttactgtgctttatgatatttttgccatatgaaaattttcaatttttagattttgtcaaattgaccaactgttaaaaaattattgcatattaattttcaatcatgggaaaattccctcatgttttttttctagaacttctatggtttcgtcttttttacatttaaatctctgatccttaatctgtcacaggggtagagaaaaaagagtaaattaatgatctagttagagtttatcttggtacatgtgtgaggagctgcttcgatattgtcttttctttttttctttttcctttttttgagacagagtctcaggctggagtgcagtggcacaatttccgctcactgcaacctccatctcctgggttcaagtgattctcatgcctcagcctcctgagtagctgggattacagatgtgcaccaccacgcccagctatacaaaaagaagtacaaaacttacattccaaaaacaatgaaaaaatgtgaaagtaattaagaagaccaaaataaatggaaagacatctcatgttcatatgaattggcagactcatattggtgagaggtcagtactcctcaaattgatctacagattcaaggcaatacccattagagttcccgctggtttctttgcagaaattgataagctgatcctaaagtttacaatgaaattcaagggactcaaaatagccaaaacaatcttgaaaagaacaaagtgaggggaatcacacttcctggttgcaaagctttgctacaaagctaccgtaatcaagactgtgtggtactggcatgaggacagacacacagatcaaaggaatacaaatgagcatccggaaataaaccctcatatttacagtcatcaattaattttttttttttttttgagacagagtctcgctttgtcgcccaggctggagtgcaatggcgtgatctcagctcactgcaagctccgcctccggggttcacgccattctcctgcttcagcctcccgagtagctgggactacaggcacccaccaagatgcccggctaattttttgtattttttagtagagacggggtttcattgtgttagccaggatggtcttgatctcctggccttgtgatccgccctcctcagcctcccaaagtgctgggattataggcatgagccaccgcacccggcccttttttttttttttgagatggagtcttgctctgtcacccaggctggagtgcagtggcgtgatcttggctcactgcaacctctgcctcccaggttcaagcaattctcctgtctcagcctcccaagtagctgggactacaggcacatgccaccatgtccggctaattttagtattttttagtagagatgggatttcaccatattggtcaggctggtctcgaactcctgacctcaggtgatccatccacctcggcctcccaaagtgctgggattacaggagtgagacaccacgcccagcctgtcaattgatttttgataaggatgccaagataattcagtggtgaaaggacagtcttgtcaataaatggtgcggggacaactggatattcacatgccaatgaataatgttggacacctacctcacactccatacaaaaattaactcaaaatggatccaaacctaaatgtaagagccaaaactgtaaaactcttggaagaaaacgtaggtgtaaatctttgctaccttggattaggcagtggtttcttaggtatgacaccaaaagcacaagttacttaaaaaaaaaaaaaaaagagggataaattggatggtgcagtggctcatgcctataatcccagcactttgggaggccgaagtgggaggatcgcttgaacccaggagttcaagaccagcctggacaacatgggggaaaccctgcctctacaacaaattttaaaaatattagccagatgtggtggcatgcacctggagtccctgctactcaggaggctgaggactggaagagagggaggactgggaggtcgaggctacagtgaaccaagatcatgccactgcactccagcttggtgacagagtgagaattttatggcatatgaattatatgaattatgtctcaagaaaactgtcacaaaaattatcgtgctgggtgcagtggctcacacctgtaatcccaggactttgaggggccgaggcagaaagactgcttgaggccaggaactccagacaagcctgggcaacacagggagatcctgtctttacagtaaattaaaaaattagctaggcgtggtggctcacacctgtagtcccagctatttgggaggctgaggtgggaagattgcttgagcccagaacgtcgaggccacagtgagctgagaaggtgccgctgcactccagcctgggcaacagagtgagaccctgtctctaaaaaaataacaacaaacaaaaattattgttagtgattccagatgtacaaaaacatataatgattattatacccactaacaccacgtgcttactacccagtctaagaaatggagcagggccgggcgcggtggctcacctgtaatcccaacactttgggaggccgaggtgggtggatcacctgaggtcaggagtttgagatcagcctggccaacatggtgaaaccccgtctctgctaaaaatacaaaaaatgagctgagcgtggtgactcaaacctgtaatcccagcttcttgggagttgaggcataacaatcgctcaaaccctggagtcagaagttgtagtgagctgagatcatgccaccgcactccagcctgggcgacagagtgaatctgtctcaaaaaaaaaaaaaaaaatggagcaggctgggccactgtagctcacacctgtaatcccagcacttcagaaagctgagatgggagaactgcttgagtccaggagtttgagaccagcctggtcaacaaagtgagcctcgtatctatttaaaacaaacaaacaaacaaacaaacaaaagaaatggaacattgttaatccagttgaaacccctgtgcaccagcctctctgtggctgtcctgcccacccatgtcctgccagctgttctcaaatgggtatcagtgcatgaattcaaacatccttcttttatttttatttatctatttatttatttatttattttgagacagagtctcactctgtcgcccaggctggagtgcactggtgtgatcttcaccttcacctcccgggttcacgtaattctacctcagcctcctgaacagctgggattacaggcgtgtgccagcagacctggctaatttttttgtatttttagtagagatggggtttcaccatgttggccaggctggtttcaaactcctgacctcaagtgatccgcccgcttcggccttccaaagtgctgggattacaggtgtgagccaccacgccctgcctcaaacatccttctttactaatcagactgtacctgctctttgaggaaacagactgtgcaccaggtagtcttggggctcagggagagggtggttatggctggggctggcagtcacctgtgctcaggagggaccgggggaccggtctggcagacttgagcaggagaccaaaagaatctggaacccttgatcagatcaaggtgggtcttactcttaggtccattgtttaggtccagtgtttgtcacaccgtcacacagggctgtggcagtgggagagtgaggattgtcaagtcggagagtttgtgcctgttgtcctccttagagatgtcacttgtgcaattctctgatatcctttagaacggtggtgttggatgtggggacttctcaaaggctcctgaataaaatgtacaatgggagatagtgactgaggggctggctgttgggattgctgatcaacttttcccctacattttgcagggctggggggacacattaggtgctcatttaaatgctgggtggagagacagcagggtgattggatagacggaaggatcagtgggtgtgagaggaggtggatggatggatggagggaaggatggctggatggatggtggggatgagaatggatggctgatcaggccaatgaacagacgatgcgtggctgctggcaggacagtgagtggacagggtggttagatggaaggggaggtatctttccctgctcactgcttgtcatcctttgctttcagcttcgggcagcagaggtggagatcaaagatctgcagtccgagtttcagctggagaagatcgattacttggccaccatccgccggcaggagcgtgactccatgctcttgcagcagctcctggagcaggtgcagcccctgattcgcagggactgtaactacagcaacctggagaagattctgcgtgagtcctgctgggacgaagataacggcttctggaagatcccacatcccgtcatcacaaaaaccagcctcccagtaggtcaggagcttggctggcccttgccctcccctccctccttcacggcttaccatcctgcagactggcagggagtgtgggcctctccttgcaggctgtgggtgtagaagacacgtgaccctgggtacctgatgcgtcaggactctgagaaagtggtgtgttctggaggcagacagatgtgggttggaattctggcagcaccgttccctgtgtgccctttttgggactcggtgtcttcatctgtgaaatggggatgaataacagcacctttcttaaagttgctgtaaggtttgaaatgtgttaataggccaggtatggtggctcacgcctgtaatcccagcactttgggaggctaaggctggcagattgcttgagtccaggagttcgagaccagcctggccaacatggtgaaaccctgtctctaaaaaaaaaaaatagaaaaattagccaggcatggcagcatgtacctgtagtcccagctactatgggggctgaggcgagaggatcgcttgagcctgggaagtcaaggctgcagtgagccaagatcgtgccactgcactccagcctgggtaacaaagtgcgaccctgtctcaaaacaaaccccgaaaaaacaaaaaccagaaatgtgttaatacacagaaaacccttacagcagtgcctggcacatagtgatgctcgctgcatgtcattgttatcctaatcagcattgtcactggttcatccttacgacagccctgagaagacaggttttctacccatttcacataggaggacacaatctcagagggtccaaagtcacagtcacagcagtgagtgggaggaccatggatcaaaacccacagttcagagtttcaggcctggttccacttccgctcttgctgctgacctcccgtatggccttccgaagatcactgtccctctctgggcttctttacaaagaaggggttggatcagatgaccttgaaagcctcctcacctctgatgagtctcagagtaaagccagacatgctgtggctctttctccagccgtggacctgactctgcccatttggggagcccgcagtgccccccaggagtcctccctcttgctcagcgtgttcatccaggtccaacatctctgatgtttattgacaccatccctgctgagaccccagcccgcctccatttcccacatgctctgggatgcagcagccttcctgtctgtccccaccctcgcctgctgtcttgcctggaagccccttggctgctgtcttgcctgcaagcagatgagggtcttctctggtgcctgagcccctcctgctgtctgtttcttaaaattatcccttggcttgggctgggaagtgtcctcccctgtttaagcctgagccaggcctgacccccacctccacctgtgccctcctctaggccttgcaccaggcagcagtgacttcagcttttgttttctcatagcagtttcaactgggccacagaacaaaccagcccgcaaaacctctgcagcagacaatggcgagccgaacatggtgaggaccgcgggagagggagtggggtgtcgggggctgggagggctttgcccccagtgctgtgggtcagtgttactgtggagagctggttttccactttcctcccgcctaaggattaaagaaggggccaaggctggatccttttcatgcccctccattggcacctagaccctcaaccccctctggccctcattcaaaggtactcacagtcataaataccaagggaaagtagatggttcggtggcccatcttgccggtgaaggacagagacttcagcctcaaactcagaggacaagcagcacattctggtttcctgctggtaatcctcagaccaagagggtcctcacagggttcatgaagcagtaattgggattcctaagtcactttattttcccgtctctcatattctgtctttttttttttttttctttttctaagctcagtggcaagacctatctcctatattttatagtgcaacagaaatgcatgttcttaaagcatgggtggtggtggttgttttttttttttttttttttttttttttttttttttttttgagatggagtctcgctctgtcaccaggccggagtgcagtggtgcgatcttggctcactgcaacctctgcctcccaggttcaagcaattctcctgccttggcctcagctgggactacaggcgcgcaccaccatgcccagctaatttttgtatttttagtagagacagagtttcaccgggttggccaggatggtctcgatctcttgaccttgtgatcctcctgcctcagcctcccagagtgctgggatttcaggcatgagccaccacgcccggcctctattttattttattttattttatttattattattattattattattattatttcgagacagagtctcgctctgtcgcccatgctagagtgcagtggtgcgatctcggctcactgaaagctctgcctcccaggttcagccattctccggcctcagcctcccaagtagctgggactacaggcacccgccaccaagcccggctaattttttgtatttttagtagagacggggtttcactgtgttagccaggatggtctcgatctcctgacctcgtgatctgcccgcttcagccttccaaagtgctgggattataggcgtgagccactgtgcccagctaagcggggtgttttcaacgaaactcttccagttttttaagttagctgggagctactgtccccagcagccaccagaggcccagacagaagggcaccagcgggagtccaccagtcccttggggtggcctggtcagcaggcacagcttccatgacacaactccatgaacaatgatatgaaagttgttattatttacagatcctcaggctaggcagggccaccagagagggacccaagcagctggaccccctcttggtgtccttgtgtctgggcctctggtggctgctggggacaataactaccagctaagttaacagagaaactctaagagttttgttcaaaacaaggggtcaacaaaatttttctgtaaaggacccgatcataaatatcttgggctttgtgaactatgtggtctctgtcacagccactcaactctgccactgtagcacaaaaacagccacaggtaatacacaaatgaatggtgttccaataaaactttatttacaaaaatagcctgcaggccagatttggtctgtatgccataattagctgattctgccttaagccattacaaatatttcagaaaacccacatagaatatacctttacagttatgataagaccactcctaggctaatgaattccaaccaaacatctctggctgagcaactcaggctgcaaggggccactcatggtggtctagagcttgattggcagcttcataaaaaagggaaagttgctgccaggaaaaaagacattcttaatctgggaccacaaagaggttatgtcagaatgctttcagctccaagcgatagataccaaagcaaacaaccataagaaaaataaggaattttttagttcatgtaagtggaccagtttcaggcacggctggatctaggggctgaaacagtcagggtctgtgtctgtcttcacctctttttttttttttgagacggagtcttgctctgttacccaggctggagtgcagtggtgcaatctcggctcacggcaagctccgcctcccaggttcacaccattctcctgcctcagcctcccaagtagctgggactacaggtgcctgccaccatgcccggctaattttttgtatttttagtagagacggggtttcaccatgttagccaggatggtctcaatctcctgacctcgtgatctgcccaccttggcctcccaaagagctgggattacaggcatgagccaccgcgcccggccacctctttttttttttttgagacagagtttcactcttgttgcccaggctggagtgcagttgtgcgatctcagctcaccgcaacctctgcctcccaggttcaagcgatcctcttgcctcagcctccagagtagctgggattacaggcatgcaccacgacgtccagctaatttttttgcatttttagtagagacagggtttctccatgttggtcaggctggtcttgaactcctggcctcaggtgatccgcctgccttggcctcccaaagtgctgggattacaggcgtgagccactgctcctggcctatgtcttcacctcttgttcctgcttcccttggtatgctaactgaaggctttctccacatggccggaaggatggctgctggccattggtgatccaaaaggaagagaggcctggtctgttaaagcaactgtccccagtctttttggcaccagggaccagtttcgtggaagacaatttttccacaggtcaggacggggtggggggtctgatagtttcgggatgattcaagtgcattacatttaatgtggacttcatttctattagtattacattgtaatatataatgaaataattatataactcaccatcatgtagaatcagtgggagccgtgagcatgttttcctgcaactagacggtcccatgtgggggtaatgggagacagtgacagatcttcaggcattagattctcataagaaccacaacctggatccctcacacgtgcagttcacaatagggtttgccctcctatgagaatctaatgccaccactgatctgacaagaggtgcagctcaggcaataattcaagtgatggggagcagctgcaaatacagatgaagcttcacttgctcacctgccgctcacttcctgctgtgcagcccagttcctaacaggccagggactggtaccagtccatggcctgggggttggaaacccttgtcttaaagcatcctgaaactagagcttggggagagattctgattggctctgcctgggtcatgtgtctactcttgaaccaattactgtgtttaggaggatgtggttctgtgattggtgcagtctgggtcacatgtccagctgtgtaacaacaggatgggagtcagatgtagtatagggcactatgaatgctcaccccactgggatgtcaagtggaagaaggacaattccctgaaaagggagatttagattgaagaaaacaagtccataatagtggggaaaaataatagctcttggtgataagaaggtttggattccagttctaatgatcacaaatgtacctgtgagctgaggatagcaacgcattgcctattctatgaacatgtcgtgatagatttggggcttgtgtatcaacccggcccccctgttggagctggcaggacaccctgttttgagctttgtaggacagaataaggcacttcccatctcaaggaaggggaggccgggtgcaggcttggctggagactgacttcctggccccgagctgcctgggatcccacccccgagtccaggatctacggtgtagggtacaccagagtgggcagtgcctgctccagccctgtgacaacttcggggaagctcggggcggcccccactgccccaggataccagaggctgtggagccctgtgccaggggcacaaacaaggggacgtgaccacgggcatctgcatctcggcaggaggacgaccgctacaggctcatgctcagtcggagcaacagtgaaaacattgccagcaactacttccgatctaagcgggccagccagatcctcagcacagacgccaggaagagcctcagtgagtgtccctcccctgtccccaccctctccacacaactgggagaggcgtgaaggggatagttttgaagtcagacaggcctgggttcaaaaactcctttccctctcggagcctcagtttccttagctacaaaatgaggggggtaacaccaacttcttaggattaggtgatacgaggtgaggaaacggcccagcccgggcgctggtgctcagtacagagtctcctctttgctccagtcttgtctcccctggcccctagtaggcactcagtgcatggctcaggggcctggctggggatgcacgggtttaggcctcactagttacgcgccagcttcctggcgagtcacacgccagcattgtgacttcctccaaatgcagattgacttcacttatcaagggccacaaatgcaacacacgcttttaagaattaagcatcacttcattttatctgcttttaaaactgaaagcaaagcccgcagagcttccaataaaatagcaataaaaagcaaatcttggccaggtgcagtggctcacccttgtaatcccagcacattggcaggctgaggcgggtggatcacttgaggccaggagttcaagacaagcctggccaacatggtgaaaccccgtctctactaaaaatacaaaaattagccgggcggtagtggcgtgtgcctgtaatcccaactactcagggggctgaggcaggagaatcgcttgagcttgggaggtggaggctgcagtgattcgagatcctgccactgcattccggtctaggcgacagagtgagaccctgtctcaaaaaaaaaaaaaaaaaaaaaaattagctgggtatggtgatgcatgcctgtaattacagctacttgggaggctgaggcatgagaattgcttgaactcgggaggcagaggttgcagtgagctgacacagtgccactgcactccagcctgggtgacagagtaagactttttctaaaaaaaaaaaaaaaaaaaaaaaaaaagagcaaatttgagttctatatattgaggttatttaagagacagaatgggtggggcggggggaataggattaattgagtgcctggcattgtgcccatgttgcagatgaggaaactgaggctcagagacgaagcagcttctctaaggttgtaggaagcagtggagctgggctttgaacccagacttgtctggcttgagatcccaggctgcctcagtctgatgctttaaaaccccagctccccagcccagcctctttggatgcagacatagttgctgggtctgagacctcagccagagcagcctcgcagagcctggggtcccagctgcagggccagggcctctggctgggcaggggggcgggagtggggtgggccaggctctccatcctacccacttggggcattttctctccatccctgcgctcctggcttaccagcacctctgccctcttccccacagcacatcacaactcgccaccaggcctcagctgcccactcagcaacaactctgccatcccacccacccaggcccctgaaatgccccagccccggcccttccgcctcgagtccctcgacatccctttcaccaaggccaagcgtaagaaaagcaaaagcaactttggcagtgagcctctgtgagcacagctgcttgccattgcctgccttataggcatgtagagactgccaggccctcccagggcagccccaaccaggtctcctcccacctgccacacagcgctccggggcctgagggctccctcagccctgggaagacacattcccttccctgttccccagagagcccacctccgccctgggcaggagcccctcggaggctgtatagtcctccttagagaggcctgctccagctgttcataccacatcagtgtttccgtctgctcacctgccacagagcccacacccatgcccaccagtgttggtctttgcctcaaagcctgagacctgcttcacggccttcaccagccctgatggagagggcagcagctgccacgtggaggaagctcaatatcagctgggaaggaactgtgcctctgtctgactggccccacttcctaagcactgccctgccccatggggtggcacaggggtcccacagcaggtcttcctgcactgcccacccctggctggtctgtggcccaaggaaggccactccacattaagctgcccaataaactgcttttaagataa

SEQ ID NO: 402 - DNA, 18188 bp, Homo sapiens
  source 1..18188: mol_type = genomic DNA; note = NC_000006.12:c170553307-170535120 PSMB1 [organism=Homo sapiens] [GeneID=5689] [chromosome=6]
gtccggtcaaggcagccatctcgccgtgagacagcaagtgtcggatccgcaggcgcagccgtgcgatgttgtcctctacagccatgtattcggctcctggcagagacttggggatggaaccgcacagagccgcgggccctttgcagctgcgattttcgccctacgttttcaacggagggtaaaaaccccagagagctgcggctttcactttcgcccttcccccatctgctgaagcctatttaggagtcaccgccgtgatggcgctgccccgggctcctgcaggcctcagaaccctgagctgagggggtccgcacaaggccggtctccctgccgtcctctcatgccctgtgtttccctcttcaggctcgctttgctcaagtttacttggtgattgcgatacagccttggtttttagggtttcccattacagtcatgtcatttgagtttttatgtggaccgccactccgtgctccttgctgctgtaagacagtaaagtagaaattgaaacatagcctctgctctgtggaagaccattaaaactggacctcatgtacacgtttcttatgccagccggcgagggtagagggttagcgtctgaaacttaaaagttagggttgtttggtctgtgttgttagatgcatagctgggttggtagccgagatgtctaattgtagccgcctgatttctgttatttctaattgtagcagtttaatcattttgttttatttcaaatagaaggtgggattggctgagcaaacttagtttcatagataagtgctttttttttttaacgtttagcttaagttcaggaaaacaaaatactcagaagatggaccttttagtatgtgtgttcttgtatgttatgttcaagttttggtttttattttaattaccagctttatcttgagtagtataattttccgtggtggcacgccagagatttagggttatagaaagatgctctgtttaagactcttgacagggaagagctgtaaattgaaacagtggttatagttaccaatcaagccttgtacattaaaatatacacacgcaatttgaacgaaccgatggttcttaaaacagaaaatattggctgggcagtgtggctcgcacctgtaatcccaggactttgggaagccaaggcaggaggatcatcgcttgaggccaggagttgaagaccagcctgcgcagcatagcaagaccccatctctacaaaaataaattttaaaaacaaagcaaaaatgttaattggttcctcataaatttgaaatataaatgcacattttgggagtgtgttagaaagataacgaaagtctgattttagccttggttctgccactaaaggacactttgggtacttctgaacttcttgaacctaaatttccttatcttccttagtagcttcatagtttttggtgagaatcaagagagatgcattttgtaaattgcaagctgtcatcttatttaatcctcatgaaaagtgaatgttagatgatattagcatcctagggttatattagacgttaaactgtcagggtcagagagctggtgtgaagttgagccaggacttaattcatagctatttcaccactgagtttatggatgcttttccattatacaccttaacacttcctgtgatgactaattaagttgtatattgtagggagggttattggacccgtttcgtaaggctattctctataaataagaattttcagtgttcagtatgccctactcgttactcactttttaatcccttgtaatccagtttaagccattactgccctaaaaattacttagatctttctgattactttttctcagtcattgttctttttctttagtgtttactgcagctggctctcaggcagccttcgcttccgcaaaatgaggcctcattctcttttcctactctgtctttaaatgtagttaagtcattagccgccttgtttatcgctcagcactctttcatgtctcattgctgggaggattactcccaaatctggttttccagttctgcctctcatgagtccctcgattcggcttcttcagtaaaacatttttaactggtttttctgctctcagggcaactcaagacagctagcaaaacaaaaagcaagctaattattccccttcatctcctcttctcctttcttcttattttttgagacagagtctcactctgtcacccaggccggagtgcagcggtgcgatctcagctcactgcaacctccaactcctgggttcacgcatttctgcctcagcctcccgagtagctgggattacaggtgcctgccaccacgcctggctaatttttgtatttttagtagagatgggtttcaccatgttggccaggctggtctcgaactcctgatctcaggcaattgaccccccccccccccctcagcctcccaaagtgttgggattacaggtgtgagccaccgtgcccggcctcctctcctttaaaatacttataattatgccatcattctgttcatctaagttctaaatcttggatgtcataattggttttcccagttcctaaaacatttgcgtagatataaaaatttgtctattttgtgtgtttgtgatgattttggatttactgttcaccctgctaccttactattgcattagtagtattagaacagtgtttctgtcccatttcacatactatgttattgtcagagcagtcttcctaaaaccccactttgtaaatggaacttttctctctcttgcattccttttttaaagaccaggtctcactctaatgcccaggcacgatcatagctcactgcagccttgaacacctgggctcaagcagtcctcccacctcagcctcttgagtagttacaactacagatcattcttgctcagaataccttcatgatttcttgctaaaattccaaaatctttagcttggcatttgggattttctacagtaggaaccctgtccatcacataaaccttaacgtcactacatgtgcttatgcaaaaagggctgcctgaatgagttgcttgaatgtatgtactatttgaataattacctgtttgccattgcttgctgtttatattacctggaatgccatccttttcttcttgagagctttagcacaaatccctcctcagtaaaaatagtggcttaagtttcctgagtgcttacgtctgtgaggcaccatgcctttaatttccactattgcattgaagcagtggttatagttatcagtcaagccttgtacattaaaatatacacacccaaatatatatacacaccttgtgacacaggtactgttatcatcaacttgcatttggaggatttgtccaagatcacatacctagtaagtagcaagagtgggtctctgtctcatgtaattccagagcccaggtgcttagtcatactccagtgccatagcacttatagctaacacttactagaggaccagttacatgtcagggactgctataagggcttacatatttgatcctttgaacaccctaatgaggtagcaactgcagtgatctctgttgtatatatgatgaaattgacgctttgagaagtaacttacccacagtctcatatctgcgaaacgggaaagccagaattagaacccaggcggtctgcttttggaattctactgtaagtctctttgataagctgtcaaattgtacagccacagagggaaaaatttactgtttgtccatctatttgtcattatataagggattgggtataaagaaataagcattatataggcgttatataaggacttggatataaagaaatgaagcaagaaaaaaaaatctcatcttctctaaactcatagagcttgcgttgtagtaccactgtctatacctgatcctcaagggcacagatgtggtatttagttgttctgtattagtagtaccttgcgcgagtaagtatttaatgtgttggtgatgataattcattggcttttctgttaactcctgccaaggagactttgccctgatttaggcttattaataatttttttttcccagacaactcgtagccaggcgttcattctcttcccgctcatctttcctcttcccatttgaatcatgtttttgttgacatctagagtattttatcccattatgtactatggagcattcttctatttgtagggataggattaccaccctggagaattaatttttttcttttttcctcagtactatactggcaattgctggagaagattttgcaattgttgcttctgatactcgattgagtgaagggttttcaattcatacgcgggatagccccaaatgttacaaattgtaagtaaatatttctaaagacatttcacaatgcctttgtaatgatttgatgttgtgagagtttctacttctaaatgatttgtttcatgagtttttaagttgctgttgggagcatttttattagaaaaccattttctaagttaatgtttcctaataatttaatgtgcagtcttaataatatttgctgtattcagggtaccaaaagtgctttcggtaacctaaatgtgttcaccccagcattttaccatgaaaaatttcctgctgtgtcttaacatggtggaaggccagagaaagaaagaagagcaagcgaacccactgctgtgataatgtccattcatgaaagctgagccctaggacctaaacacctggtcccaactcccagtaccatcacaatggcaattaaatttcaacatgagttttgaagggaatattcaaaccacagcaccattaatccattaaatgatattttttttaaatctgcctccccacactttttttttttacctgaaacattcgttttagaaatatcctaagcaattatgtccacagctcagttttaataggctagctatgtttttcctaaaacatgaaaataaagccaaaacttaaaaaaacaaaaagcctgcataaatactgaatacatactgcagattggcagtggtctgtatttaccagttttggaaatgcttataaatggtcatgaattcctgggttaattaaacttgaattgtaataggaatgggacttacgaggtttaggtcctttggatggaccctccttgtattgtaggaagtaggtacagaagaaaagatacgttgtctttcctgctcctagggatggcccacatcttaaaaagcaatgaagtttgttttcgtcttcccagttctgtttctctccacttgcatcttttgataccccctttctgctttctgtttatggtgctcttgtgttacctttttttctcctcaaggacgacacttgtacaacttgaaagtagtaaatattagaaataagattttaaaacaactttatggataccatccttgtactagcttttactcatcttttaaatattgctttagttacgtttgctggtgaagtgagcactttttttttttttttttgtgaaacacgtcagatatagagatagagaataagaacaatgcagcattaacgaatgcctgtatatatccctcatcccacgtcctgtgggtctgacctagaactaagcttgcctcttccaaacctgtttcagactgtattctttgcatgaaaactcccattcctttgatgcacctggatatttgggaaaagcatcttgaagttctaagatttctgtctttccctgttggtattgtcaaccaatcttgtcagtaaaggcagtaaagccttataggggattggacgtcttcaccttagtgcagtgaggttgatggtaggcatagatcaggtgatgttagtgatgaccctagaggtgtcagctgctctcctagtaggacaggtatggtttgtgcgagtcattcgtaagtttccaagaggaattgtgtggcctctgcaaaatattgtttaggtttctttatagattcatatcaagatctaggaattaatttttgaaatacacggttgaatttgtatgtctataccaaattttaatcctctccatacagatggacatttaggttttgttttgttttggggtgctatttaaatgagtactcactggtgagtctagagcatccctttgcatacttggataagtatattaacaagatggatttctagcaatagaattggtgagagtggtgtgtatttaaatttttaataaataccaccaaattgcccatctaacaggttaatcagtttatactgtttccacaacctcaccagcatttagttagttaggcatttttagccagtataattggttgaaatagtctctttttgagatttggatttctgagtaacatagaggctcttatgtttatggtgacttaatgtctcttttttctgtgacttgtctgttcatagaagttacccatctttcctttatgttattgctttccttatttgtaagaatttttatagaattaaaattagactttgggggtagatgctactaatatattttcttagggttttaaaaagctattcttaaatttccctgtagaattttatgtagtcaaatttatgaaatttttctgtgtggcccttggattgtgttgtttaaatctaccttcacgaggctgggtgcagtggttcacacctgtaatcccagcactttggaggccaaggcaggtggattacctgaggtcaggagtttgagaccagcctggccaacatggtgaaaccccatctgtactaaaaatacaaaaatcagctgggtgtggtggcgggtgcctgtaatcccagatacttgggaggctgaggcaggggaattgcttgaacccaggaggcggaagttgcagtgagccaagattgcgccactgcattccagcctgggtgacaagagcgaaactccgtctcaaaaatcagtcaattaacctacctacgtatcttcctcagcccaagatagtaaaaaaaattcacccatgatttatttagtccattcatagtcgcatttttaaagtctttgatccacctgtaattcatctggaataaggggtaagatggaatacagacccctcctccccagaagggtgactgtttgtcccattaccatttagggaatagtgggaatcagaattttaaatttaaaattgccgaagatatgttttgctctactatctaaccagctcagttttctgaaatgtgctttttacagaacagacaaaacagtcattggatgcagcggttttcatggagactgtcttacgctgacaaagattattgaagcaagactaaaggtagatgcttttgtacatttctacactattttaaattaatagtaattcattaaattcttttaagcctacagcatgactgttggtcagatagctagagagtcactaggttagtagatgaattacaaatgtatgctagaaatgaaatgatatcattaatgcagggtcattaaagtagcataatgtgaaacagcagcacattccatttgttaaagtcttgtatcatatgaagggttctctacccttttagaaggagcctgggaggagttcttcttctgaagatactcttccctcaaaaacaaagcaaatcaatttctgtggcaggagagagcccaggaaagatttgacacaggagcttggtttgcatcaccatcagttgacaagcttttcctctttacagtgctgtgctcttagttggcaggatgcatgagtagaaatacgaaagaatgaataagctgggagcttggatgggaggcacaacatgcaccattaacgtctgtcacctgaccagcttcagttgatagccagctgccagaagtcaggggtgatcacattctgttttgcctattcatgaataacacttgagattatttacacttatgagtggttactggagtatatagtatatttatttaactgacacatgctttttgaatgtgtagaaaggatttcactcagtatttatcaattgttaatgcttttttagaaacttacattgaaagccatagtgacttacatttattggcatatttatatgataattcctaatgcttattttataaatgggagttagaagacaaaagtaaacatgatattgttaataaaacaaggaatggtgaattctacataatacacaccccttcctgaagtttttctctcatactttattaggtggtgaagtaaataaatgttggtgcttggtttcgaaatgaaatggaatgaaatttttttttttttttttgagacagagtttcactcttgttgcccaggctggagtgcaatggcatgatcttggctcactgcaacctctgcctcctgggttcaagtgattatcctgccacagcctcccgagtagctgagattacaggcacctgtcaccacccctgtctaatttttgtattttagtagagacggggtttcaccatgttggccaggctggtctcgaacccctgacttcaggtgatccacccatctcggcctcccaaagtgctgggattacaggccagcagtgagccactgtgcccggcctatgaataattttttatagtttttatcttggaaaggcattcctctataaaaaacttacctgttacttgtagttcatttctaatcatttttcagtgttttgactgtcattatttaattttacggtgctagttagatatctatctgtctatttatttagagacagcgtctcactttgttgcacaggctggagtacagtggcgccattgtagctcactgtagccttcatctcctgggctcaaacattctcccgcctcagttgggattacaggtgtgagccactatgcctggccattaagtttctcattagagatgtttgctatgtggttaacaaaaattggtgatcttgaattcattttatgtttataatttttgtgaagtttctctaccagtgggtaatgtagggctcgcaaaggtatagtaaagctaggatttgcagtcactgtattgtcatgctaagaccctgttttggatgcttgtgttctctactgtagatgttttaaggatcacgaccactgctgtgtattaaaatcatgcagagtaagggtgctgccctgtgtcttctgttctcacagagatctgctccacaaagagagggacttacatctaggtttgatcagggattgccgtaatttttctgtaaaggaccagatagtaaatatttacagctttatgggcctcatttgatctgcttctgtagtgaaaaagcagccacggacaatattcatagcaatagggagtaggctggatttggcccctgagccaaactacaggggtagtttgttgacccctggtctatatgcagagtgagggagagagatggatttaaacccatcttccttaggccacttcatgtgccctttcatacacattagctcttggattagcagtacctgagataagggtggtatggaaaatagagtctaaaccagagagctgagggcaaacttggcattccttcccttaaaattttatgttagtaatactgtgttggttgatcatgaaggaaataggcatgctttccccttccactgtggtatgcatttatttattcactttatactgttgattgttctagtctataatggcctctgcctctacatgcctgtgacttttatcaataattgcagatgtataagcattccaataataaggccatgactacgggggcaattgctgcaatgctgtctacaatcctgtattcaaggcgcttctttccatactatgtttacaacatcatcggtggacttgatgaagaaggtagaattccttctttctggaaaatggtgggggggaggagttattattccctagatgtgtgtatccatctagagttgaaaagaaccataaataccatctgacacaattctcatttcatttctgataatgaaagtgatgaagaaactgaagctaatgtatgacctccaaaggcacattgaagctctaatagtgaatgttgagcagccagttattttgctattttctcaggaacttgcatgagttagtagtaaataattaggcatttttatcttatagaaagaaatcggacctagaaagcttgacctaaatgtgattctgagtattgaaaatttttttattaacaaatacacttcaaaaaagttctttaacggttctagaagtcatttggggtaattaataataagcatctactccagtgttttcagaactttttgaaacacctctctgattttgtcagagtcagaccaggattccctgagaatattaagtcttgttacttaatattccatcccatttttgttccagagctgcattacgccacatgggcaccaatgttttccatccaaatgttccaatccatttgttctcatttgcaatccaaatgttctcatttggattggcttttggttgcatctaaaaatcaaatacaagtacagtgtcccaggacagatctttgtcacttagagtagtccattgacacagatggataagtagtccatctgtgtcatttagagtagtccattgagataagaagttacagaagtgtctagatgaggatatcattggagtaagcccatcttctgtgttccttctggctgaacctgtggctgaagttgccctaaaagtaggggcagaggaattcctgtaagggactgccccgaacctagttggggttccagaacactaaatctcagggtaatcagtcaaaagcatttagtgctgcagcagtcctctcagcagacagcaggaaaagatgtgtccaaggtgagggagttgatttgagtgttgaaggaatttggttcagggccagggatagtttctgtgtgtttagcaacaggggtaatttctcagtgtttcaagcaatagcctaaacaacattgtcagcgcctgggaatgttcaaggcaggccttggcttgggtcagagcctccaggggaatacatgcggctggccacatcacagaacatctcagttggacacagaaagaaagcaaggggactggggaccctaaatcctgtgagggaaaattctaagaggaaagggtcaagcttcatttcagcgccctgcctctcggttgttgactcctatcgctttctgttccatgagcgttttctttgcgtgcgctatctctgactcttaacatccgcccccatacacagccttggggaacattctgatcattttacctgccatggtttaggcgtagacaaattaggttgacacaatttctttttaaggctttcaaccttacttgaaaaccaagagaaaaagtaaagtgtagaaatagtaaaaatagaaatgaattacctttaacatgggtaattagagtctagctacaaattaatttgcctaacttagcaagctggatgcttctggtgtcttttttgacttacattatgcctggctttaatgtcagattaatagattcagattttagcaacattaaaaatagctgagctgccattgaatttcagcaggccagacagcatcctttgagtttttccgagagttagagagtctaatctgggaaagctgatacctactaagcagcagacctaagattcaggtttggcttttgtttcacttcagagccctgttctttgatttccatgtaacagtgttgctagttttggtgacaacctcaggtgtctctagaactgtctttctaagcttgtctgtctggttggcttttaagtgttctttaaactaatttttattttatagaggaatttgtgtgaataataaagcagtcctctatcttttttttccattgccctaagacagttttcagctcttttacctgtatttcctggtacttacctccattttccaaaactctgtatttgtactgcactcttttgagatatcttttggtgttttgttctggtagatgatggttcttagctcttttgtgtcctcttcctcattagcatcctcctttaacacattacacttttggtaacatagacctttaatgtttttattatgaccagatagatattgatctttgttgcgccaagtagcatgcattaatattttctttcttgtgtaactcgtttttatttttttcttaagttaactatctctaattggctcagatttctttaaactttttgtcagttccttgtacattctctgagtacaattcatctggttgtcagacctcacatactaggtggatcccttttccccttgctccaggatggaccactgccatcctgagattcccccacatcctgtgttctcctctttcttgatttatttccttattttagaggcttacctcctaaaagatttctgaaaaaaacaaaacgggacctttttgagactttgcttttaggatcttttctttaccctggtgttctgaaattgtatagtgatgttccttgcctagagtttcttatttgttttatcctctttctccaccttctttcctctcctcctcccctacccctctgcaccttctccacaaccacctggattatgacccggtactttatttttgactccccatgttatccatgtctgtcttttttgttctactttatgaagatttccttaattttagcttttcatcctttactgattgcttttatttctggtgtcattaatttccaagagcttgtacttattttttgtctttttaaaaaaaatcctgtttactttctttgcagttttctgtatttcatcagaatgttttttttttcatgttatgtgttcatttttggcctctgtcttctatgttagaggcttccttcaaatctctgatttttttttttttttttttttttttgctgtccattcacattgaagagtcttgtaccaaaatttgattatgaaagtccttgttgacatggcttgtcaactgacagccgttaactgggtgcttaagtaagcagcattttcttcagatgaagaatttctttaatcttttttcctgaggtgaggtgggactacaggaagagaagcccggttggcagctttttaggcctcagaggaggaagggggctgaaggtctgtgttttgtttacatcaactttccatttcatgtgttttgctcctaccctttgccactctagagcctggtcccctaagtccagagcctctgctaatgtctcaggagacttcctttactgtcttctgtgttggtggatgcagggacctggagagcagtgctccatattgaaaccttcaggacagcaaggtccacagctctttcccttggtgtcaaccgctgtctgcactaacctctctgtctttaatctcttagctgctctcatgccttttaaaaatttttctcccaaattaaaagtggctttagtttttctgtagtgaaaacaatcagtacatgtttatacatacactcatgcagttttatgtaagtaggactttggtatctgtttttctgtaactatacattatgtattatcaaggagatctaagctatatgcataatgatttttgtatttaattaacaaaaaatttttttgtcttctgtttttgctgctgtaatacatagcatcatttacctaaccagtcctctaaagggcattttggcttcctgttttcttaatataaacactatgatgaacatccttgtacatacatttttgtgtacttccccaattatgcttgtcttgctagaataaacttcgagtagttgaagtattgggtcagataaatttttttttgtattttgttgagtatactctttctgaaggatacgccagtaccctgagtacccgattttatataaccttcccagtattagaattaacacattttgaaacatctttttgcctattgaacagtttattattttcatttatatatattcttgggcatgttttcatatgtttattgactttataaatttcctctttggagactgattcatatattaactgttgcccatttccttatttgcaggttagttttcttcttactgattttcaagaactacattcgactgtgtcaaatgtctgtgatattatagatactcccaagagtgttatttgtctcttttgggtggtgccttttgctacacagaaattgctgtgtttcatacagtctaatctgtcaatcatttctttatgacattcagtttcttgccttgttagaaaaacttctcccatccaaagcttagctgtatttcttttaagacttgtctgattttattttttacattgaaatgattgtgctttttggattttactttgatgaggaaaagcactttgtaatcaagattcatgccattctacatttatttttgtttttatttattgatttttgctgttttatactgattttactagtgtctctcttgcttcttctagggggtctttaaagctgtgttcttggacatagcccaccctttctttggtttatttttttaaatttgttgtgtgtggttttctgagattggttccatccttgggtaaagcttttgggcctcagtttacttgtggcctgtcatcctcatgagagatacaatcatttttctgcctttacaccttacatctctttctttttttgtatattgaggttagtggattgcctgctgtgatctcatgtcttgtcccaagcttgcttccagcaaaaatacttcccagtttcttaggtgacctcagatggtgccttctccaccagagaattcagtttacacaatcctttttctttttttgagaccaagtctcgctctgttgcccaggctggagtgcagtggcatgatctcggctcaccacaacctccgcctcctgggttcaagcgattctcctgcctcagcctcccaagtagttgggaatagaggcacgtgccaccatgctcagctaatttttgtatttttagtagagatggggtttcactgtgttggccaggctgatctcgaactcctgacctcgtgatcggcccacctcagcctcccagagtgctgggattacaggcgtgagccaccgcgcctggccaagtttacgcagttctatagtagaaaacatacaaagctaacagtggcagttgtacatggttagtaaggagattgtccctatatcacatctcccagggtactgagttctggtatataatgtgttttctaaatcagttatgtttttaaaaaatcataccttgtaaatgactcgtgatttctcatacccagaacacggttgtttttaacaggcctttttaacgattgtagaatcacctgtgttctttgtaacaaactcaaataagatagaagcacatgaattaattcccttcttttcttgcctctaattcagagctcaaagatgaccagccacagttacttatctttccagacttttttgtgcttgtacaaatagttttcttattcttttaaacaaaagcagtatcgtattttacaggttacagaattctcttcgttttactgtgtcttgcggatgtgtcccttggacctgtctatatacataagtcgtgctttccttcaagttctcctcttcgttagcttaggagagccaagaaataaagactttcttacaaatgactgtttgagtttggctgatgtgtcctacagaaacctcaccatctctctctgtgttctccctactctcttacgggtccttacctactaccatggcttggattatttttgtgtattctcatggcttccaactgttttacatctgcagtggttaattctcttgtcatctttacctgaagatcataaaaatgcctttctccctcttacccaccctttctgtgttactcaatattgtattttaactcccaagcctacagtttacccttgaacaacacaccaacacggggattggggctgtctgctgggtggcacctgtgcaatggtgactgggttctggctgtcacatgtgcaacagtgtgtgtgctgcagctgtcaccagtgcaacagtggctgtgttccaactgttccctgaagttttagccaaggtgatagtccgttttgtgtcacgttttgacctgatttatttttgcgatgatttgggattgtgattggataccatccttatgaatactgttttcttctttaaggaaagggggctgtatacagctttgatccagtagggtcttaccagagagactccttcaaggctggaggctcagcaagtgccatgctacagcccctgcttgacaaccaggtaatgatactgtgtccaggtaatgatactatgtccaacttgtcatggtgttcagttgaagtgccttcctccaagttctcctcttcattagcttaggagagccaagatataaagactttcttataaattactgtttgagtttggcagacgtgtcctacagaaacctcatggtctctctctgtgttctgcctactctcttgtgggtccttacctactcccatggttttgattgttttcctgtattctcatggcttccaactcttttatgtctgtagtggctaattctcttgctgtctttacctgaagatcataaaaatgcctttttccctcttaccccccctttctgtgttacccaatactgtacttgaactcccaagcatacagttgagccttgaacaacacggggattggggcgccagttccccgagcactggaaaatccacatataactttcgactccaagaaaacttacaaataagcctactgttgactggaagccttgccaataatgtaaactgtggattatcacgtattttacatatgtattatgtgctgtattcttatgataaataaactacaggaaagagaatgttattaagaaaattataggaagagaaaatacatttacaatactgtatttgttgatactgtaagtttacatcatctgtttacaaggagaatcatctgtctggagtggtggacaaccacagctgcagacctcaatctacagtacatatcaagcaattcagctttttcttgtgatgtcataactttccctgcttcttggggagcagttccagcatcactaatagtgctttgtttgggccacttgttatttaaggtttataataatcgcactaaacacaatgaaaaacaaaggagaacattgagagatcactttaactttttataatcagtttatgtgtattttatggtagtaaatgataaaatagctagtatctacatatagtttatacatttgtggcatacctttctcttaatttttaaggtatttttaggctacttggctcatctgagtttttcaaagtgttgcgagtctccaaaaacttctcagtgtgtttactgaaaatttatgtgtcagtgggcctgagtggttgaaaacggtgttattcaaaggccgcctgtatttctaattcgtccctctttgtgattactgctggctaaattcagacctacattattagattattggatttatttcctaacatcctttctgcctacaagtttacttccctaattcctcctgctcagttttctgaaggatgtcatatatagctactcctctgcttattgcttattgacctcatctcctgtcaccccactacacccagaccctaactctgcttttctcagaaaagatgtgcttttcctaactccgtcccacatcttcagtctggaatgttctgtgctcttcagtgtagccttcagcgctcacctacttaaaagtcctttctgctgaagcctgtcttcttctaggagacttagtggacatctgttggggctctcctggctcttattttcttcttagttatagcaattctctgatcactttgcttgcatacgtccacctctccgggtcatgtgcttctcaagagtgggagctttgccagggaatcgttgtcagatttctgatgtgtgtaattcatccaggtctggaagggtctttattcagtctgaaggacattttaattttgtgtagtattttcatcacaaatcctcgtacacatgagggtattggaagaaacttgaacctttcctttgtgctcactgtcacatgacatctcacccaagtttcatgtcccaccaggttggttttaagaacatgcagaatgtggagcatgttccgctgtccttggacagagccatgcggctggtgaaagatgtcttcatttctgcggctgagagagatgtgtacactggggacgcactccggatctgcatagtgaccaaagagggcatcagggaggaaactgtttccttaaggaaggactgatctgtgtgctcttatcaccaatcagttcagacctggttgattttgtactttggaactgtaccttggatggttttgtttattaaaagagaaacctgaagta

SEQ ID NO: 403 - DNA, 6766 bp, Homo sapiens
  source 1..6766: mol_type = genomic DNA; note = NC_000011.10:c119030877-119024112 SLC37A4 [organism=Homo sapiens] [GeneID=2542] [chromosome=11]
gtcctattcgggctcccgcctctgttcaggtaggaggcggtatgcgggggaggggagtcacctgagggcggggatctcaggtcttggggagccattgttggcgaaccccaacttccgatacgacccggagctgttcctgcagttccagagacaattcatgggtcttggggccaccgaggcgctgtccctgaccaccagcacgagacccctttctatcgcgccagtcctgtggtctccgcacctctccagctcctgcacccccggcccccgtggttcccagccgcacagtagcgtgtcctgggtagcgtgaggacccacggggctgggcaggtgccacgagcccgccgcctcttcgccgcccgccgcctctcctcctctcccgcccgccgcctggccctcccctaccaggctgagcctctgggtgccagaagcgcggggcctccgggagaatacgtgcggtcgcccgctccgcgtgcgcctacgccttctgctccagttgctttcccaattgagcggaaaagccggggcatgttgccggggccctgggcgggacggttgtgccctgcagcccgaagcccgccggggcaccttcccgcccacgagctgcccagtccctctgcttgcggcccctgccaacgtcccacaggttggaaaccagaccctgcagcccccagctagcccgaaggaagcccagactgacgtcgcagggtaatggggacccagaggtagctctgtggggccccatcaggacctcagcccttagcggggctttctgtgtgacaccgtgggacctgaactggggaggtcccccttgcacagaattacaaggggcaactgtaggaaacaattaaatctattatgtgctaagtattgagagttccacggattgaggccctctctagaaggcttagaagtggggtagccggggtatgtgtctgactttgtgttttggtgcggtggtggtgagtgggtgtagaaactaatagtgccaagtgcagtgcctgtcaactagtaagttaataaaccttccgtgaatgaatgagaaggttctgtgactgagggagcagggctagagagggcatctctgctcatcccacccctgcctcccctgggctcaggcagacaaaagtaattaggttgaacctttaatcaaagctggtttcacaggcaagcagacatgatagaggaggtaaaggcagaaatcctggggacacagggtgctggcctggctcacaggcatgcctccttccgggacctcctccaccccctacagtttggcgctcagtaatctcttgttttcttgtctccctcaggacactgggtccccttggagcctccccaggcttaatgattgtccagaaggcggctataaagggagcctgggaggctgggtggaggagggagcagaaaaaacccaactcagcagatctgggaactgtgagagcggcaagcaggaactgtggtcagaggctgtgcgtcttggctggtagggcctgctcttttctaccatggcagcccagggctatggctattatcgcactgtgatcttctcagccatgtttgggggctacagcctgtattacttcaatcgcaagaccttctcctttgtcatgccatcattggtggaagagatccctttggacaaggatgatttgggtgagccctgaaacagcagggtggtggacctggggacacagaaccagccagacacactgggtgtttgtgtacaggcatgtggtgtgggtggattgtctgcacagtagaggccaggggccagtctgcatatgccagataaagaagctctgagatccatggacatgggtgcctgcggggctaaggagggctgcttatttgacgtgtgtgtgcatgccctggaggcactgtttattccgagagtgtttgaggggcttctgagcatggttttcacacctgtgtgggtgcatgtggaggcttcagggtgagtgctggctactgacactgtgagcactgggaactaaaaagttggcacaacgacttcatgtggcctggcatgctacccttcaggagggacaaggtccctgactccaatcctgagccctttgccccatgttgggtggtggagcaacagaactgctagaggcccgggactggcatccagagtgaggtgggaaatcccatatgcaaatcccagggagggggaactgccacgtcctgctccctttttgttccctgacaactgtagctgagaatcatgggtcagtctggggctagtgccgatggtgaggcaggagaagtggccgaagtagtagggccccatgagtgtcagattgcagcacaggctcctcctgttcctctgggaagtaacctgtctcaccccactgggcacccctgcacacctgaccccatgccttctttcattgctcctgtgtttctcccctggtccctaacccctaagtgtaatgttccctgcagggttcatcaccagcagccagtcggcagcttatgctatcagcaagtttgtcagtggggtgctgtctgaccagatgagtgctcgctggctcttctcttctgggctgctcctggttggcctggtcaacatattctttgcctggagctccacagtacctgtctttgctgccctctggttccttaatggcctggcccaggggctgggctggcccccatgtgggaaggtcctgcggaaggtgagtgcttccaaagagcctgtttggattgtcatagaggatgcctaaagagcatgtgggagcgccctttcttacccaccacctccacacccaacccagagcaggttcctgagcagttcctggccagctcctattgcttgtcaagatattttaggaggctgagagtggtgggatcaggtggcagaggaggaaactgccctgccaaacagaagcgccctctccctcttccctgtaatgtgagcttctggggctgccccatctgaccccaccctcaacatgggcagtaggctggacacctacgtgtcgccctctgccccacagtggtttgagccatctcagtttggcacttggtgggccatcctgtcaaccagcatgaacctggctggagggctgggccctatcctggcaaccatccttgcccagagctacagctggcgcagcacgctggccctatctggggcactgtggtgtggttgtctccttcctctgtctcctgctcatccacaatgaacctgctgatgttggactccgcaacctggaccccatgccctctgagggcaagaagggtgagcccccacccagaccgaccactggggcactcatttagcaggcagatgtttgttgaagactaggcgtttgcccggtcctgtgctggtcagtggatgtgggggaagaggtggtgatgtaggctgcatgggtagcaaacacaaatccatcccaagaggcagtcaagtactggacaagcggcagagccagcaagtgctgtgactcgttattttctggcccttcctcacaacagcacagacttccctgtcctggatagatagaatcatgagctttagtggcttggtcctgtttgtctttcattcattgagcttggtccttaagtggcttggtcctccctggtcctgtttctcattcattgaccttgcagcggagagggggagaggagagcagtggggtgagggaatacccttcatgctgatcctggctgtgcagatggactctgcccctgtggctggttaatgaatgttgggggttcaggttggggagagcagtcagggcagagcctgacgcccagccttttcccacctccaggctccttgaaggaggagagcaccctgcaggagctgctgctgtccccttacctgtgggtgctctccactggttaccttgtggtgtttggagtaaagacctgctgtactgactggggccagttcttccttatccaggagaaaggacagtcagcccttgtaggtaagatgagcatggggacaagggtgggcataaggagcaggaaccaatgcaggggatgcaaattcaggccttgcttccatttatcctctttattcgttccttgaggccgggcgctactcaggcagctatggccagtcacctatgggaaccctgtacctctccaggtttaagccattgtgggacaaccccaatgtgtaacaccctcccacccttcccttccctcttcccaccacaactccctactgcaggtagctcctacatgagtgccctggaagttgggggccttgtaggcagcatcgcagctggctacctgtcagaccgggccatggcaaaggtgagcgggcagaagggacaggaaggagaagggtccctttcagtcttcacggcgtggctgggacaggcactggagagatgggagtcccagggcacaggcaggttggcatctgctggtttagaccgggtgaagagggaatgattccaggctggtcttagctttcctacggttgtggaagtaaggctcttgggtagagttttaactgatgtgaaggacagccagaatatttcttagcttagctgtaggttgctccacagccccaggaaaatgggctgggaacagactaggtgccctccccagcacgtgtcctagtcctgcctgacgggggaggaggggatgttgtagagtttggcctcagaatgtaatgagcaggtcccagggcctcccagagctgcccagggccaagaactgtggtgggattgccaaagacccgtcagcagaggccctgctgtgtcagagtccaggggtgggtgttctctgccctgttctgaggacgtgacattgccgggactgtatccataggcgggactgtccaactacgggaaccctcgccatggcctgttgctgttcatgatggctggcatgacagtgtccatgtacctcttccgggtaacagtgaccagtgactcccccaaggtaattaagaaaggcctggctcacggcagggcacaaggagagaacgcaagggccactgactctgtctccctctcctggcttcagcctgggccaatcttttcttcgcctctcagatacccttttcagttctgattggaccgttcctctgtgtctgggttctcctcctccactctgggcctggttttcttttcttccctgtgctcctctaggatgttgctttctggactctggctcttcaccctctcgcggagctcacaggctttacagagcatgaggtgccttaaagatatctctggtttttctcctggtctgtctcacctttgtcctacccttctgccttacccctagccaatccagtttgtgtaaatcctgaggacagcctctagctcagagggatgacttctgtacctcctttccttgcccacctaggtccctgggtttgctcaatgtggcatctcctactctagctctgtattgtcagttgtgttggggagtggaaggaaaagaatcacttacttactgtccttttatgactactgtttgtttctggggaccaagccttcttcttgctttggcaggggtgggtaggcaggtcggctttccgactctgaatgccactccactctgcccttggcagctctggatcctggtattgggagctgtatttggtttctcctcgtatggccccattgccctgtttggagtcatagccaacgagagtgcccctcccaacttgtgtggcacctcccacgccattgtgggactcatggccaatggtaagtgttaacttctagagtctctccctcacccccacctgtgctttgcatatagaccagtgagaagctggagctagcaccactggcttaggttcttccctttccccctgacagtgggcggctttctggctgggctgcccttcagcaccattgccaagcactacagttggagcacagccttctgggtggctgaagtgatttgtgcggccagcacggctgccttcttcctcctacgaaacatccgcaccaagatgggccgagtgtccaagaaggctgagtgaagagagtccaggttccggagcaccatcccacggtggccttccccctgcacgctctgcggggagaaaaggaggggcctgcctggctagccctgaacctttcactttccatttctgcgccttttctgtcacccgggtggcgctggaagttatcagtggctagtgaggtcccagctccctgatcctatgctctatttaaaagataacctttggccttagactccgttagctcctatttcctgccttcagacaaacaggaaacttctgcagtcaggaaggctcctgtacccttcttcttttcctaggccctgtcctgcccgcatcctaccccatccccacctgaagtgaggctatccctgcagctgcagggcactaatgacccttgacttctgctgggtcctaagtcctctcagcagtgggtgactgctgttgccaatacctcagactccagggaaagagaggaggccatcattctcactgtaccactaggcgcagttggatataggtgggaagaaaaggtgacttgttatagaagattaaaactagatttgatactgaacactgtcagtgattcattttttcaaagtgagacagcttccttgggaaatattgtcaatacctgctctttccaccccaaaatggaaagacttcatttccctggaatggggaagctgaagtgtagatggactcctttaaaactcatgcctcctctgccttcacctgaacattgaatagttcaatgattattttagagataaagctattgggttgtggacagattaaataacttgatggagggaa

SEQ ID NO: 404 - DNA, 6765 bp, Homo sapiens
  source 1..6765: mol_type = genomic DNA; note = NW_009646203.1:c52476-45712 SLC37A4 [organism=Homo sapiens] [GeneID=2542] [chromosome=11]
gtcctattcgggctcccgcctctgttcaggtaggaggcggtatgcgggggaggggagtcacctgagggcggggatctcaggtcttggggagccattgttggcgaaccccaacttccgatacgacccggagctgttcctgcagttccagagacaattcatgggtcttggggccaccgaggcgctgtccctgaccaccagcacgagacccctttctatcgcgccagtcctgtggtctccgcacctctccagctcctgcacccccggcccccgtggttcccagccgcacagtagcgtgtcctgggtagcgtgaggacccacggggctgggcaggtgccacgagcccgccgcctcttcgccgcccgccgcctctcctcctctcccgcccgccgcctggccctcccctaccaggctgagcctctgggtgccagaagcgcggggcctccgggagaatacgtgcggtcgcccgctccgcgtgcgcctacgccttctgctccagttgctttcccaattgagcggaaaagccggggcatgttgccggggccctgggcgggacggttgtgccctgcagcccgaagcccgccggggcaccttcccgcccacgagctgcccagtccctctgcttgcggcccctgccaacgtcccacaggttggaaaccagaccctgcagcccccagctagcccgaaggaagcccagactgacgtcgcagggtaatggggacccagaggtagctctgtggggccccatcaggacctcagcccttagcggggctttctgtgtgacaccgtgggacctgaactggggaggtcccccttgcacagaattacaaggggcaactgtaggaaacaattaaatctattatgtgctaagtattgagagttccacggattgaggccctctctagaaggcttagaagtggggtagccggggtatgtgtctgactttgtgttttggtgcggtggtggtgagtgggtgtagaaactaatagtgccaagtgcagtgcctgtcaactagtaagttaataaaccttccgtgaatgaatgagaaggttctgtgactgagggagcagggctagagagggcatctctgctcatcccacccctgcctcccctgggctcaggcagacaaaagtaattaggttgaacctttaatcaaagctggtttcacaggcaagcagacatgatagaggaggtaaaggcagaaatcctggggacacagggtgctggcctggctcacaggcatgcctccttccgggacctcctccaccccctacagtttggcgctcagtaatctcttgttttcttgtctccctcaggacactgggtccccttggagcctccccaggcttaatgattgtccagaaggcggctataaagggagcctgggaggctgggtggaggagggagcagaaaaaacccaactcagcagatctgggaactgtgagagcggcaagcaggaactgtggtcagaggctgtgcgtcttggctggtagggcctgctcttttctaccatggcagcccagggctatggctattatcgcactgtgatcttctcagccatgtttgggggctacagcctgtattacttcaatcgcaagaccttctcctttgtcatgccatcattggtggaagagatccctttggacaaggatgatttgggtgagccctgaaacagcagggtggtggacctggggacacagaaccagccagacacactgggtgtttgtgtacaggcatgtggtgtgggtggattgtctgcacagtagaggccaggggccagtctgcatatgccagataaagaagctctgagatccatggacatgggtgcctgcggggctaaggagggctgcttatttgacgtgtgtgtgcatgccctggaggcactgtttattccgagagtgtttgaggggcttctgagcatggttttcacacctgtgtgggtgcatgtggaggcttcagggtgagtgctggctactgacactgtgagcactgggaactaaaaagttggcacaacgacttcatgtggcctggcatgctacccttcaggagggacaaggtccctgactccaatcctgagccctttgccccatgttgggtggtggagcaacagaactgctagaggcccgggactggcatccagagtgaggtgggaaatcccatatgcaaatcccagggagggggaactgccacgtcctgctccctttttgttccctgacaactgtagctgagaatcatgggtcagtctggggctagtgccgatggtgaggcaggagaagtggccgaagtagtagggccccatgagtgtcagattgcagcacaggctcctcctgttcctctgggaagtaacctgtctcaccccactgggcacccctgcacacctgaccccatgccttctttcattgctcctgtgtttctcccctggtccctaacccctaagtgtaatgttccctgcagggttcatcaccagcagccagtcggcagcttatgctatcagcaagtttgtcagtggggtgctgtctgaccagatgagtgctcgctggctcttctcttctgggctgctcctggttggcctggtcaacatattctttgcctggagctccacagtacctgtctttgctgccctctggttccttaatggcctggcccaggggctgggctggcccccatgtgggaaggtcctgcggaaggtgagtgcttccaaagagcctgtttggattgtcatagaggatgcctaaagagcatgtgggagcgccctttcttacccaccacctccacacccaacccagagcaggttcctgagcagttcctggccagctcctattgcttgtcaagatattttaggaggctgagagtggtgggatcaggtggcagaggaggaaactgccctgccaaacagaagcgccctctccctcttccctgtaatgtgagcttctggggctgccccatctgaccccaccctcaacatgggcagtaggctggacacctacgtgtcgccctctgccccacagtggtttgagccatctcagtttggcacttggtgggccatcctgtcaaccagcatgaacctggctggagggctgggccctatcctggcaaccatccttgcccagagctacagctggcgcagcacgctggccctatctggggcactgtgtgtggttgtctccttcctctgtctcctgctcatccacaatgaacctgctgatgttggactccgcaacctggaccccatgccctctgagggcaagaagggtgagcccccacccagaccgaccactggggcactcatttagcaggcagatgtttgttgaagactaggcgtttgcccggtcctgtgctggtcagtggatgtgggggaagaggtggtgatgtaggctgcatgggtagcaaacacaaatccatcccaagaggcagtcaagtactggacaagcggcagagccagcaagtgctgtgactcgttattttctggcccttcctcacaacagcacagacttccctgtcctggatagatagaatcatgagctttagtggcttggtcctgtttgtctttcattcattgagcttggtccttaagtggcttggtcctccctggtcctgtttctcattcattgaccttgcagcggagagggggagaggagagcagtggggtgagggaatacccttcatgctgatcctggctgtgcagatggactctgcccctgtggctggttaatgaatgttgggggttcaggttggggagagcagtcagggcagagcctgacgcccagccttttcccacctccaggctccttgaaggaggagagcaccctgcaggagctgctgctgtccccttacctgtgggtgctctccactggttaccttgtggtgtttggagtaaagacctgctgtactgactggggccagttcttccttatccaggagaaaggacagtcagcccttgtaggtaagatgagcatggggacaagggtgggcataaggagcaggaaccaatgcaggggatgcaaattcaggccttgcttccatttatcctctttattcgttccttgaggccgggcgctactcaggcagctatggccagtcacctatgggaaccctgtacctctccaggtttaagccattgtgggacaaccccaatgtgtaacaccctcccacccttcccttccctcttcccaccacaactccctactgcaggtagctcctacatgagtgccctggaagttgggggccttgtaggcagcatcgcagctggctacctgtcagaccgggccatggcaaaggtgagcgggcagaagggacaggaaggagaagggtccctttcagtcttcacggcgtggctgggacaggcactggagagatgggagtcccagggcacaggcaggttggcatctgctggtttagaccgggtgaagagggaatgattccaggctggtcttagctttcctacggttgtggaagtaaggctcttgggtagagttttaactgatgtgaaggacagccagaatatttcttagcttagctgtaggttgctccacagccccaggaaaatgggctgggaacagactaggtgccctccccagcacgtgtcctagtcctgcctgacgggggaggaggggatgttgtagagtttggcctcagaatgtaatgagcaggtcccagggcctcccagagctgcccagggccaagaactgtggtgggattgccaaagacccgtcagcagaggccctgctgtgtcagagtccaggggtgggtgttctctgccctgttctgaggacgtgacattgccgggactgtatccataggcgggactgtccaactacgggaaccctcgccatggcctgttgctgttcatgatggctggcatgacagtgtccatgtacctcttccgggtaacagtgaccagtgactcccccaaggtaattaagaaaggcctggctcacggcagggcacaaggagagaacgcaagggccactgactctgtctccctctcctggcttcagcctgggccaatcttttcttcgcctctcagatacccttttcagttctgattggaccgttcctctgtgtctgggttctcctcctccactctgggcctggttttcttttcttccctgtgctcctctaggatgttgctttctggactctggctcttcaccctctcgcggagctcacaggctttacagagcatgaggtgccttaaagatatctctggtttttctcctggtctgtctcacctttgtcctacccttctgccttacccctagccaatccagtttgtgtaaatcctgaggacagcctctagctcagagggatgacttctgtacctcctttccttgcccacctaggtccctgggtttgctcaatgtggcatctcctactctagctctgtattgtcagttgtgttggggagtggaaggaaaagaatcacttacttactgtccttttatgactactgtttgtttctggggaccaagccttcttcttgctttggcaggggtgggtaggcaggtcggctttccgactctgaatgccactccactctgcccttggcagctctggatcctggtattgggagctgtatttggtttctcctcgtatggccccattgccctgtttggagtcatagccaacgagagtgcccctcccaacttgtgtggcacctcccacgccattgtgggactcatggccaatggtaagtgttaacttctagagtctctccctcacccccacctgtgctttgcatatagaccagtgagaagctggagctagcaccactggcttaggttcttccctttccccctgacagtgggcggctttctggctgggctgcccttcagcaccattgccaagcactacagttggagcacagccttctgggtggctgaagtgatttgtgcggccagcacggctgccttcttcctcctacgaaacatccgcaccaagatgggccgagtgtccaagaaggctgagtgaagagagtccaggttccggagcaccatcccacggtggccttccccctgcacgctctgcggggagaaaaggaggggcctgcctggctagccctgaacctttcactttccatttctgcgccttttctgtcacccgggtggcgctggaagttatcagtggctagtgaggtcccagctccctgatcctatgctctatttaaaagataacctttggccttagactccgttagctcctatttcctgccttcagacaaacaggaaacttctgcagtcaggaaggctcctgtacccttcttcttttcctaggccctgtcctgcccgcatcctaccccatccccacctgaagtgaggctatccctgcagctgcagggcactaatgacccttgacttctgctgggtcctaagtcctctcagcagtgggtgactgctgttgccaatacctcagactccagggaaagagaggaggccatcattctcactgtaccactaggcgcagttggatataggtgggaagaaaaggtgacttgttatagaagattaaaactagatttgatactgaacactgtcagtgattcattttttcaaagtgagacagcttccttgggaaatattgtcaatacctgctctttccaccccaaaatggaaagacttcatttccctggaatggggaagctgaagtgtagatggactcctttaaaactcatgcctcctctgccttcacctgaacattgaatagttcaatgattattttagagataaagctattgggttgtggacagattaaataacttgatggagggaa

SEQ ID NO: 405 - DNA, 768 bp, Homo sapiens
  source 1..768: mol_type = genomic DNA; note = NC_000009.12:c34662657-34661890 CCL27 [organism=Homo sapiens] [GeneID=10850] [chromosome=9]
aaggaagagtctaggctgagcaacatgaaggggcccccaaccttctgcagcctcctgctgctgtcattgctcctgagcccagaccctacagcaggtgagtacttgggggtatagaaagctgggggtctgggtgaatgggatgaagttgaaaagacccaggaaatccaacctaacctccagctgtctggcagagaggttcttggtcaggatccctctgaacacatggccctgttgcccctagcattcctactgccacccagcactgcctgctgtactcagctctaccgaaagccactctcagacaagctactgaggaaggtcatccaggtggaactgcaggaggctgacggggactgtcacctccaggctttcgtgtgagctcccacccctgatacccctgactctgacctcagtcccaacccctaatgctgatcccaaccccagccctaactgctaattctgttgccaactcaggttttcatctggtccttgctcctaacccctaattagggtcattggggatgaccctaatctcatccccaagctatggtcatagctttggacctttctctacccaggcttcacctggctcaacgcagcatctgcatccacccccagaaccccagcctgtcacagtggtttgagcaccaagagagaaagctccatgggactctgcccaagctgaattttgggatgctaaggaaaatgggctgaagcccccaatagccaaataataaagcagcattggataataatttctgagtataa

SEQ ID NO: 406 - DNA, 9516 bp, Homo sapiens
  source 1..9516: mol_type = genomic DNA; note = NC_000012.12:c8066359-8056844 C3AR1 [organism=Homo sapiens] [GeneID=719] [chromosome=12]
actgtggctaagtgtggggaccagacaggactcgtggagacatccaggtgctgaagccttcagctactgtctcagttttttggtaagaaaacctagacctacctgatgacttgtgcttagcctgttttgctcattataggtaatgagtttgagtgtcactatcttctatttcccctattccttctctgactttgaattcttttatcttatctctatgtctaacttcctttttctaaatattccacattgcatttgtctttgcttttaatattttcatagtggaattaatagtgaatttttacatcatttctttcctttctttgaattggctatgtatttcaccctgaactttgattccagctgtccccattaatttgtttttcaaataattgattgcactttttttccctttccatttcctctttcttttttttattcttttgcccattccttattgctactgactctgttatcctattactacaatttgattctggggtccacttttctttctctatcacagtggaattttagtttcaggatattaattacctttaaattacggctggtcaacttagtaataattttttttaatcctctactaatcttaaacacataaaggtatggtatttttagccaaattaacttgaagaaatgtaaaaagtaatcttgctctgcaggactttttttttttttttttttttttgagacagagtctcactctgttgcccaggctggagtacagtagcatgatctcagctcactgcaacctccgcctcccaggttcaagcgattctcctgcctcagcctcctgagtaggtgggattgcaggcacgtgctaccacacccagttaaatttttttgtatttttagtagagacagggttccaccatgttggccaggttggtctcaaactcctgacctcaggtgatctacccgcctctgcctcccaaagtgctgggattacaggcgtgagccaccacacccagccttgttctaaaggacttttaatccctgactcctacatactttcatttcaaaacagataataacaatatttaacatatagctcatgacagataactctatttttattaaaattttgctgtttgcagtccctgctacttcagttcatgcagttctcggcagcttcccctttattagcaataccatatatctttttttttttaatgtgatttttttttttttttggtagtaaaaacagcatttgcctaacagtcctcggacctgaaatccaagaacctccctagtaatgattatatgcttgtaatctaatttgctgagtttcactgtcaaacttgagaaataaaagcagagaaaacgtaggctgggcacagtggctcatgtctgtaaccccagcacactgtgaggccaacatgggaggattgcttgagtccaggagtttgagagcagcttgggcaacatagcaagaccctatctctacaaacaaacaaacaaacaaacaacaacaacaacaacaaaatgaggagaggagagatgattaccaagttttctttcagccctagcatcccatgactctattcttctctcaatattttaggggggtaccgtgatagtatttaaatatctgagtagacaaggccatggaaaggggaatgagaataatttcttcttctttttttttttttgagatggagttttgcttttgttgcccaggctggagtgtagtggcgcaacctcggctcaccacaacctctgcctcccaggttcaagcgattctcctgcctcagcctcctgagtagctgggattacaggcatgtgccaccatgcccacctaattttgtatttttagtagagacagagtttctccatgttggataggctggtctcaaactgacctcaggtgatctgcctgccttggcttcccaaagtgctgggataacaggtgtgagccactgtgcccagcccatgtcttcttttttattattttgttgacttgctattttaacttctgctaatcatatgaggccctatggcaatatttggctgactcagcagaactactttcaagtcacaaaaatattttgagcctctataaaagtaaaatgttattttatccagtaaaaattaggaatttcacaaaaagaaagttaaaagggacagcatgggaattaaggaagaggcctgggtaaggattacatggatacaaattagaattttagatgtaattgcaaaagaaaaaaaaagtcaacccccaaaatgggcatccatctattcaagtaattttttttttctttttttttcttttgagacagagtctctttgtcatgcaggctggagtgcagtggtgcaatctcagctcactgcaacctccacctctccagttcaagcgattctcgtgcctcagcctcccaagtagctgggattacaagtgtgagctaccacacccagctaatttttgtatttttggtagagatgggattttgccatgttagccaggctggtcttgaactcctagccccaagcgatcttctcccctcggccccccaaagtgctgcgattacaggcatgagccactgcgcccagcctttccacataatctttaaccttggtgtctcataaggcattatgttaaattatgtgaaatgagcatttatgaataagactcctttttaccatcataaagtttaaatccagaataatagattagacagccattataattattgtacaagataaaatgtgtcattgcatatagaatatgaaaaaaaggttcaaacatgcgcacacacacaaattaagaagctgaagacttggtgaagggcataattccagatagaagtaaacagcattagccatggaacggaaaatggcattaagttggaatagtgaattgttcaggaaagctataaagcagggtacatttacgagcatgttcacagttaggggaaggtaatatcacagaggccaagagaagagagtgttaagaagtcagtgtatctaatgacacatattgtggaaggtgactgagaaacaaacgtttggatttggtttttagaagtaattttagcagaattatggaagcagaagatacattacaaagaattaagaagttggtggccggccgggcctggtggctcacatctgtaatcccgggactttgggaggccgaggcgggcggatcaccaggtcaggaaatcaagatcatcctggctaacatggtgaaaccccgtctctactaaaaatacaaaaattagccgggcgtggtggtacacgcctgtaatcccagctcctcgggaggctgaggcagaagaattgcttaaacccgggatgcggaggctgtagtgagccgagatcgcaccattgcactccagcctgggagacagagcgagactccatcacaaaaaaaaaaaaaaaaaaaaaaaaaagggccgggcgcggtggctcacgcctgtaatcccaacactttgggaggccgaggcgggcggatcgcctgaggtcgggagatcaacatcatcctggccaacatggagaaaccccgttctctactaaaaatacaaaaaaaaattagccgggcatggtggcgcatgcctgtaatcccagctactgggaggctgaggcaggagaatcacttgaacccgggaggaggaggttgcagtgagccaagatcgcgccactgcactccagcgtgggcaacaagagcgaaactccatctcaagaaaaaagaaaaaaagaagaagttagtgttcagaacagtaggcgtaggccccaaaacaaagcagtatccttgaaaaagagaaattatgctaaattaagagacttaagaagaaagtgcgatctgaagtagatattgtcgtggacaagccagctataaaagatgtcttagggacagttgaaaaataatcatataaaagggggggcatggtggttcgtgcctgtaatctcagcacttcgggaggccgaggaagaatcagtagagcccaggagttggagaccagcctgagcaacatagcaagaccccatctttacaaacagaaacaaaacagataaaggtcgggtattccttatggtacatattgtataatgtggagactgctaactgaaaaaagaaaaaaatgtataaaaaatatgtatttacacccatgttcattgatgcataattcacaatagtcaaaaggtgaaagcaatccagatgtcctctgtggaatgactggataaacaaaatgaagtatagacctacaatggaatattattcagccttaaaaagaaagaaaattctgacccatgccacaacgcggaggaagcttgaagacattatgctaagtgaaatacaccagacacaaaaagacaaatactgtgtgattccacttagatcagatatctaaagtagtcgaattcatagaaattgaaagtacaatggtgattgccaggggctgagaaaaggagaaaatggggaattctttcctgagcacattttcagttttgtaagatgaaaaagttctgaaaattggttgtacaacgtgaatatggtaaacactactgaactgtgtacttaaaaatggtgaagatggtaaatgttatgatacatgtgtttggcaattaaaatttttttgttagggccaggcgcggtggctcgcacctgtaatcccagcactttgggagggagaggagggaggatcactcgagcctagcagttcaagagtagcctggccaacatggcaaaacctgtctctgctaaaaatacaaaaattagttggtacgttggtgggcaactgcagtcccagctactcaggaggctgaggcacgataattgcttgaacccgggaggcagaggctgcagtgagccgagattgtatcactgcactccagcctgaatgacggagggagattctgtctcaaaaataataataataataataataaataaataaatgaagcactgtcccacatattagaaggcttctagccatcacagcccctgctgtctaaagatacgcatgtgtatacctaaatgcacacacacacataaaaaaaggtcaagaggatataaattcaggtgctaaaataataatcactgactagtgagtatatttttattttcttttttgtttgtctatattttccaattttcttcatgcatattttttgcttttgtaataataaagctcttttcccaagttacggtcataaaacacaaataaataagaaagaaatgataggtagtgaggaagtcaatgcagagggccaacaactcttggaaaatttgaaagcaaaaggagatggagttgtatctaaaagacatcgctgagtctagagtacctctttctgtggcggcgagtcctctgaaaatctggtggggagagtggatgaagcttctgccctcagagaaatgagaatatgtaaagttgaagttttgcatatcattttaggtggtgatggaacttcctaaaaccctttcgtgacctcaggttggagacctccagtccagatatttttgtgtgtttacttatttagcttatttgtttatttttaaacacactgggtgaagaaaggagccagtggaaaaaccaagattgaaagtacaagaaagaggagaaatttacactaatatggacttccagatgaggctgtgattttgatacacacataaatcaatacagtagattttaaattgtctatcataggatgggcatggtggctcatgcctataatcccagcactttgggaggccaaggcaggcagatcacccgaggtcaggagttcaagaccagcctggccaacatggcaaaaccccgtctctactaaaaatacaaaaattagccaggcgtggtggtgcacgcctgtaatcccagctactctggaggctgaggcaggagaatcgcttgaactcgggaggcggagcttacagtgagctgaaatcaatccactgcactccagcctgcgcgacagaggaagactctgtctgaaaaataattaataaattaataaataaatataattgtctatcagagaatgcttttatgtggtcccgtgtgaggtgaaggaaggcaaactaaaacagcgtgaggaccttctggtttcatgatcccacatctttatgtgggaagattagaatcctaagaatatgtatgcattttcaaaaagatactgtttgttttaacatttttttcatctttttgcagaagtttagcaatggcgtctttctctgctgagaccaattcaactgacctactctcacagccatggaatgagcccccagtaattctctccatggtcattctcagccttacttttttactgggattgccaggcaatgggctggtgctgtgggtggctggcctgaagatgcagcggacagtgaacacaatttggttcctccacctcaccttggcggacctcctctgctgcctctccttgcccttctcgctggctcacttggctctccagggacagtggccctacggcaggttcctatgcaagctcatcccctccatcattgtcctcaacatgtttgccagtgtcttcctgcttactgccattagcctggatcgctgtcttgtggtattcaagccaatctggtgtcagaatcatcgcaatgtagggatggcctgctctatctgtggatgtatctgggtggtggcttttgtgatgtgcattcctgtgttcgtgtaccgggaaatcttcactacagacaaccataatagatgtggctacaaatttggtctctccagctcattagattatccagacttttatggagatccactagaaaacaggtctcttgaaaacattgttcagccgcctggagaaatgaatgataggttagatccttcctctttccaaacaaatgatcatccttggacagtccccactgtcttccaacctcaaacatttcaaagaccttctgcagattcactccctaggggttctgctaggttaacaagtcaaaatctgtattctaatgtatttaaacctgctgatgtggtctcacctaaaatccccagtgggtttcctattgaagatcacgaaaccagcccactggataactctgatgcttttctctctactcatttaaagctgttccctagcgcttctagcaattccttctacgagtctgagctaccacaaggtttccaggattattacaatttaggccaattcacagatgacgatcaagtgccaacacccctcgtggcaataacgatcactaggctagtggtgggtttcctgctgccctctgttatcatgatagcctgttacagcttcattgtcttccgaatgcaaaggggccgcttcgccaagtctcagagcaaaacctttcgagtggccgtggtggtggtggctgtctttcttgtctgctggactccataccacatttttggagtcctgtcattgcttactgacccagaaactcccttggggaaaactctgatgtcctgggatcatgtatgcattgctctagcatctgccaatagttgctttaatcccttcctttatgccctcttggggaaagattttaggaagaaagcaaggcagtccattcagggaattctggaggcagccttcagtgaggagctcacacgttccacccactgtccctcaaacaatgtcatttcagaaagaaatagtacaactgtgtgaaaatgtggagcagccaacaagcaggggctcttaggcaatcacatagtgaaagtttataagaggatgaagtgatatggtgagcagcggacttcaaaaactgtcaaagaatcaatccagcggttctcaaacggtacacagactattgacatcagcatcacctagaaacttgttagaaatgcaaattctcaagccgcatcccagacttgctgaatcggaatctctgggggttgggacccagcaagggcacttaacaaaccctcgtttctgattaatgctaaatgtaagaatcattgtaaacattagttctatttctatcccaaactaagctatgtgaaataagagaagctactttgtttttaaatgatgttgaatatttgtcgatatttccatcattaaatttttccttagcattgtctaagtcttccagattccatttaaaaccatttcttgttctcctacgtgagtgaaagatgatcatatatcctaatgctttgttgtcgtgtggtgttgatggttttaaacgaaaagaaagtgcaaaaagaaaatgcctgtgaagacaagaagccatgagactgagtctggagcatagggttatgcaatgatgcctgtccctgggaacacccctgggtacaggatatagaaatttccactattacatagagtttccactattacaactaaataagcatctattgtgtgaaaactgactcatgaaatgttatgaaagctgtggtttggggagttctgtttcttctaactgcctaccggttgggcacctattttccactcctcttcctaagctccttaatttccttattactccccagcctccaaatcttccacatcagactttgtgcctcaaacaacctctaatttcgtaagattctagttactcccttcctcttgctccaaatgaatactttctaagaaagtatttcaagtggaaggagaaagagggtggaggatggagcagcaattcttctactctctgcaactgagtaccctaccaggcttgccatcacattttaaaacatgacgacaggcaacttacatgccaaaattaccaaatatatcttctgggttttttaaatccttttctttgccaaagtaatacatgcacatagttttaaaataatttaataaggtatataatgaaatatgaggtctcctacctcactgtgcccaaaagttccctcctcccactctcatttcccagagataatccttgcacaattttagatgtttcctttgataattatcatgatgtttctaaatcatgtgcttatgctgctcttttctggaggcatgataaaacgacttcttgttttgaaagatgaagatgtttatccaagcaccccatatttttaatttgtttatccagcatcccaacattcattaataaccatattttaattcattcatgaccacatatttttcttctactttgtctatacactccaaccatttatatagctttccttctgtccctttttcatttaaaacaaaattacctaactccctaccaccttctcatttttctgtatatataaatgtttgtgtcaaacgtctgaaatttctggcttgtttgtatcacaacgtggcctcatctaaaccaaatacaatgatgtagtctaaaaacagaaaatgacatgtgttttagacctgcaagacactatctgttcaatggctgaggtgagggtctggactacagattttttataaagtatatgcagaaaaattacaaatcactaggaattctttcagttgtgaagaatgtctgacataagatttgaagtgctacctttccagcttatatattaatttgcttatatatttgatatgaataaatgctttttttctcatgggtccttgcgaggctcagagatttatgaa

SEQ ID NO: 407 - DNA, 55215 bp, Homo sapiens
  source 1..55215: mol_type = genomic DNA; note = NC_000019.10:c40285531-40230317 AKT2 [organism=Homo sapiens] [GeneID=208] [chromosome=19]
gcgcaggcgccctgctgtgagcccgcctccttctctgccctgctcttgcgctctcgctctctcagagttcgtctctggctctttgtacgtcacttcctgtttgtggcgcgagagggcggtatttccgtccagagggtgggagggggcggtaagcgggggctggggggagggggcggggggggccgcgccgtgctagccgttgggcctgcctcggaggaggcgtcgccgccgccgctgccgctgccggcgccgttgccgctgccgggaaacacaaggaaagggaaccagcgcagcgtggcgatgggcgggggtagagccccgccggagaggctgggcggctgccggtgacaggtgagtgcgccagcgcgtgtccccgaacgccccccccacgatggtcgcgtccgggccccccgcggtgccgcgatgggctgtaccacccgtgcccggcggggggaccgcggccctcgagcccctccttcaggagctgagtgggggtggccgagcgggggcggtgggaccagcctcggggggccggggcggtggcggcgggccataccactgaggcggtggggggagcgctgcaagtttgcgggacggggagcgcaggccgcagcgtgcgcgggccgggggctggacctttcgggcgcggcgggcagatcgagcctggcgtgcgcgggctaagctatcgagggggcgcgccgcatcaagtgtagagggctgtacctttttggcgctgtggaagccgttgctgtgctgtatttacaggggtgggggcttctggggaggatgcttccccaactgtggctgggttatatcaccacggcgttgggggagccctgcttagaacgtaggggaacccaaatcagaggactgtgatgtttgtgatctttaagggactgggacggggcgggacaggccctagtgggttttaggggcgtattttgggaggactgtgatgccgattggtgaggaggggtttctgtttcctgtatttgacgtgtgtggcgttgggggtttacactgatctcagcctttattgaacttcttaacgactctggagggaacgtcatggttactggggtgctttggaccatggaggtgctgctctggattccattaccctctcagattatttaccaggcagtaacagttctttccttccataggggagggaggaaagctgtgttagaagtcactgaagttgtctgagccttaacattctgaagaggaagagggattgggcttggatttgaggagccgtgcccctgcacccgcttgttaaaacttgggaggaaggagtgtttgggggaacacctcttccccccagggaagctctctgggggcatcttgatcttgggattgtgaggacctcttcctctcatttggagacctcttggggctcagcaagacgcctgggctggagtaactagagcctccaatgggctgcttttcaacttcatccactcctaccttcccagagaagcagcaggagttcactcgtgggctgaacttggttggcagtggatgtgaagggtccaggaaccaacgcagaccactacatgctcctctgtcgctggccacgaagctgtttgtgtctcccagttaccagctcggtcacacatcatgtttacactccccaccaaggcagtaacagttggccttgcagtgaggccgggagctgttttcccagctgttcctctttgcataggccaaggggacttggagtgggggtgcccctggcccagcctggcccagggaggaaggctgctctgaagggcttgggacagtcagatcccccatggatctggtgtcttattgtggtctgtgggctggtgctgggagcagccagccccagaggtctgtggccagtgtccctgctccctaggccagatcatgaccttggcttgccctgtagcctttgctctgggtctggagttcccagaggactggctgcagtccctgattgacccagcagacctgggctggtgatgtggtcagagggggcagatggttgcccctagtccgcagcagtgacttccaagctgactggcttccgtggctcgtggttcctggagagaaaggtcccacagtctgtgaggcagcggcgactctgtagaatctttctccactaggggtttgttcctctggtcctctcctgccagcttttagagggtttgcctgatggggctaacagtggcagtgaaaacagtaatcatgaaattgatggctgacagtaactgagtgcattctgtgggccacacactgtttggaatgcttcatatagataaacttgctgaatacttgaattctagagcggtaggcgctgttgttatgctctcccttttagatgagaaaacagcatctcagagaggcagatcatttccagagctagtggatgcccagtgtttatagcattcaccccatgccaggcgtgtgacagggcttttgtacatgtgatctcacttaagtctcaaaacatacctgtggttaggcctattttatggagagctacgagctagttagaagtgtgataccattttacagatgaggaatcatttcactcactgtgaagtgcaaagatttcccagaggtctcatagctgaagtgggagaggtgtgatgtgagcccttggccaaccttggcctcagatcgtcttgtcaaggagaaactggaggagtggcttttgtctgtgagcatatactctgcccagccctgtgctttgggctttatatggtatttgtgtccttttttgcagagtccgaaattgaagttcagaggaagaattgccttccaccgcatcttatcagaccctatgggtgccagggtaggatttgaacccaggtcactgagcccctagtgccatgcattccttgctcaccaggttccaggctgggtgaaaggaaggaaagacataggatagagtcacctctgtcctctgtcctctacctatagaggtgactgtcctatgtctttccttcctcttacccctgagcctcaggctgccctgagcatctctgcctacagccagtccagcatttcttggtccctcctcagagtggaggcaaggcatcctttaaccctgggcaggtgtgtgctgggagaagaagacagcaagagagccatgcagggggtgacacagctaccagggacctgcgttagctagcagcaggacggtgaagtcggttctagctctgcgaccttggaccacactgttcactcccatacagtggtctcagaaggacgtccaccttgggctgttgtgaggattaaatgaattaatccacgagaagctcctagaatggtgcctggtactgtgtaagtcttggttggcagtcatgattatgttatggaacggaggcatccagcctcccccaccccctacttttggtcccctcgagcattccgggatccagctccccagcctggcccagctaggatccagaacttcaatgttctggtttccagcctctgtaaagaggtgtatggaagcgagtgagagcacagggttcaaatccagccgtgccactccatggctgtgtgaccttgagcaggctccccaacccttgtgagctcatttcatcatcggtgccatggggatgatgataattcccacctgataggattattgtgaaggctgagtggattaatttgtgggaagcattcataactgttctggcatacaataagcctaccggaaatgtctcctcactaagaacagtgcccgacacatggtgagctgttggtctgtcttagcaattgtaattcttagtatttctgccgggactttgaaggcctttgccagttcacagaaccgtgtcagagagcactaggaggagatcagggctgaaattagcatctcagttttacagatgcagaaacagaggtcgggggagacatgcaatcaagtcagaactgacaagggcagctcccgggcccactcctcttccacgcagtggctttgcagccctgagcgcctccaaggtagacacactggagtcttttcagaggtcaggctctgtgcttgtttttttttttcttttgagacagggcctccctctgtcacccaggctggagtgcagtggtgtgatcacagctcactgcaggcttgacctcctaggctttagtgatccttccacctcatcctcttgagtagctgggactacaggtgcatgccaccatgcctagctaatttttaaattttttgtggaaacgggagtctcgctatgttgctcaggctagtcttgaactcctgggctcaagtgatcctcctgcctcagtctcctgagtagctgggaccgtaggtgcatgccactgcccctggttcccagcccaccacagctcacagctctgggagtggcaggaaggctgggcctgggcagggggagcagcagaagtgcctgcaggggttggcaggggctgtgctgcactggcctgtgggcctgggtgagaggtgaggatggatcctaagggtattgtggagccgaggaaaaggtttcactcatccgccaccatttactgaacacctcgtatgtgccagcgttgcatcagtactgggaatacagcagtgtacttgccaaagtccctatccttgtggggctaagcaagaccaacccgaaacaggttaataagcaaggagccggttagagggggaggagctaggcagcgaattcaaatcaggtgacagactgggcacttctttagatgcatgcggctgtggggagggcctctgagctgatcccagtttggcaaggtgaggcagtcatgtgggatgggaggagaaggaacagccctccaggtggagggaaccacagtgcaaaggtctgaagggaggacagagcttggtgaggtgcagggacaagcctcacggaggcctgtgtggcttggcagagcgagggagcagggaggagatgagtcctggggctgcggggcaggcagggccctttcactgggagccttgtggactgtctgtgaaggagtttggaatttcagcaggaacagcctggtcagattcagggtgttagcaggtgacccaggagccggtcacaggctcctgcctgggggcgtgggtagatttgactgagcggagcagggcgtttcacaggcctcccacttcccctccagtagcatcactgccttacagccagcaaaggcctgagggttgcctccctcctgtggttttcacaccgtgttctccagagcccgtggctgttacttttagggaaagaggaggggaggctcattgggctgatttctctgcccattcctccccaacccaaccagccggactaatactgaatagcaacgcagggcagcagtcacacctgatacagacagcacccgctgaccctgcgtccacgctgccgtgggcctgtaggcctgcgccattcccagtgctcctctggaattggaaagaccagggcttgtgactggcgcccagcacccaggtctctggttgggctcaggtgtggttgatattacgaaggcaaaataaatgagggccaggttgagagtgtgggcatgtttctccactatagctgggtgatcagggaggacctccctgaggaggtgacgtgtgggtagggactggagtgctgtgagggagccatgggaggatctgggtgaagacccattagacccaggaggaatcttctctgattcccgctttacaagtggtgagaactgaagcctggagagcctctgtagcttgtgctgagtcccccaaccaggaagtgttggggacaggctatgaatctgggcttccagagattcccccaccacagctcagtagcccctggtgagtgtgacttctgatcccacccatgggctcacccctaaggcttggtgcgggagcaggcgctctggcttttttttttttttttgaggtgtgttccagggtatcttcctagaaggagcagaacccctcagaacaaaccactagggtctccagaaggcccccgggatgggttgggatggaaaggagtgtctttcagacttgagctccaagcccctggaggacccagggtcacccctccccgggcctctcttcagcttcccagagctctcagcggaaggccctcaaccacaggcctccgggccgcacggtggggtggttccatggcaggctcttctggacagccagccaagcagcgagaggcccagctgggggagacagcctgggagcaggaccaggagggagggagtgagtgtgggaggggcgctgggtgggagctcagcctggcccccttggggcaggacccactgccaactcggcacccacagcagggcccaggtgctctgactgtgccgagcgagggacagcaagccgggtcggccaagaggagactgcatgtcagaggtcccagcaggagtttcttcagcccagccgtcctgctggagaagctcgttcgcagatgttgtttctaagggtgaggccagaaacccaagtcttcctcggtttgccactttgtgggccctttccgaatgggctggggcagttgccgctccccggttctcttctccagcctggcttcaagttcttcatggtctggtgggtttttggtgtacacttacccagctggggctgctgagtgacctggtcccgggggtagctgacgtgggtgagaaccctgctcttggcacccctctcggtggctgtggagctctggggccttatttcttctccctaaggtgcattttgctcagctgtaaacgggaaccttcctgctgagtggggcggtggggaggatgcacggagctgctgcgttggaaagcacaggcctcctgaggaggcggcgggatgaatttgggctgatgctactcctggtgattgccagacaggactgagggcacctgagagcacagaaggggctctgcagggcagtgggcacaggctcgttgttggtccttgggagagagtggtagggcctgttagctgatgggagggctccagacaggaatgtgaatcactcccaccactgtactcctgcccaaccagacgctgcatattagctctacaaacctgcacagcagcctgggaggtgggcagtgttagcactcccatctcgtagataggaaactgaggcccaggaagccacatagaatattggggtcattctcgtgagtagttcgcctctcagtgctgggcactgctgcagagcttaaggtgtctgctctcactcatcctcaccacagcctggcagctcgctgtcccgatcgtccccgttgtacaggggaggaaacgggcatagagaggttattggatttgctggaagtcagtaataggcatgatggttgaaccctgctctgtcggcgaagctgccttttgaagacagcctcatcttcttgccctgcctgctatgactggagttgtcactgttgtcatcatgatttcttttctgctttctcttctcctagacagagctggcacaaagtaggcctcagtaatccagaaatgactccattccatgcctgcttgggatgtggggtgtggctgcttctctccacccccaataccatgaccttggcccctcccaaggggggcccagggggaagagatgaggatgggaggcaccccctccccactgccctaggggcctgattgctgaacagcctcaggagccagcctttggctgttcttggtcatttgtgtgttccatctgtctccaaatattgattgaatcacttctatgtgccacgtgtagttctggatgcgatcggaggtggcagagaggttgcattggcctgtgagtgcttggtgtggctgaaggagggaacagagatctagctggactgggtgggagaggggcttgggaaggctgctgaggagcccctgtgatgtgagagcccgaggaagtgggctggacggggtgcagccaggtaaaggccgcaaggaaggcgatatctggatgtgctggtggaacagcaggcccatgtagctggagccgggggagtgggtgagggggagagagcagggtggcagggctcagggcctgggctatgatggggatccagggctttatccccaaagagaagggacacaggtgggtggggagggacctgtgtgggagagagctggctggattcaggtggcagccagggatggagaaagcagaccatattctgctttggagacagggcgccctagagcccagcttctcaaactggtgtccgaaggccttggcgggtgggaggaggtgtctgcagggcattgactctttttagctgtgtgttttcatttagatgatattttcaaaaagttagtaggggcatgttggaaattattgggatgattcctttagaaccaagtagtgacagcagtaacattagctgccactgcatggctctgacaggctcaggacggcccctgatgtcagagtcctttatgtaattgccacctatttttcaagcactggccctgtccccagctgtgtgtgaagccatctcattgggtccccaggacaacccatggttatcagaaaaatcatctttttaaatttttcattatttttttgagacagggtctggctctgtcacccaggctggaatgcagtggcaccatcatggctgattgcagccttgacctcactggctcaagtggtcctcccacctcagccttctgagtagctgggactacaggcatgcaccatcatacctggctaatttttttaaaacaattttcagtagagatgggagtctccctattttgctcaggctgatcttgaacttttgggctccagtgatccacatccctcagcctcccaaagtgctgggattacaggcgtgaatcactgcacctggcctgcaaaaattatcttttgagataacataaacatgtgcttgggcagattggtgttaagattccattctacaggctgggcacggtggttcacacctgtaatcccagcactttgggaggccgaggagggtggatcacgaggtcaggagttcagtaccagcctggccaagatggtgaaaccctgtctgtactaaaaatacaaaaattagccaggtgtggtggtgggtgcctataatcctagctattcgggaggttgagacaggagaattgcttgaacctgggaagcagaggttgcagtgagccaagatcgcactactgcactccagcctggcgacagagtgagactctgtctcaaaaaaaaaaaaaaaaaaaaaaaaaaaaaaaaaaaaaaagattccattttacagatgcggaagctgaggttcagagaagtgacctgtgtagcctggaagtggtagagtcaggatttgagttgactagaggtgtgagtttgggcctgagtcctgctccaattccccaggtaagctgcgttggggtgcgggagagatggggtatagcatgggagcttccagccgcactgggatgatctggctcctcttgggcctgtgagagtcacatccctgcctcctgcctttaagctcccggtgcttaattagcaggaattctatagaattgcactccagaatggtagctactagccatgtatggacttttttttttttttttgagacggagtcttgctctgtcacccaggctggagtgcagtggtgtgatcttgtctcactacaaccgccgcctcccgggttcaagcgattctctgcctcagcctcccgagtagctgggattacaggcgcctaccaccacgcctggctaatttttgtatttttagtagagacagggtttcaccatcttggccaggctggtcttgaactcctgaccttgtgatcgccccccgcccaccccccccccccccagcctcccaaagtgctgggattacaggcgtgagtcatcgtgcccggactcacatatggctttttaagttttaattaattacaattaaagaaaagtaaaaagtcagttctttagttgcactagccatcattcaaacatttagtaaccacatttctgtcgttatggaaaggtctgtgggctagttctgctctggttgcggtccctctcctgcacctactcgctgtgactgtgtgcatgtggctctctccctgggcctcagttttcccatgtgaggaacggggatagtaacacaggctggctgtgaagatgaacattaatccatgcctggtgctttgtgagtgctcactgagtattagccttgatgcagacccactggtttctccttttgccactgggccctgccctggagctcccagggaggtggtggcgatgcagagcgacgtgggtcagggattccccatgcagtccaactggagggctcccgtgcatgcgtgcacatcaggggcggtaaggaagggctggccggggtgtgggaggaggcgacacaagatgggaggtggccctgtctcttgggagcaaaggcagaaggaggtggaggcagctcagggctcggaggagaggggtccgggctccttggctgtgtccctgctgtctctcgctgtgggtattcaccgaatctctcccatcctcggttttcacatctgctgcatgcaggtcctcatggttctcaagtgaggcaggtggtgagcccatcaggccagtgcccagggcttattctggggacagctcctggagaggaagggctgcctccctaaggactcctgccctgccctgggtgcaaggggttccacctgctgcccctcccccactccccagctcgcctcaggcggatagttcccctctcactccaaataagagccacaatgctgacagtggcccccaaggccctgcccagcggtccccagcttcctctagctacatctcccggccctccccttcacccactcctgtaggcgcctcgaacgcgcctcagccctgctcctcccctgcctgcagcgttcctccccaggtctcccccggctctctcacctgcttccggttttgctcagactgcgctgcctcagtgcgcccttctgtcaccatcctgtgtatagtcggaaacccctgctccctttccctgcactgaatcttccgtgtgctccttttctccatggcatttgttagctttggctatcctgtctaatttgcgtatgtatttattttttattttgctgcctgttccctcattcccccaactccccaatggcagggagttctgttttggtcactgctgaatccctggtgacccgagcagtgatgatgcagagttgttgtgatatttgtggaatgaatgaatgcaggattttttgttttaccttcacttggcacaaatgctgtggttctgttcaccactcccccctgaagtaatgaaagttatgggcccatccctgtgctgagtggagctggggacacagtgggggctaggacagactgtatccctgccttgtggaacccacagtccagtgggagaggcgacattacccacatagtcatgcaggtgacagaggcaagtgctgtgaggggaagggaaggctgagctctgagagtccgctgctcgtgggagaggggtggtcagggaaggcctccgtgaagaagatgggtgaacagagtgccaggcaaggggtacagcatgtgcaaaggtcttggggtgtgagagcagggagtcttcatggggccaggagaaggggagattgtgtgttggagcgagcagaccagtgaggctggagagcaggcggggccaaggcagatggcccctggcagcctccataggggccttggacgtgatccatgggcactagggagaggtcctgagcaggggagggacagggtcagaactgcgtggaggatcccgctggttgcagcatggagccctcagagtgtatggagcccgtggccaagcagactagaatatttgacatgatttctgtgggtgctgtaaggccctgggtggcgtgagggggaaggtgtgtgtgtggggtggcagggaggagaaggaatctgctctgtgcttattcttgtccccgtttcttttgcagcctgcccacggcttcaacctgcctccagccccacctgctccaagcagacagatggggcgagtgtagggagtgtgtttaaaagaaaaaagaaacaaaaagtctctctcttttttttttttgaagtacccagaccttttcaggaaaaaaaaaaaaaagtttcttcagtgccaccttctcaccaaggaggtagaataggtaaaaattcacctgttcagaaacatacagtatagaaagtgaagtttcccatgtctccacccatcagaggaaataataattttttttttttttttgagatggagtcttgctctgtccctcaggctggagtgcagtggtgcaatctctgcttactccaacctctgcctcccgggtccaagcaattctcctgcctcagcctcctgagtagctggaattacaggtgcctgccaccagcccggctaatttttgaatttttagtagagacagagtttcaccatattggccaggctggtctcgacctcctgaccttgtgatttgcccgcctcggcctcccaaagtgctgggattacagtcatgagccaccgcgcctggccagtgatgataatatttgatacgtgttgagcagttgctcttacaggctcttttgggaggacttcatgtggattaactcactgaaccctccaatagccttagagataggtatatgcagttattatctctaatatacagatgaggaaacagaggtgaagaaagggaacatgacttggtgacttgcccaaggtctcacagcaggtgacacagccagggctgaaaagctggcatttggttcctgaggctgccttgcctcccgcacccactctcctgcctcttagtgtggcgtatttccttcggatttcttttttctgtgcgtgtgacatttaaacacatacctccccgtgccctgaagtctaagacagtatgccctataaggtccatcattgatcatataactgcttttctgaaaagaatgcgataggtgagttttgtccatggattgcaaggtacatgccaatctcaatgacatcagcatgtgaaacaatacgcatattgtagaattgaggtgacagggcgtgtgtgtgtgcgtttcagaaaaggcatcccgcctgcattctgtcgtgccgcgagccttcgttagcgaatgctgatggtcccagtgtcagcacagcagggctggtttctgtgtttctgtgctcaggatggcttgttgtgttgtgtggccagaccgtctccacgtgctgggtgctgtgctgagcccttccctgcattagcctgtgatgaaagcgctgctgtctgtccttgcaaggacaggaggaaacggaggcttgggagtctagaaagtgggcaaacaaggaccccagtccagatctgcctaactctcaaggctgtgtggcatggtgttgtgggggagccaggccgcctgtacttcctgagatgaagtcatagggcaagtcatttcacttctgtgcctcagtttcctcattgtcatagaaacagtaggagtgtctgcctcaaagtgttgctgtgagggttatattggtatgtgcgaagcactcaaatgggcctggcacgtggtatgggctatgtgagccttgctctttttagtagagtcatgatattaaccaatatatagcaccagacccctgttgtgagcttttagattgttgccaggtttccctatttcagcagtacatacttaggacagcggttgtcagctggtggtggttttgtaccccaggagacatttggtgatgactgaagacatgtttgattgtcgtaaccaggggaaggtgttctgttggctttagtgagtagagacccaggatgctgccagacctcttcagggtgcagaagagtccccacatcagggattctctatccccaaatgtcactagtgttgaggctgagaattcccagcttagaacttctgtgccctggcactagcattttctgcaggagaaattcctccaagcacatgtacattttccactttatgagttttaccagaatgttctcacaagacgctgggaccagtttatagagtggtgaatggctggtggcagatgagggagttggttccctcacgtcttgccccaggtgcctttctcctgagttcccatgagcagatgctgcctgttacaccactagttcctgttgtctttgggttttttggtttttttttttttttttttgagacagggtctggctttgtcacccaggctggagtgcagtggcacaatctcagctcactgcaacctctacctcccaggctcaggtcaacctcccacctcagcctcccaggtacctgaaactacaggtgcacaccaccacacctgactactatatatatatatatgtatatatacgtgtatatatacatatatatgtgtgtatatatatatatatgtatgtatgtatgtacgtatgttttttttttttttggcagacacagggtttcaccatgttgctcaggctggtctcaaactcctgggttcagaggatcctcttgccttggcttcccaaagtgctgagattacaggtgtgagccaccgtgcccggccagctttttttgtttgtttgtttgtttgtttgtttgtctgttttttgagacacagttttgctctgtctcccaggctggagtgtggtggtgtagtcatagctcactgcagcctcaacctcctgggctcaagcaatcctcctggctcagcctcccaagtagctgggactacaggtgtgcaccaccacacctggctaatttttatattttttgtagagataaggtcttgctatgttaccaaggctggtcttgaactcctggtcttaagagatcctcttgcctcagccttccaaagtgctgggattacacgcgtgagccaccacgtccagcttcctgttgtctttgaatttatctcctgagcaagtcttcctccgggcgctgtggaaaggcacagatctgagtgcaggcgacagaggctcctgagggggtcgctgccacctccccaatgagcctccgcagcaccaggaaggagccccacccaccagctccagctccaagagacgcagatctctgcttccccacctgcctccctagcccatctgtgctgtctggcatcaaaatcaggtcagtgagagggggcgagagaaaaaggacttagtaagtggcaaggaaaggaattgagcttattttgagcctgttctgggcacagggcttcactctgtacatgttcattccacagatacttattaagtacccactccactctgtgcccaacaccctacaaagctctggggatccagctgtggctaaggcagccaagagtcctgcctttgtcgtgctgacattccagtgtgggtggtgggctgtcagcgtaagcaaacacatacagtaacatcggtggtgatgggtgcttaggggaaaatgaagggtaagggtaaggggaggtagggtgggcatgctttgcctagggaggttaggaaggcttctcaagaaagggacgtgagcagaggctgaagagagtggagaggggcctgagtttccacctgagggtgcagtgcctgcaaggccctgaggtggggcgtccccatgtatcctggcagctgagggagccaggcactgctgaagtgaagtgccctcagagaagcaaagggggatgttgcaggccgcgtagggtcctggggctgctttggggattttggcttttatgttgcatgggagggttcgagcggagaaggggtgggagctgactcaggtggtcacggggctccaggctgcaggaggggcgtgggcagagtgctgacttctttcactctataacattctctcactccttccctgctgtattcagcagcagtttagtccttttcgttgctgagtagtgttctactgtggatctacgtgtttgtttattcattctcttgtgggtagactcctggtctgttaccagtttggggttactgtgaatattgctgctgtcaacattgtagtacaagtcttttgtacatacactaatttccttgagacgaattgctaggtcgtgggataggcatatattgagctttgattttgactgcttaacagttttccacagtagttgaaccattttgcacctcccaccaataatgagtaagggttctggttcctctacatccgagccagcagttggccttgtcagtttttaaaattcgagccatcccaggtaggtggttatgatttgcatttgcctgtaactaatgagattatgtatgtttcttggttgtgtgggtgtcctctcctgtgaggtgctcttgctctttttaccttgtcttgagtcaacagctgcagctctggcccaggcactcagaagactcatgcccaggaaccttaggaagtaatgagtgtggtggggccgtgcagggactcccctccgcagggcgtgctatgggggttccataggcgagtctctgtccccctgcctgagtgtcctccattggcagccccccgagtgatcaggccatcttttttttttgagatgtagtttcgctcttgttgcccaggctggagtgcaatggcgcgatcttggctctccacaacctccacctcccgggttcaagcgattctcctgcctcagcctcccaagtagcatgtgccaccacgcccagctaattttctgttttcagtggagacaagatttctccatattggtcaggctggtctcgaactcccgacctcaggtgatccgcccacctcagcctcccaaagtgctgggattacaggcgtgagccaccgtgcccggcctaagccagccatcttcttggctgcagtggctggtatttcatcaccacaggactgcgtcacggacacctcagctgaggcaccaccctcagtgggaggacagggcaggatccaggcgggacgcaggggatcttccaactcctccccctgctctccctccagctgtgctgactccttagttgctgagatgagcttgtaaaaagcagctctgttgatcccagcagcggccagggcctccgctgcttctcggctgggagacccgaggtaaacagcttcccttctctcagcttctgtcctcatctgggcatggtcactgactgtctggtggggtgttgggagcattcaggagagactccatgggagcgccggcaccctgcccaaggccacccagctggcggtggctcttggactctggaacccagaccactcttggccatacctggctgcctttgcttctctctggaataatggcagccatgtgtttggctgttcactgggcgccaggcagtaggccgagccctgggcccacagtgggtactttagtgctgctgcattacaagggccctgagaggcgatgtccctgggccgctgtgggccagcgagaggggagatgagacatggagcccctgttctattccctccacatcagcccctcctttggactctgagttctccctcccagccatttgggaagtattttgaactgagcttgcatcagggaaggtgtggtgtaggtccgtgtaggggacgggcttctctcagtcccagccatagcccagaaggcccttggtgttctcccctgtccacctctctcgtgtttctcctcaccaggccccctcctgcctcaggtccttgcattttctgttcccctgctgaaatacatttcctcatgtgttacacagctcactccctcagttaactcgggtgtctgctcgcaagtcccgcacaccaagctaacatcctgttcttccactctccagcctccccaccacctgattatttgcatattcgtgtatttttctgcccctcacaccagactgtgagcctcatgaaggcagggctgtgtcttagtgacattctgttgctggtaccatccggggtctaggatgcaccccaaaaaagattggtgtcatgaagagagtctggtagtgtgtccctggctgtgtgtggtcctggggtgggggtcagttggggacacttggcctctttcttcatgtgctcattagataagacgctttgctggtctactgcattagcgttaataggtgttgggagggttgctccgagggtgcacaaagagcacacagtgcagcctctgaggtggggaaggcttcctggaggaggcactggtttagctgagacctcaaggaagagagagaagaacgcccagaaggaggtgctgtccctgatggaggccagagggaagggcttgagtgacagaagcataacatggagagtcaggtagggcggagaggctggagaggtgcaatagtcaacgtcatggtccttagcctttcccgagggctttctaggtgcacgtctcagctcatgcacctggaacgcagggcagcagaggcgaggtcctgaagggccttggatcctcagctgaggagtttggcttttttgctgggaacaccagggagccacaaaggttctgagcaggagaaagacaggttcagcgttggggatccctctagctgctgaatgtggggtgagtgggagggagcaagagtggagcgtaggaactcggggaagaggtgggggcagatgggggcagacctgactagagccaggccgcgggcaggatggggagagatggtcacgttagaggttgacacacagaacagtgggagatacagaaatacatacatatttatatattttttgagacagggtctcattctgtcacctaagctggagtgcagtggtgcaatcaaggctcactgcagcctggacctcccaggctcgagtgatcctcctgtctcgaatagctgacattacaggtgcacagcaccatgcctggctaattttttaatttttaatttttttgtagaaaaaaattaggtcgtgagacaagttctcactacgttgcccaggcaggtctcaaactcctaggctcaagggattctcctgctttgacctcccaaagtgttgggattacagacatgagccattgtgcccggccgagatgtggggatgctgaggattgagagtctggcagtcctgtgtgcttgggttgtggggtgccgggcatgttgctggcaaggggagccccttattgctgctcccagcctcgcatcattgcctttgcagcttggagcccagaatgtgatttctcaccctcttgtttacttccctgtcatgtccatcttgtctttcctcccgcttcctaccacttacctcccttctttctgccgggacctgggcagcctgccactgtcacatgccaggcagtagcgtgtccggcccaccagctcccctggggcacgagagaaagctgatgcccatggtgtccctagagccagctgccacttctctgggcgccaccgtagctcccgacctgctgtccgcaaataaccccaggctgggaaaggcaaaggcgccttggtctctgtggaccctggccaggccccaggctccaggtaggggcccagctggcgctgcctcgcgccctcctcccctccgttctgggaacctgagacgaagcagtggcctcggcgtccctcagtctgttggttgctggtccctgaggacagaagtgaaggtcttggggtagggatcagggcctcggtcaagcccccaggactggcttctaggccccagaccgtgcatacgcagtaggttgctttcttgttcaagatcccggattgtctgagacctgtcttttctctgtcatctgatggggggagggaggccgctgaggctcagggaatggcatgggatggcatggggggacgggagtgtgcttagtttgttgaaggtggcaggttggtggcttcctggtttggaaagaagggagaggggagagagagaaaagagtgtgtgtgtgtaagatggtggagggacaggcagatgctggtggctctgcgcattccctcaggtaccctgggctgcctcattcatactgggttacctcagtgttgggccatgggaatgacacggggagggcagggcacggctaccttgatgcttgctcagtcaggagtgactgtgggtggaggggccacctccccccagcatgggtgtcctgagtttggggtctggcctgcgcttaggccggggagctctgcttcccccagattggggtcgctggggacattgccacatctctctgctcagaatgggtccttgagagcgggctccacgccacccttgctggccttaccctttgctgagtgggcagaacagccagagggcctcagagcccggcgtcctcagggaaggggctggtgtggaatcccctcccgccctgaccagctcctctcttgtcttgcagactgtgccctgtccacggtgcctcctgcatgtcctgctgccctgagctgtcccgagctaggtgacagcgtaccacgctgccaccatgaatgaggtgtctgtcatcaaagaaggctggctccacaagcgtggtaagaggccgcttttgcccgccagattctttctcccacgctggctcctcctggaaagctgtgccctgagaggcagaggcggagggtcttaccagcctgaggagccagcattccgcagccccaggcccacagctgcttatgcccccatttcgtggactccttcagtggtcatctgggcaggagagcagggatctgactgtgcatgagtgatctcattcatagccccattttatagatgaagaaactgaggcccagagaggggaagtcacgtcactgaactaacacagtgaggcagtattcagcattcattcagttagcaagtattcattgactgtgtgctgtgccggatagccccgggctccgagacacagtggtcccctgatggagcttacattccagtgggggtggggcaggcagtaaataagtagacatggaatgtcggggtggcaagtgctggggtgaaaagtgggaactgtgagtgagggacaatgggctgggggcgggggggcatcaagaggctgcccggaggagacggcagtggtcagaggcctggagcctggaggaggtgagacgctggctgggcaagggtgtcccagggagagggacagcaaggacagaggctcccaggtggggatgtgcctggtgttttctggtaacagcgtggctggagcagtgtgagctagggcgagctgggggaggcaagcagaggagcaacgcggagtccagctgtgtcgcgcctgcaggtcatggaaaaggaccttggctttggcactccagacgagagcagccctgtgatgtcgtgagccgatgcgtggcctgatccatttgtactagtgggaagctgaggtccccttttagtgaagttaggacagggaagagaccctttttgaccccagggctgtttgtcccaaagtggctgccacgcaagactgggaggcagatggggagaagcgccacctgctgagagatggctttgtcccaggccagcttctgtgggcctccccctggaaagaaggtccccaggtgtggcggttggctgccctgtgtgcacttgcattcattcagcaaacacgtgctgagcagcgcctgtgggccaggcgctgttctaggtcctggggtccagcagtgagcccgacaggcaaacatcccatcctcgtgttagtatcttgggcgctgacagggaggcagacagctcccaggcagacatgcatgtctcacggtggcgcgagccatggagaaaaaacaagcaacgtgaggatgggagggcatgaggcaggcagggcggccagagggggcttcgctgagaagggggcatctgaataaaggcctgaaggaaatcggggattgagcctcacagttatgccagaggcgacagccaatgagtcctgagggggtaagtgggcttgttcaaagagggggcaggaagctggcgctgcaggcatcgggaagagccacgcatcctgcactgtaccagcctgcagacgcagacagggagcagcgatgagggatggacgcccctccctgggagcagcctccccacctgactgagcagaggagattcgtgtcctgctgctctttctggacagagatggcttttaaggtcccttggcccagtcccccagcctgagcctggagtctgggtttgttgatggagcttcctgagtcttggcagctatcaaggttctaaccctggttctgctgcttcctcttagtgcaactgtgagcaagccatgtcacctcactgagccttggtttcacatctataaagtgggttaacaagccagatctctgatgttgtcagctctacaagggtaggcattttcatgaggcttcttcacagtggtatccccagcacgtctaaaagtggtgggcatacagtaggcactcagtaaatggttgttgaatgaatggttggcgtggtgtgtgggtggtgtgctggggaacacagggtcatgggctcctgtcccgtggcctgcacgtgcggaggccatggctcattaggctggactgtgagagccttgggatgggtgtggaactgttggaggggcaagagtttctctctggtctaggattactgatggcattaaatgagtcttggcccctcttgggccttcagtgtccgcattcatgttacaaggggccagatgacccagccacaggcctgcctctgtcatctgggatggcctagctctgacacacctgtctcaggtttgcaccctacacacacgcttgtgcacacctgcactcttgggccttcccagtgcccatctttctgagtagcagctggcagaggtgggcaaggtgaggtgggccctgctgactactgctgttttgggacctgtaccaccccaccgacccccttggtggttaaaataatggcagtgctggtttactgagcacttactgtgtgccagacacctgtctctgctctaggcaagcctgattttgttgaatttttatagatgccctgtggagcacatgccaccttacagactggaaagctaaggttcagtaggaagagtgacttgcttgaggtttcagcaaggagtgggtagagctgaggttggactcaggccctctgactcctgaactagtgctctcaaggcctggcccacgtgctgcctctcacccagcaagctgtgcttaaggccaagggtgtagtaatagcacatctaatcagagtcactcatgccatgtgctggtcccacttctgacacagctgcagcacaccaccattagcagagcacctgccctctgccacgccccatgctgggctccatctgccggtttagaggcagacggtatagtagtcaagatgtgggctgtgctttccaattctggctctcccaggtaacagctgggaaggttgggcaaactaataggacctctctgtgactcagtttccccatccgcaaaataggaatacaattgtgaggatatttttccttctacctgttttttgtctttttttttttttcatagatatatggtcttgctatattgcccaggtgggtcttgaactcctagcctcaagtgagtctcctgtcttggcctcccaaagtgctgggattacagttgtgagccactgcgttcagcttttaggtttcttttcttagcttgttaccaaagtatgaaaggccacagataaatgcctggataataaactcgccccaatcccagtgtacagttcaagaaatagaataagacggtccccggaagctctcccaagtgctcctcccaagcagttaccgctctcctaacctccagtaacacagatgaggttttttttagtttttatcctttaaaaaaaaaaaaacggggatgaaatttacataacgtgagattaaccattttgaagtgtatgattcattggcctttagtatatcacaatgttgtgtaaccactacctctatctagtttcaaaaccttttcattaccccaaaataaaactttgtacccattaagcagtcagtttttgtatcctatgtcttagttcattctgtgctgctataacatattacccgagactgggtaatttataatgaacagaaacttatttcttaccgttctggaggtagggaagtccgagattcagggttggcatcttcttgtcacacgtcccatggtgaaaggggaagggtaagagagaacaagacagggctgaacttgtcttgtttttttttttttttgagatggagtcttgctctgtcgcccaggctggagtgccgtggcgcgatctcggctcactgcaacctctgcctccttggttcaaggaattctcctgcttcagcctcctgagtagctgggattacaggcgtgtgccaccatgcttggctaatttttgtattattagtagagatggggtttcaccatgttggccaggctggtcttgaactcctgacctcaggtgatccacctgccttggcctcccaaagtgctgggattacaggcgtgagccattgcgcctggccgaactcgtccttttataaggaacccactctgtgataatgtcattaatccattcatgagggtggtgctcccttcacccaaatacctcccatgaggctgcattggggatcaagtttccaacacatgaactttgggggacaattcaattcatagcaccccctgtctcctggtgtctgctaaccaccagtttactttctgtctctatgaatttacctactctggacatttcatgtaaatggaatcatatgtggccttttgtgactggcttctttaacttagcaacatgattttttgttttgagtcagggtcttgggctatcgcccaggctgcagtgcagtggtgggaccttggctcatggctcactgcagcctcaacctcctggtctcaagtgatcctcctgcctcagcctccagagtagctgggactacaggcaggtgccaccacacttggctaagcttaatgtttttgaggttcctctatgtagtagcgtatatcaatatgtcgttccttcttatggatgaataatctctatgttgtagatgtatcacattttgttatctgttaatttgttgatggacattgggatgatatattctttttttttttttttttttttttttttttgagatggaatctcactctgtcaccaggctggagtgcagtggcgtgatctcggctcactgcagcctccgcctcctgggttcaagtgattctcctgcctcagcctcctgagtagctgggactacaggtgtgcgccaccatgcctggctaatttttatatttttagtagagatggggtttcaccatattggccaggatggtctttatctcttgaccttgggatccgcccacctcggcctcccaaagtgctgggattacaggcgtgagccaccaagcccggcctcggggtgatatattctatatttaactttttgaagaagcagctgcaccattttacattcccaccagcagtgcatgagggtgtcagtttatatccttgccaacacttgtttttttttcattacagccatccttgggcatgtaaagttgtacctcattgtgtgtgtggatttttttgtttttgttttgttttgtttttttgagacagagtcttgctctgtctcccatgctggagtgcagtggcacgatctcagctcactgtaacctccacctcctgggttcacatgattctcaggcctcagcctcccaagcactgggactataggcatgtgccaccacgcccggctaatttttgtatttttagtagagatggggtttgatcatgttggccaggctggttttgaactcctgacctcaagtgatccgcctgcctcgacctcccaaagtgctgggattacaggtgtgagctaccgcgcccggccttcatcgtgattttgatttatgtttgccagatgactaatgatgctgaacatcttttcatctttctgttgaccatttgtgtatctttggaggaatatctctttgagtcctttgctcattttaaaatcaggcagtttgtctttttgttgttgcattgtaagagttctttatgtgttctggttaatagacccttattagatttccaagtatttccacccattctgtaggttatctttttactttcttgacagtgtcctttcatgcacaaaggtttttaattttgatgagttcacttgaagtttttctttttgttgcttgtgcatttggtgtcatctaagaattcattgccaaattcaaagtaatgagatttactcatgtattcttagactttttttgtagttttagctcttatattcaggtcaattcattttgagtttatttttgtatatggtttacagtgtgaagtaggatatcacaaaagaatgtgatatccattcttttgaatgtggatatccagttgcctcagtttcttcatctgcaaaatagggataagattgtgaggataggctactctgggcacattgcctatgggtcactgttccctgctctgcaaggaacagtatttaaattaacaaaaaaaattgtaaggatattttttcttctaggtttcttttctttcgttttgaaaaaatatagtctctttgttgaagaaactgttctttccccattgaatgatcttggcatctgtgttgaaaatcagttgaatgtagatatttgggtttattttttggctctgaattctcttccattggtctgtatgtctgtcctgtataaactgtactgttttgattactatagctttgtatagtaaattttgaaattggaaagtatttaactttatttttctttttcaatattattttggctctttggggccctttgaaattccatgtgaatgtgaggattggcttttctatttctgaaaaaagaaaaagcctgttggaattttgatagggattgcattgaatctgtatattgctttgggtagtattgccatcttaacaatattgtcttctaatccatgcacacaggatgtttttgcatttatgtagatctctaatttctttaaacaatgttttgtagtatacaagcccttcacccccttggttaagtatttttttggaggcttttgtaaatgctttttttttttttttttaagagctagggtcttgctctgtcactgggctggactgcagtggcaccatcatagcttcaatttcttgagctcaggtgattctgccatttcggcctcctgagtagctgggacttcaggcacacgcaacgactcctggctaattaaaaaacattttttgtggagaccagatctcactatgttgcccaggctcgtctcaaactccagacttaagcctgcctcagcctcccaaagtgctaggattttacaggtgggagccactgtgctggtgtttaatagccatgttgaggtaaaactgatgtactacatgattcatccatttaaagcatacagttcagttggttttagtatgttcagagttgtgcatccatcaccatactcaggtttttttttttgttttttttttttttttttcgagacggagtttcgctcttgttgcccaggctggagtgcaatggtgtgatctcggctcacggcaacctctgcctcccaggttcaaggagtctcctgcctcagcctcccaagtagtgggattataggcatgcaccaccatgcctggctaattttgtatttttagtagagatggggtttctccatgttggtcaggctggtctccaactcccgacctcaggtgatccgctcgcctcggcctcccaaagtgccgggattacaggtgtgcgccaccgtgccgggccctacttttcatctctgtagatttgcctgttctgggcattttatataaatggagtcataatgatacgtggtcctttgtgactggcttctttcacttagcataagttacggtccctccacatggcagcatgtctcagtacttcgtttctttttatgactgaatagttttccgttgtatgaatctgctacattttgtttatccattcgttgttgatggacattagggtcgtttccactcgatggctgttatgaataatgctgttgaggacatttgtgtgtaagtttttgtgtggatgtgtttcaccatctccttttaatccttagcagctctctgatgagtgggttcgtgtgtgtgtgtgtgtgtgtgtgtgtgtgtgtgtttgtgtgcatagggtgcttggatattcatggtgaagaacagttggaaagagtcaaggggcgctgggagggtgtggcagcagtgccaccctgcctggcacagaagtgttttggcattggagctacctgcacagctgtattggtgaatcccagcccatgggatttggccttacagggccacagggcatgtgtgtttggaagcctgggcctcccctgggactaggccaggagctggcacagacagcttgctccttgccacacgctgaggcaactggtgccccagggcactgctgctggcaccttcctgccaggcatgacctgtggatcacccgggctcagcccagtgccccagcctgcgtcagcaggggccacctggagggctcctctgggagaggcattctcgtgtgtcccccgcacctccccgccccgtggtaccccttgtgagtcaccgtcacactgggcctcctgccgcctacctgggacatcactcaaccttgtcctaacctctctccctcccttcctgcctcatttcaggtgaatacatcaagacctggaggccacggtacttcctgctgaagagcgacggctccttcattgggtacaaggagaggcccgaggcccctgatcagactctaccccccttaaacaacttctccgtagcaggtgtgtcttgggatgagtgggtcagtgttctggtgctcacaggatggctggcacgtcttaggggcttgtgggacttggtcattgagccatgggcctgtcctgggcctgcttgcccttggatctgttttcacccttcccctgctctccctccttgttagctggccaggcggggctgtcctgcggggagatgcagagtgggagggagggagaagccagggcatttgcccacacccagccccatgcatcgcctccttgtggttccagcttctgtcagccaggccttggagtccccaactggtggcaggtgcctcccatcctgtgctttggtaacagcctccatcctctgtccctcggacgtagaggggtcacagcttcccactcagctggtcacagggctggcctcgcgtcctctgtccctctgtaatacccaaagggatgtcttccagccagaccctggcagtgaagtttcacaagccccaagctcttgactgagccttggagaatatggtcctgtccacatcgctgcccctttctgccgccttccttccttgctgacctgatgggtcaccatgtcctgttgttctgcctgctaagaacattacagaggcacccccatctccactgccagtgccttagctcagaccactatcctctcctgccatgctgtggaacccagtccccgtcccacgctgctctgcatgaagccttttcctgattgctctccacatgtgctggtgaccctgacacatctgttcccaacctcagtgtctcactagaactcccagcctgtcccaggctgctccttggacacatctccccaagtgtcttcaaggtcctcataagtgccacatcccaacctgaccttcaggcctctcccagctctattcctgtctctgtctcagggacagcaggccgagaggcctgggcctggtcctcagtgccctcttcccatggcctgtctgcagggctccactctggtgtggccccatcctccctagctggctccccacctccctggccttccaacctccagcctcaccctctacatggcagccagagggatcattctcagtctgtttgtgtctcttccctatctaaagccttctatggctccctgctgccctgaggacaaagtccagattctttcccatggcctccaaagccctgcctggctggccccagcccacctctccagggctgtctctcacttacccctcctcacccttggagcagaattggccaccccctgaggatgttgaacctcctctcacctctgagcgtctgttctccgtgtaccctctaagttcccttttccttcagggcttagttcagagaagctgcttcctctgggaagccccccaaccccccaggctgggttggatgctacctctgagcttctgcacacctctaggcttgtccccatcgcggccctgtctatggagccatcactctctggtgggcttctctccttccacacacacacacactagaccctgagccctgtgagaacaggaccagggctgtctcagtccctagagtgtccccagcaccatctagcatggggctaggcctgtgggaggtggctcgggcactttgggctgcaggctagcagggctatcccctcagccccctgctgtctgttccctctgcctgcagaatgccagctgatgaagaccgagaggccgcgacccaacacctttgtcatacgctgcctgcagtggaccacagtcatcgagaggaccttccacgtggattctccagacgagaggtcagtctgggcctctgtgtggctgcccttgagagggagcaagcctggtgtgaggagaaaaggtacagctggagagattttccctgggaccctacataggggtttcctatctgcgcttctggttggggggtctctccagctggggctgagaagagctggggttcttagtctgaagaccctactctgccctttgacttgcgggtgcatcggaatcacaggcagagctcgtgaaatgtctagaccgctgggcctcgcctcaagacctgtgactacctggagatctgcccagggtcagggagctacattcttttttttttttctgaaatggagtttcgctcttattgcccaagttggaatgcagtggcatgatcttggctcactgcaacctccaacctccacctcctgggttcaagcgattttcctgcctcagcctcccaagtagctgggattacaggcgtgtgccaccatgcccggcttagtttttgtatttttagtagaaaaggggcttctccatattagccaggctggtctcaaactcctgacctcaggtgatccgcctgcctcggcctcccaaaatgctgggattacaggtgcaagccaccacacctgaccccctttttttttttttttgagacagagtcttgctctgttgcccaggctggagtgtagtggtgccatctcagtttactgcaacctccgcctcccgggttcaagtgattctcctgcctcagcctcccaagtagctgggattacaggcacgtgccaccacatctggctaatttttgtatttttagtagagacaggatttcgccatgttggccacactggtctcgaacttttggccttaggtgatctccctcggcctccaaagtgctgagattacaggtgtgagccaccctgcccggcaggacctacattcttaatgagcatctctattgattttgaggcaggtggtccagagagtcattttaaaaagatcaatttagtaatcagaagagatgataaagactcatctatttcaaaattgaaacagtataaggaggtgtctagtgggagcttcccctaccctgccctttccatccacctccctgccccccagttaatcactgttcttaggtgccctcaaagagcagagggagacctttgtgcctggctgcctttttttttttttttttaaatacaaaaggtagcattgtacatgcttctggacttgctttttcccttagtgtaccttggggaatttgccttgatatatggagagatgcagctgctttgtttcatgttttgcttttttttttggacagttggacatgcgtgtcccaagtgtgtttatttagccgttctttattgtgatgactggggttgtttccagcctttggctcattataaggaatgctgcagtgaaatagccgtgtctgtctcgtttgatgtgtgcacaggtagacctgtgtgacgagtgcttagatgcaggattgccgaggcacagggaaaataagtttgtggttttgcgatgtttctattaggcgatgtctgagagtgcccccatggccttgtgttttcaaacatttggatttgtaccagtctgagcagtggaaaaattcagcacctcggggtgtttaactttcctttctttctctgtggatgagtttgaccctcaagggccatgtgagttcctattctgaagtgtctatattgtctatttttctgttgggtagttggtctttttcttatttatgtattagctctttatagattaaggagctttgccctttgtaatcagtgggaaatgtttctttttcccactttgtccttttgggcctcactttgagaaacagtcttctagcttatctatggggtaaggtttcagcagaccctctagagagccctaaaatcatgccgtccaagaaaacttccggccattgtggaaatgccctttatctgcactgtccagtaggcacctgtgccaattgcctgtgccgattgcctgtgctgactgcttgtgccgattgagcatttgaaatacagccaccaaggaatggattttttctagtttattttaattgatttaaagagccacatatggctagtggctaccttcttggacagtacagctcaggaacccacaatatcatgagacttgttactataatctatactataattattgttgcacatcctcccaaggtaaaaaatatacttgccccactgaggggaacaaaattaccatctcaagccagctgaggtgctactcagttgaaaactatggaccaaaacatgaatggccagtaaaaacagatcgagaccagtgggtgtataggtcctgggtgttgagctgggttttgaagactggataggatttggccacggagatagcaaggagaaagttcagaagggacagcatatgcaaagacctggaggtgaaatagctcatgcattccagagactacagggggttctgtgtcaccagagaaccaaggggccaggagtgttggaagaggggaagtggaggcgctcgaagctggagagctcagccaaggccttggactccaggtggagatccccacagggcttggcaggcacttagtaaattgcggtttgtcccagggtagttacacgatgcaggggaatgataaataggagcggctgatgcagcagtacctggcacatcaggtactgacaaggtggagctgacaaggtgttttagtaggcaggagagatggtctcgtttccattttcacaagacaacatgccctttcctttaccaagattctgtaggctggagagccccacctgccttttcttcttggtacctgctgctgttgccaaagagaaaactgctggaacgactaagagaccaggtcccagatttctgaccttaactatgggtgggtggagggggtgaaccagaaacccagcaagagggaggccccctccactctgctcctggctgactgatgctgtcctcacagccctggcccacacaggctgatgtcagctggcctctcttaagcctggggagggaggcaggggttgcagggcaggtgggtgccagtcggtgactgcttgttggctaggtgctgcagcgcctcctcactgggctcctggttgcctctccagctggagagaccctcctccctgtcccccacttcactgcagacgtgtttcacatggagaaaagttgaaagaatagtataatgaatggacatccacgcgccccactcctagactctgcagtcccgcattcaccgtgtctgcttcatctggttgtgttttatgctgaacttgaacttgtgttcatacttagtgacattcttagtgtttcagcaggcatctcctaagaataaggactttctcctacagaatcatgatgctgtcacgcctgagatgattataatctttgtttactagtaacttctccttatccatgccgtacttgaatttctttagttaccttttgaaggatatgcaacctttagaacattgttttaaaaccagtattcattcaaggtacatgtctctttgacttgttttatttaatctagttcagccctttgtctttttttttcctccccaagacattgattttttattaatttatttatttttttgacaagccaggctagttgtcttgtagaatgtcacaccttctgggtgtgtcatattattgccttttggtgttgtttacttttgttccccatgtttgtatttcttgtaaactagaattaggccaggaacagggttggcaaactatggccctgccttccatttttgtaaataaagttttattggaacatgaccatgtccatttgttcatgaatagtctggctgcttttggcttactgtggctgggttaagtagttgtgacaaagactgtcttgcaaagcctaaaaaatttaataattggcccttttaaaattttaattaaaattttttaaatttaaaactttttttttagagacaagttcttgctctcttgcccaggctggagtgcagcggtgcaatcatagctcactgcagtctcaaactcctgagcttaatccatccttacgcctcaggatcctgagtagctgggactaaaggtatgcaccaccatgcctggcgaatttttaaatttttttgtggagacagagtcttgctatgttgtccaggccggtctggaactcctggtctcaagcaatcctccctcctccacctcccaaagtgctgggattataggcacaaaccaccacacccagctttctggtccttgatggaaaaagtttgcagacccctggtcttggcaggcaagaatacttaatagtgcatcaggtgagtatgatctttttgttgttgttttgatggggtctctgttgcccaggctgcagtgcagtggcagaatcacgactcactgcagcctcaatctcccggatttaggtgatcctcccaccccagcctccctagtagctagaactacaggcgcctgccaccacaccaggctaatttttgtattttttgtagagatggggtttcaccatgttgcccaggctggtcttgaacccctgggctcaagtgatctgcccatcttaacctcccagagtgctaagattacagccatgagccactgtgcctggccatctgtgatctttttgacgtaaatctttctttcttttttttttagacagagtttcactcttgttgcccaggctggagtacaatggtgcaatcttggttcactgcaacatcttcctcctgggttcaagtgattctcacgcctcagcctcctgagtagctgggattacaggcacgcgccaccatgcctagctcattttgtatttttagtagagatggggtttctctcatgttggtcaggctggtctcgaactcctgacctcaggtgatctgcccgcctcggcctcccaaaatgctgggattacaagcgtgagccaccgtgcctggccttgatgtaaatcttatcatgtattttctctgcttagaactctgaatggctttcactcccactcagagtaaactccaaggtccgtgctgtgtcctgcagagtcctgtatgatccagcgacctctccagaagcatttcctaccacaagcaccctcacttagccacgtgtctccttgctgttccttaaacatgcctagcacatctcttgcccgagggcctcagcgcttgctgtcgcgtttgtctaaggccttcctccctgagatgccatcacagctctccccgactccacgaggtctctgccccagtgttgccaccccagtgcgtcctgccctgcctcccttcgctgtcttgcccttccccagctgtgcttttcttcatagcacctgtccaccaagtgggacatttatatttatgtatgtatctggcacacaaatgggtgttcagtaaatgtttgttggataaataaaaaataattaaattctctgagctagatcctgttccgaggacttttcatatattaatttattttctcctcacaaggcagactatctgtgcacagggagggccccagatgccctccagctgtaaatgcccctctaggtcggggaggtgatggttaggggagagtccccacagtcagctgtcactcctgaagcggtgaggacgggcttgtgcatgaaggacagccctgccacctctgcttcgccgagcttctctctggggtgccccgcaggatggcccagggctggggtccaggccctggattcaggccagctgccgtgtctctccctcagtggggctcagttccctggctgtcatgtggtgtagaggaggaagtaaacatgaaggcactggcgcagggcctgcccatggcagctttggcacacgcagcactggtacctttcttacctctgtctcctctgccaccagcatctctttcctggaggatgccggggtctcctctcactgcccccagtccgtagcccacacagcagctactgacttaaaacagaaatttggagcctgttcccccctgactaaaacccttcagcgacttcctgtggtgctgaggataagacccagatctctaacatggtggcacgtagaggccggagcggtctgggcatgctctcctccctgtcctcatctcctccactcctccctgtcctcatctcctccactcctccctgtcctcatctcctccactcctccctgtcctcatctcctgcactcctctctctcctcatctcctccactcctccctgtcctcatctcctccactcctccctgtcctcatctcctgcactcctctctctcctcatctcctccactcctccctgtcctcatctcctccactcctccctgtcctcatctcctgcactcctctctgtcctcatctcctccactcctccctgtcctcatctcctccactcctccctgtcctcatctcctccactcctccctgtcctcatctcctgcactcctctctgtcctcatctcctccactcctctctgttggctccagccattctggcacctgtgtgcctttcacagacaccccagcttgctcctgccctggggtctttgccatgcagttccctctgcctgggttcctttccctcccaatcccctgcctccttccctccatttcatttatttcatagctgtgtgccaagggcctgttctaggcactggggatggccattgttcaggtcctggtttaaacgtcatctcctcaggcctcccctgactgccctctgagaaggagtctccctgtttggcccccgccttggagcttctacacacttgtcctccccttgaggtcaggagccatgatgggcttgtcccctgctgcatccacagtgccctgaacaagcctggtgcacagaaatgctccacatttgcaggccggctgggtgaactctcatgacagccttctgagacctcaatgtgctgggcaccgctctcagcactttatgtctagtgtctcatttcaccctgataggaccctctagtgcctcacccaccgaggcacaggaagggcatacaacctgcccagtgttgcctgcaggaaggggcagagctgggatccacgtccaggccatcccccagagcctgtcctctcacccactgtgaggtccccagctggtacggaaggcaggcagcgcattgggtggcaatgaccccacagctcctggcccagagcctgtgcttgccccgtactgtgcccttcccagtgttggtatggcgaacgtggctcccccatgtccctcccctggccctgagcccaaatgaggatgagaaggttccagaaaataccgatgggggaagtgctcttggaggtagaagtgcctgggcacttcttgtgtccctggcctctgtcggtgggcagatgagcctctctgtgcttcggtcttgtcattttagcatgaagtgaatggcagtacctactacacagggttgctgggagggcgacaggagtcctccaccataacgcacagtggtaccagcctctgcaagtggaaggtgttcttgggactgctgttgagtggcaggggtgggggcccctctctgaaaagcgggtgcagatcatggcttacgaggagagttcttcctttgcttttcccgtgggctccctggctgggtgtcccatgagccttccctagagagggtccctgctttaccctcctgagtctcgtgtagctttcagcgcttcactgaggctcagggacaggcgggtggtgctaaggaggagtaggctgtgcacaggtgagtgccagctctgccacatccctgctgtgtgaccttcacaggtgactccacctccatgtgcctcagtccccacagcagaaatgctggctcttgagaattgcagtgctcttgagaatcaagcgaggtggtgtctggagctagccactcagtgctgttatttttacagtcgtggtttacccaggggctctcctctgggggctagaagatacttgaggcccagcttcatggggagctcccctttgccccagacgccatgttgcaaacccttgagaaggatcctggacagaggcccttgcttttcatctggaattctgagtgctgcaaccttgcaactttggtccagttagaattggatcggaagctagtcaggcagcaggcgagccccagttactcccagataacctcctgcattgctgtggtttctggagctttctgtagggtgggcagtgggagccagggtaggtggggtaggcccgcccctgcgagtgtcttcggcaccctcccttccaccccgccctgcgcgcggtgctctgcgccgacagcccgccaacctcttagccccaggcccaggccctggtggaggggagagctgggagggctgagctggtccaggtggcagagccactcttggagccccagctggggtgggtccagggcctgtgctcctgattcccatctggagtagcctcccagagctgcttctgggctggtggtgtggcagtgccatccttcatgtatttgggttctctccacagagggaccatctgtgttctctccacccctgtctttgaaaacaaagatgataccacgctgtacatcttagtctgcaatctgccatcttcacgtgacagtctctcaagatctttatatatgagagacatattttcctttttaatatcttcactgtatctcttaggagatctgtgattttttttttcccaatccgccatcatttactcagagtcagcattaaaaaaatttaaaatttgtgagaggacaactatgtctgataaagcatgtcatggaaggctgggcacagcagctcacacctgtaatcccagcacttggggagaccgaggcaggcagatcatgaggtcaagagatcgagaccatcctggccaacatggtgaaaccctgtctctactaaaaatacaaaaattatggtggcgggtgcctgtagttccagctactctggaggctgaggcaggagaatcgcttaaacctgggagccactgcactccagcctggcagcaaagcgagactctgtctccaaaaacaaaaagaaacaaaaaagaaaaaagcctgtcatggaatgggctcctgccctgtccccggcccctgcttttttttttttttttttttgaaaaacaggaatattagtgtagggtttgggaattaggctgtaatttgttcctaagggggcatgggttaaagcaagttgagaaatactggcttgagatgttgggccagggagtgcagaagccaacaccgctctgcccgggtgtgcaccagggctcagtgcgtgctctgcccgggtctgcactgggccctgctgcgccctggccctggggccacttggactttggctgcctcactctttcattacccaagtatctactgagtatccaccatgagttctgggggcagaactgtgttcaaagcaggtggaaatctctgcctccgtggggtggacatagatgggttatggggactccagtctctgagtgggtggggagggcagcgtgccttttgtaattccagctaccaagcctggagcaactgctgtttttctggaatctgttttttcaatctgtgccccagttcctccttcataatgggtgggagtagggatagttgatgatagcaagtgcttcccatttgttattagaggctgttcctttccttcgactcccagttcccctcccttggaggcaggcagggctccaggatcatgacttctcttctggagatgtttgtgcctatgtgagcatgtgtctgcagaagttcattattttctaacttaggagcacagaactgtatactgttcttcaccttccttaattttgaaattttttataaaggcgtggtcttcttatgttgtctaggctggtctggaattcctgggctcaagcagtcctccagcctctgcctcctaaattgcagggattacatgagtgagctaccttgcccatccctgcaccttcctttttctcttaagaagtctcagatcatcccaagtcagcatacagacctgcctcaatctttcccccagctgcagaatgtctcattgcacagatgcctcacaggcattctacctcacgacagcctgtgtattaaacactgctgtgatatttcatcaaatcgaaggcgctgtcattggggaggcaccctgtttcatatagtgccaagaaaaaggcgtgcccagttaaatcaagacagaccccaactgtgagattaatctgcattccagcagtgtcaaaatgtggaagagggtgcgttgtgggatggatggaaatagaagtagtttcgcgtggtacaccaggaaacgagactggggaggaatacagcccagcagggtgtcccggcttggattttgaagcccagtcccagccacacttgttccctgcctgaccttgggtaggggccccagtgtctcaggaacacaggagcagtgacacttgccctggggcgggggccatcctggaagatgctgtgaagggctggctgcactccctgtggcttatttaaatcactgggatttgcgtgattacactctctgaattttctcattcttagtgaacattttatttttcttgttggtcatatgagtattttctagatacaagcaaaatacacggggggttcaaaatgcgttgggttgaaacacctaattgcagtgtggtcaaaaatgggggatgtggacaatttggtgtaattcagcctaatatatttttcattttggtctctggtcattttcacttattagacagaacagtttgtaagtatccaaagaaaattattttgttttttttttagctgattgcagtggtatgatcatggctcactgcagcctccacctcctgggctcaagcagttctcccaccttagccccctgagtagctgagaccacaggcatgtgcccccacacctggctaattttttatctttggtctctacaaagtgggtatccatgttgcctaggctggtctcaaacttccggatgcaagccatcgtcccgtctcagtctcccaaagtgccaggattgcaggtgtgagccaccgagcccagctcaaagacagttctttctcagcaagttctaaaccatgagtgacagaactagtttattgttctttattttattattattattattattattattattattattattttattattattttgggatggagtctcgcactgttgtccaggctggagtgcagtggcgcgatctcggctcactgcaacctccgcctcccgggttcaaatgatcctcttgcctcagcctcccgagtagctgggattacaggcgcccgtcaccacgcccggctaattttttgtatttttagtagagactgggttttactatgttggccaggctggtctcgaactcctgacctcaagtgatcctccaccttggcctcccaaagtgctgggattacaggcgtgagccatcgcacctggcctgtttttattttttatttttgttttttaaaaactttttaagagatgggtcttgctttgttacctaggctggtcttgaacgcttcggctcaagcacttggtccaccttggcctcccaaaatgctgggattacaggtgtgagccacagtgcttagcctctagttaactgttcttaaaccaggctcccttctgctgggacctacttcttgtccaccagcttctctcctctacatccctgggctgccaggacctctgtccctgccatgcagactccctgctcccagtggactgtcccctccagggagtcctgcgggccagctcttgccttgcagtgtcttcagctcctttggctaatgaatgctgcttcttactcttggtttaactttacaaaacattggtaacttataaacttgagcttgtcatttgttccgaagaattcacaggagcactctctctccctcattcaaggctcagggtggtggctcattttcaaggggctgtgaaaagagagggtcactcctttttgatcatttccctgctgcctggcttcaaatggccctcaggccaggtcactttagggaaattggtgatcgctcttggtattccactttttttttttttttgagacggagtctcgcactgtcaccaggctggagtgcagtggtgcgatctctgctcactgcaccctccgcctcccgggttcaagcaattctcctgcctcagcctcctgagtagctgggattaggcgaatgccacccctgactaatttttgtatttttagtagagacggggtttcaccatgttggccaggctggtctcgaactcctgaccttgtgatccatccgcctcagcctcccaaagtgctgggattataggcatgagccactgcgcctggcgtggaatttcactcaggtcccttcagctctctctggttctgacagatcttgcccaaattcccatggttatgtggtcatttgcttgcctgttgctgggggtggctgggaggtggcactcagctgttcgactctgaggcccaggactcctggctgctgggactcacgtgtgtccctgcacagggaggagtggatgcgggccatccagatggtcgccaacagcctcaagcagcgggccccaggcgaggaccccatggactacaagtgtggctcccccagtgactcctccacgactgaggagatggaagtggcggtcagcaaggcacgggctaaagtggtaagtgctgggagcaggggtggggctgccagcctgcggtgcccccacccccagtgctggcctgctctccttggtttccataacacagttcagggggctcagctgagagacaaggctgccctgcagggtggggtgatttcaggtggcaggtgccctagggtgtgctccatgcccgtaggggagggagcaaccttgggtggacccactgcaggttcgtcctgggagttggtgaagacctggctacccccacgtcagagcccagccctcccaaggccctgtgcctgcagagcctggtctgaaggccgcttcagaacacacagttgctgcccagagcctcccttcctgctccagcctaagccgtttggcaacagtgtcttttggttttcctctttcttttgttaaaatttcctcccacgggccatgagccaggcgctgactgcccccactctccctgtccctggcagaccatgaatgacttcgactatctcaaactccttggcaagggaacctttggcaaagtcatcctggtgcgggagaaggccactggccgctactacgccatgaagatcctgcggaaggaagtcatcattgccaaggtgcgtgccccgggaattgcgctcgcgagcctctgtgggggctgcggtctggagcctgaccctgaggcctggacgcttacccgcgctttctgctgctgtgggcttatttcccccacaaattccccctagtcagaaaagggggagcctgaggcccagagaggagcagcaggccttgctgctgagtccccacctccaccctatgttaggggctgggggtgcctgtggagagagagagcctcggggccccacccagcaggtactgtcaagggaggctggggcctgttggggaggacgtcgctgttggggagtcccgggctttgctcagggtatcccaggtggaggccgggccaggagtggaattctactttttcccttatttgaattttttgtagtggaagattccaaagacattcaaaaatttaaaaagaaaataaatattacggacccccatgtagccattgtccagtttaaccagttatcagcgtttagccagccttgtttccttagctctgcctgtccctcttgttctggaatactttaaggcctgtcctagacaacacgtcacttcactcatccatacttgaacatgtgtcctgacagatgaagactgtaaagaatataatcatgtggtgctgccatcagagccaaccaaattagctgttcattcctgatgtgacgattgggcctaaggcagccttcctcagcctcagcactgttaacgttttgggacagatgattctgcgctgtcggggcagccctgtgcattctagggtttcagcagcacccctggcttctacccactgaagccaatactagctccccaagttgtgacaatcaaaaatgacttttgggttgggcgccacagctcacgcctgtaattccagcactttagaaggctgaggtgggaggatcgcttgagcccaggagttcgagaccagcctgggcaacaaagcaagaccctgtctctgtaaaaataaaaataaattagctgggcatagtggcgtgcacctgtagtcccagctgctcaggaggctgaagtgggaggatcagtggagcctcagaggttgaggctgtagtgacccatgttcacaccactgcactccagcctgggcgacagagccagacccccagctaaaaaaaaaaagggaaaaaaaaaaaaaagacttcagacattctcaggtgtcccctggggataaacttgccccagagagagcctgtgttcacgttgctgcaggtggctccagatttttggaaccactcctggtggttctgctgtacagtcaggtaccaaattagaacctgaattagagtcacccaaagggcttgtgagacagtgctgggcccaccccgagtttctgactcagtgggcctgggggtaggtcccaggaatttgcattgctgccagttcccaggcggtgctgaggtgctgtgtggggaccacaccaagaagcactgtttttccttctttgggcaagaatgctttctaggtgggacttcccacagcctgtggtggcacctcggggctctcgtgatgtctgtttgtctcccttgcagggacgtcacaggtgtcttgtccctagcagcctggtccttacattgtgacattcctgctgacttttcacctgtggctttgagagccactgatgatcctcgtctgggtctgctatttgctgagggtttgcaggctttcacttttcactcctgtgattttctgcatttatggctgggaatggaattgcatttcacaaggccttgctccccttcgtcggggcggagtgggcaggtgtggtgttgcccaccagcccctcacccgcagtctgtctgcaggatgaagtcgctcacacagtcaccgagagccgggtcctccagaacaccaggcacccgttcctcactgtgagttgccctccccttcccagacagtgtgaggccagcctttggacagagctcagagagagagccctaatcttctggtacaaagcacagtcttggggtaggccaggcgggcagggcaaggtgttgctgcgccctgccaagtcatccgaaccaagacatgtggtgggggtgagcaggctcggggagtgggagggtgacagcttcttcatagatggtggcttcatgtaagcatttgaactaactgaagatatcacattatttgctggctgctgtctctatgagttaggagcacttagcccagctggttgaagtggaaacattattttttttgtttttgttttcagatatgctcatagaagcagatgtgttagcattgtgttgtctgtcagcctggactgagtagatgcctgtttgggctgcagtctccatcaaggccagtggccaccagttaaatggactagattgaggatggcttatgtatcatttctttatctcagttgctgtccaggtatcctattaagccacagtactttttcaaataaaatcttatgaggtacctcagtgcagaaaacagaatagttgagttgtcatgagctgaaggaccccctggtgggagtctctgaggaactctctgtagatctccttagtgcagtggagaactactgtttgttgactgacagcctgtccatcctgtcattgaagttggctcccaagcctttgccactcccagccacagcagacatcacttgtgtgtgtaagttgaacacattttactgtaaaaacaagagccatggttgctcagaacagctctagttctcccttggctgtgcctgatggaggcagaggacaagatggttcagcatgtaaccctttcctaccgcagagccatgccttcacttaatgccccaaaaggtgcagccggtatgtgaaccccatatggctgactcctgggggccccagccagggcagggtgtgtgtgtgcagaataagcagggccagggccctgccctggcatggctcagcagagccctcctccctcccacctcccaccctgctgccttcatcccccaggcgctgaagtatgccttccagacccacgaccgcctgtgctttgtgatggagtatgccaacgggggtgaggtgagccgcggctgccttgactttgccctctggggcctccttctttagggtggggcgggatggagaggagctgtgggtgagatggaagggtggagggaaatttcagtgtcatctagtgcccctctcccttgaggcaggcggcttcgtctccattttgggggggcagtcactgaggctcagagaggttaagtggcttgcccaagtttacacagctagtgagtgggtgggtcaggtccaaaccagtccagagaggtgtggagagggctgtggggcgatagcactgggaaggatggtcttaaaggccccagagaaagcccccaagggttaaaacctagcagccctccgttcccgtgtcctctcgaagtgaattcccgcagccgctcagcttccccttacagagtcgcctcacttttgtcacccactccttgcctcgcgccttctctgtgcagtggttggcacacctgctttgggatgcgtggtttgctcatctgtctgatctgggcttgcccatggcctattgttacttggtcatgacgtgtgcttctttttgcctccatgccatcctccctcctgtctcggatgtctctcccataccctctcatgggtgcctcctggcagaccctcgcccttccccccagctctgtgtcacttatgagcttctgcgctctgccttgattggtccctctagctgtcacttgctggttcatgatacaggtgtcaccacatcactgcgctggggcagggggctgggaaggtgagggcaggtgggtgggctggggcctgacctcctctccccaccccttcctcctgcagctgttcttccacctgtcccgggagcgtgtcttcacagaggagcgggcccggttttatggtgcagagattgtctcggctcttgagtacttgcactcgcgggacgtggtataccgcgacatcaaggttagtggcagggtgtgcgccaggctgacctgtggcatgcacaccacatgggactcacactggggaagttgggctgagcttctgccctcattcgccaggctccccaccaaggtccagggtggtggctgccctcattcgccaggctccccaccaaggtccagggtggtggctgccctcattcaccaggctccccaccaaggtccagggtggtggctctgtggcaagttgccccaagtagggaccttcccaagcctcccatgagcgctcctaggccactagcggagtgtcaactgccacaatacctactttatttgtatttatttatttatttatttttgaggagtcttactctgttgagtgcagtggtgtgatctcggctcgctgcaacctctgcctcccgggttcaagcgattgtcctgcctcagcctcccgaataggtgggattacaggtgcccgccaccatgcccagctaatttttgtatttttagtagagacggggtttcatcatattggccaggctggtctcaaactcctgaccttgtgatccacccacctcagcctcccaaagtgcttggattacaggcatgagcccccgcgcccggccaattttagaagatagtttggcagtgtccaccaaagctgagcaccagtcatctgccctagctgtgtgcacaggagaagtggggacacacactcaccttagaaagtgtccccctcactcagcagcaggacttactctagccccaactggaacaacccaagtatccactgtgagaggaacagtcagatccactgtggagtgttctcacagtgggacgccacacagcagttaggaatgagctacagctacacacgacagtgtggacgcgtctcataggctaatgtcgagggaaagccgcacagaggaggtgagtccacagttcacaggtgtgtctgtgtgcagtggtacagatgggaagtagaggttaattcttgtgggggatggtcagtaaccgggaggggcacacagggccttccagggggagatgccacctcagcctcgcaagtagctgggactataggtgtgtgccaccatgcctggctaattttttttttcatattaagaaatatggagatggggtctcgctgtgttgcccaggctggtctcaaactcatgggttcaagcaatcctgccacctaagtcccccaaattgctgggattacaggtgtgagccactttgcctggctgcatatttcataattaaaggacagaaagtctagaaaaaaagaatagaagaaagctagtgcccccacgttcgaaataagaaccacagttcacaatggggacggtgggtggacagggcctggctctcggctctccctgcccagctgttcccaggtaccatgggggtgggccagagggtgaggagggttggatctggcctctctctgagcctcagagggtgaggctgtgtgtgctgggcccagcctggcatgggagggttgatgtccaggagccccgggcatctttccctggaaggaaaggctggggtggcaggaagccttgggagcatgcacctgagatccgttgacttttccaacagctggaaaacctcatgctggacaaagatggccacatcaagatcactgactttggcctctgcaaagagggcatcagtgacggggccaccatgaaaaccttctgtgggaccccggagtacctggcgcctgaggtgtctggggttggtgggggtaggaacgtgtgaggccaagggtagggggatcccccagacctgtgtgtttccagcccagatgccctgagggcaggactgtgatgccagcctcagggccacgggcccagccctcatttctcctccatcctcaggtgctggaggacaatgactatggccgggccgtggactggtgggggctgggtgtggtcatgtacgagatgatgtgcggccgcctgcccttctacaaccaggaccacgagcgcctcttcgagctcatcctcatggaagagatccgcttcccgcgcacgctcagccccgaggccaagtccctgcttgctgggctgcttaagaaggaccccaagcagaggtgagggctggcgtcggccccacccagcccagcgccagctgctgccactgtccctgcggcctggagggggcagcgtccacaagggtgctcgcttgtagggtcgcagtgtgtcgtccccacacagcccctgaaaacgtccacagtggcacttagggagtgcttcccccagggcaggcccatccttgacactgccttattttatggggacactgaggaacagggcatcccctgggcctggctggggccaccaaaccatatgtggcagagccaggataggaacggagcctgccctactaactccctttctggactcagggtaaggccaggcagtgaggacacgtgggtccgggttgctgactccctggctctgaccctgggcacgtgagctccctccctgagcctcggtttcctcctctgtgaagtggtttgtggtcaagacagaatcattaagggccatacagggcctgcctgctccgaaagcccgtctgcccgaacccagctgctccgggaggcaggtgctgacggccgtctctgcacaggcttggtggggggcccagcgatgccaaggaggtcatggagcacaggttcttcctcagcatcaactggcaggacgtggtccagaagaaggtgagccccactgcttgccccagcaggaccctcagggacctggcccactcgtggtgaccttggttgaggcctcctggcctcagggtccctgagcctgagctcctctcctccgtagctcctgccacccttcaaacctcaggtcacgtccgaggtcgacacaaggtacttcgatgatgaatttaccgcccagtccatcacaatcacaccccctgaccgctgtgagtgcctggggcccccgcgctggtgtgcctgccccaggggtggagggatgggatctgctcttaactcacttctcaaggagggccctcgaaggcccccgcttcatgtctgggagatttccccaagtctgctctcaggcccttttgctgttggtcctctttggacctggtgaggccaccaggagccattgactgcagcacgttctggagctcagtcggggggctcagggcaggaggcagcccggtccctgagcctggctgggttcactgctttacagctgtttgggttcttactctgaactcagcccagggctgggctatgctggggacacagcactgattgagccagccctgggccctgccctggaaagctcccagcccaggtagggtgggcggcctggagtggtcagggctagggcgtgggaggccagggactggggaatcccagaggaaatatccgacctggcctgcagttagggagggctttctagaggaggaagcaaacgtgtcagctggccggaggaatgacgtgtgggatgccagcaatgggagaagcatggcatagctaaggaccggcagcagccagggagatggtggtgagaagagagggcatggggctggagtgcaagggtctgggggccactgggaggggtggggactgcttgcatggcgggagccagccatggaagggtttcatacagagagggacagggttaaagcaggcctttagaaagcccccctggctgcccgtggagaatggatgggagggtgcgagaggcaggccaggacagggctctgggctggactctggcatggtggtgtgtggggcagagagaaggtgggaggctcagaaggccctgccagctgtggggcgcatgggcaagggcacaggaaactcccagaggaggccgcccggggctcaggtttggggagtgggtccgtggctgagggcctccattgcggagggatgggcctttcctgtcctgtcctgtgggcagcccccgccagctggggccgtttccccagggagtctgggcaggtgtcccaggccctctcctgactggtcctccccatccacctctgccgcccacagatgacagcctgggcttactggagctggaccagcggacccacttcccccagttctcctactcggccagcatccgcgagtgagcagtctgcccacgcagaggacgcacgctcgctgccatcaccgctgggtggttttttccccctaactttttacttagcctttttggtttgtgtccccacccccacctcctcaccccctttccagttcttcttcaggcccctcccagacgcaccccagcggcccctgcagcccctgcctccagcctccagcctcacctttgtgcccagactcgcatttggaagactccacctcccgcccaggcctgggctgttgggcggttggagattcaggttttaatccacacaagccccagtgaggggtgaagcatggcgcctggggcctgcctgagtttctggcctgggtgtcgtgctggtgtctgcctccgcgctgctgcatctggacgaaggctgccttctggtgggacgcgacacccggcagacagtggtgctgccttccaggccccgtggcctaggctcggagtggccaggcacggggcggtccaatcccccacccgctgtccccctatgggggcagaaaagcaataatgtccaggggcaggcaggggcccttgggagctgcagggctgggggttagggctgctccctggtgaatggagtcagatcctaggatctgtaccatggggaaccaggagtggccgggctgggtgccgcctcctggtccggcctcctccccaccaaactgtcctcaccctatggatgaggcaggaggaacatttggggccaaacctgcctgcctcccagccccgtgccttactagggcttccttccagctggccttacctcccgctggaccctgggcctggcctggccccactgggggctatgggctgggctcaccctctcctctgcgggggtggagggccaccagccttggctgttacaatcttacaccggacagtattgggccccatggacttggtcagggaggggtgggggtgggcatctctggtacctattggggtggggggcctctgaaaagggaggctcctaggcccccctcacccctccctctccccagggccccacgttctgcagccttaaggttgaacatgagtgcacgtccatgtcagtgctgtgggactcctgtgcgtgcctcggactgcgtgtgtcggcgggacgcaggcacacgtgggtgtgtgtgcatgtgtgtttgtgtgagggcagcgtgtcctccagtgtgcatggtgtgtgggcttgggccccatccctggcccgagcatttcatcctgtgggggaggggtgctgacctagtgggaggagccccactgtgatccatgagctgccctgcccacgcctcccctccctgtagcaacacctctgggtgtttggagtttagcttttgtgggtttgctctccctatcccatctcctgtactacacagttcatggcagggtggggaggggtggggttggttcgggtgggtgagggtctttttcctctgtgtgcgatgttgttatctgacagttctccgtccctactggcctttctcctcgtcttcatatttgtacggtacaagcaataaagacactcatttcagaccagggcccagcctgcactcacgccagcccaaccactctgggctttgccttggtgatggagtcagacccctgggccccagctcctcctgtactagccgttcccttcagcaaggagggcactgagctcagggtgagggcagctggggtgtgtgcaggagctcaggctggagagggtgggtggagctggtgctgtggggctgaggggtatgggaaggctccccgcatgtgggggtggggtggacagagaccactccaggccctcagtgctgcttaggctaagagaggtggggtggagggacagggctggaagatctgggtagcccagaatgaggagggtgcctgtgctgtcactgaatgagagggagtggttcattccacccggctgccgagcctcagaggggggcattcctatcctgccccacctccctgtttatgctgccacctggaagccttgaggcccccaaattccagtacagacccagtggtgtgttcatggtggcgtggttgctgtcacctgggagctcctgagcgtttggttagaaccctgttcagcttggggtcagccctcccctagtcactgccctttagcctggatgtgtctgggcccctgcacttcccgtgcttgagtcacgtggctgcatggccgggcgctggccggatggaacacctcccccagcaagggaccagggaccagagccctggcctgccctgctgagccctgctgtgcagagggcctggcacagatgaatttgagattttgccgcaaggtgttagcacttcacacccattgagtctttgagattttaagtgaatgtaagcagaaaaagtcagatccaatttacagaaatcagagttagctacagctaggactcgtttggttggggttttttagtttgtctttctaaagtcatgtggaccttaatttaattacaaaagtctaccctggtggtcataaaataggcaggcctatgaagaaaggccttttactcttccatctcgtcccagccccgagttgacccacgttgctgctcctcacaccatggtgatgcaggtctcgtagtgtgggcacaggcctggctacctcatctttttagtgcctctctcctcttccacaggatggggtcccacagctgcagcagctggccccgtagttgagcatgtgtggttatcctgtagagcttttcccaagaagggtgtttgaacttagagtcttaataaaatcttaccaaataaattttgagtagaataatcgtcttttgcaatgtacattttaaaaatttcacacattcttttttgtatataaagaacagtgactgggcacagtggctcatgcctgtaatcccagcaatttgggaggccgaggcgggcgggtctcttgaggccaggggttcgagaccagcctgggcatcatagggagaccttcatctctacaaaaaatacaaaaattagctgggcatggtggtgcatgcctgcaatcccagctaacttggaaggctgaggtgaggtgggaagatcacttgagcccaggagtttgaggctgcagtgagctatgattgcggcactgcactgcagcctgggacaatgagactgtgtctctaaaaataaaaaaaaaaaaaacatgatacatgctattaaaaaagacagcaaagcaggagtataagaaaggaaattcacccgaggtcgcagggccttgagtactcattttggtgctgattacctctctgcaaatggacacggcatcataaattggtagtttcctgctctttttgtgtaatcttttccagttaatgtgaagcctctgggggctgccctcgtgcactgatggttgtgtggagtcgggggcggcagtgcgattcccttttagctgctgcatggggggaactcaggctttccagctgcttcctggggttccatggggtagacccctcaaccgcttcagctgccccgttaacaggaattgacttggtttcgtttggtgctaccagcagtcctgtaataaactagctatccatctgta

SEQ ID NO: 408 - DNA, 10663 bp, Homo sapiens
  source 1..10663: mol_type = genomic DNA; note = NC_000003.12:c48609664-48599002 UQCRC1 [organism=Homo sapiens] [GeneID=7384] [chromosome=3]
agtctacgcttgcgcggcgcaacagggccgactgcagctggaagatggcggcgtccgtggtctgtcgggccgctaccgccggggcacaagtgctattgcgcgcccgccgctcggtgaggtggtggcgagagcgcggggcttcgggacagggcttcgggaagcggacaggtgtgggctgttagcagtggcaggtcgaggtggggaggacgcggggtcagggccgtgggaaggtcacggcggagggcggggaaaggtatctcgccgcttgcctaggggcggggttcgggggtcctcctgaggacctgggaggtggggagcgatcccctgaccgagtcctcactcgcggctgttcccttccacagccggccctgctgcggacgccagccttgcggagtacggcaaccttcgctcaggcgctccagttcgtgccggagacgcaggttagcctgctggacaacggcctgcgtgtggcctccgagcagtcctctcagcccacttgcacggtgagttggggacgcttttggggagagggcctccaggttgggcctgccgtcttttccctggttggggtgtgaccttgggctcgagtcttcccgtttgtggtttgggttcggacccaggaccactcaccccgagaatggccccattccctaccctagccacgccttggcttcacgggacaatcttcactataagccaacattatttagcatataatgcccgttaagtaggcggccaaattcttttccagccttttgttaaggagcccatataagggaagtgatcatgtctcctcttataatgcggaaaatgggattcagacaccttaggtgacttgcaggggtccaggtctgtcagcctcactgcccaaggtcataatctccaggctagaccagaaatacattttaggaagcaaatgcattttaacagtacaatgaaatgtgtgattttccaaaaaatacaaattctctaaattgacacaagaaatcttgagtcacagatagatatatgaataggtgagaagattcccaagaaataattatctcctcctcctttcagcccccagccccagggccagatgtttttattgacacatccttttagttttccagaaacaatgtcctgcgatttaaattgttactaagcataggaaaaggtggcctgcaacttccttgttatatgtcacttgttatagtaaagaatgctatattacatgaactctaaaatgtgctagattgtaaggagctgtctgtgctccagtgccagagaaagaatctcaagaatcttgccaattttaatcaaaggatactatagattgtaaaatgcctcttgcattccaagatgttagatgtgaaatacatgttcatctaagattgtgtgatatatggtatatgcattgacatctcttaggaaagcaaatatcacatgttctcacttatcagtgggagctaaaaaatacgtacatacagatgtagagagtggaatgatggacagtgaagacttggaaggatgaaggggtggatgatgagaaactacttaatgggtccaggcctggaggctcacacctgtaatctcagcactttgggagaccaaggcaggcggatcagctgaggccaggagttcaagaccagcctggcaaacatagtgaagccccatctctactaaaaatacaaaaattagccatgcatggcacacgcctgtaatcccagctcctggggagactgaggcaagagaatcgcttgaacccgggaggcagagattgcagtgagccgagatggagccactgcactccagcctgggtgagagagcgagagtccatctcaaaaaaaaaaaaagaaattacttaatgggtacaaggtttgttattctggtgatggataattcagaatccctgatttgactacttgtgcattctgtgcctgtaatgacatcacacttgtgggcggggcacagtggcttacaccagtaattccagggctttgagaggccaaagcaggaggatcgattgagcccaggaataagaggttgcagtgagccatgattatgtcactgtactctggcctgggtgacagagcaaggccctctgtcttaaaaaaaaaaaaaaagaaaaaaatggagtttcaggtgtggatagaaatttctaaaaattgtgcttgtaccccataaatttatacaataaaaaaaagtcttggctgggcgcagtggctcatgcctataatcccagcactttgggagaccgaggcaggcggatcacgaggtcaagagattgagaccatcctggccaacatggtgaaaccccgcctctactaaaaatacaaaaattaggctagacgcggtggctcacgcctgtaatcccagcactttgggaggccgaggcgggcgaatcacaaggtcaggagattgagaccatcctggctaacacggtgaaaccccgtctctactaaaaatacaaaaaattagccgggcgtggtggcgggcgcctgtagttccagctactcgggaggctgaggcaggagaatgccatgaacctgggaggcagagcttgcagtgagccaagatcgcaccactgcactccagcctgggtgacagagcgagactccgtctcaaaaaaaaaacacacacacacaaaaaaacaaaaattagctgggcgtggtggtgcacgcctgtagttccagctactcgggaggctgaggcgggagaatcacttgaacccaggaagcagaggttgagtgagccgacatcacaccactgcactcgtctcgtgacagagtgagactccatgtcaaaaaaaaaaaaaagtacttaggaaagtagatgtgaaaaacttaaatcagctgtgaacaaatagtaaattaaaagactagaccgtgtgaccaagtggggtgagtggtacgtgtttcttttacattttttttttttttttgagatggagtctctctgtcacccaggctggagtgcagtggcacgatcttggctcactacatcctctgcctcttgggttcaagcaattctgcctcagcctcccaagtagctaggactacaggcacgtgccaccacacctggctaatttttgtatttttagtagagacagggtttcactatattggccaggctggtctcgaactgctgacctcgtaatccacctgccttggcctcccaaagtgctgggattacaggtataagccaccgcgcccagcctgtggtgcgtgtttcacagcaaccaggaggctgtcaagaaaattaatattaccttattgggtgccaaggcaacactgtttggtgttcagagctgattaaaaacaacaacaaaaaagatattataggaacaatatttagtgtgataaaatatacagtctaaaccaatagtcccttccttaatgatgaaaggataaaatcattgccagaacaaaggcagcgtgtaatttttagaaaggaaaaaataagttgttatttgcaaatgatatgttgtatgcttagacaaaaacaaataattaactgaaaattgagagtgaatttaaggatttgtatgctggtgagaccaggtaaatgtgcacagttagaagtgtccctgtgggtccttgatagccaatcaggagagcaatgatgtggtgtgacgagtcattcggctgcccctgttttccaagcatgactgtgtccccaagcacaggggtcctgctggggcagctctccctgactccaggattcataagtccctgcctggggcttgtactgagtcactcaggtggggtgtgagtagggggctggggagtggtttgtttgtaaccttttctggtggcttcttgaccaggtgggagtgtggattgatgttggcagccgttttgagactgagaagaataatggggcaggctactttttggagcatctggctttcaaggtgaggctcttaaagtctgtctcctctgggcttagggctgcctgttgtccctcctgaggatgaaggtcagaaaaattagcctgattatgggcctcagttgcggggctgatgtctggctggctttcctaaaaggagccacatgagcttaacctctcctgagtgggcacgtatctgatgagcccctgcctgaggccctcagagccaagaggacccaaggaaccataggagccccacttttcaccagagaagccaggcctgtggaacacacgtagatatgcacatgcattttaacaaacccacagacatgggcatgcatgcttgcttatgaaatgttcttctctggtggaatatctaggcatcccttggttgtaaagacccatgttttttaaaggaatgaaaaacatggagaaggattatggggtgggcagggccatggagccatagtaggcaacctagccagctgcaatgtcacaggtatgtgtgcagaattaacgtgtgtgtgcacaccaagagatagcaccactgttctccacacacaggactaggattgggtcccacagaggccactagcatgtattcacaaacatacagtcatgggaatggcatgggaggagtgggttctatcacttgaacacaggtgtgggcttacctgaccatggctgtcaataaggaggggggaggtgtactggtaatgatccccacagcttgttggtaagctgttacaggagctttaggcaacacttgctctggccatgcccttcagtcctggccctggctatctctgttctgttggcgcatgatgccatggttttggtcacctcaaggcctgcttagtgcttggtaaacagactctgggatctgtgtccccagagtctatgctgagggaggtacctgtggaccagtggtcctgctgggtgtttagcctctgaggacagggttcttgggttcctgtgtagctcctgattgttctggttgatatctggttccagggaacaaagaatcggcctggcagtgccctggagaaggaggtggagagcatgggggcccatcttaatgcctacagcacccgggagcacacagcttactacatcaaggcgctgtccaaggatctgccgaaaggtaacacctggaggaagaggcggggacagagggcagggaagcagaggacagctacctaggagcccctggctgaccacagaatcatattacccttagcgtatggctttgcagctgggcaactaggggtgggcagcaggagatgccaggcctggggattttgtgctgtcgttggtctgcagtggtccacctggcacctaaacatgtcctccttgcatctagctgtggagctcctgggtgacattgtgcagaactgtagtctggaagactcacagattgagaaggaacgtgatgtgatcctgcgggagatgcaggagaatgatgcatctatgcgagatgtggtctttaactacctgcatgccacagcattccagggcacacctctagcccaggctgtggaggggcccagtgagaatgtcaggtgagagttggctggccttgtggggggatgcttgctccattctggcctggccagaccctttccaggtcacatttttagttggctagctgtcggggttattttcctgagttatgcaactggagacagtttctgtatccatgtggtccagtgagtcttttttaatggctttgtgggcttcacttgaattttgggctttgttttaaggtatgttttggtgcatgtcctgacagtccaagggcgaagtgtctgggtgtcccctccatgtggtctcttgtctcctttgtggatggctccgggagctttgatgctgcccttttgagagtcccacagtgttggctcacgccttctcagagaagactatgagcctgtcctgaagtcaggcatgaggcaagggcagacaagggttgccctctgggccctggaggggtgggtggcagagacaggggaagggggttggggagtgtgctagggcccactcttcggagaaaccatgcctctcctagtctgcctcctcagtcccattcatgcatgtaccccaactcactccagtgtggtagaggtgttgacacactgaccatatgtcttgtaggaagctgtctcgtgcagacttgaccgagtacctcagcacacattacaaggcccctcgaatggtgctggcagcagctggaggtgagtgatggaatcactgaagtcctgggtagtggggtcccagccttggttatcaaagccgaggtcctggttcccaccataggggacctttcaccccaggggactctgctcccaccctaaccttgaggggaatgaccttcctcctgtgctctctgaggtgggataggattctaccctgccgccaccactgggactggttacacaggatgctgtccctctggtacaggtctgtcttagccccacctggttctaggatactgagttcatgggctggtaggggatgtaagctcctggccttgttccttgtggccttgcccttgggagagccagccattagttgtgtgttgatgcatgcctgataacaaaccaagaagtgccttgaaaggaaggcacagaagggtggggaagatttcactggggactcagagttggagtttgggggaggggctttttaaagcacctgtagtttgaacagaagcctgaaaggtggtgagtgttatttaggtggggtgtggggagctgagcgcaggggaagagcagtgtcatggtctaaggtttgctctgctgctgtgtggggtcacagtgcaggtaggctggctagagaggggctgtggcagggactgggcaggagatggcaggagcaagggggagcagtagatggactccaggtggttttatagatggaacctggttggggtctggacatgggtaaggaactgaggtcaaggtgcttcccatcttggctggtcgtggtggctcacgcctgtaatcctagcactttggaaggccgaggtgggtgaatcacctgaggtaaggagttcgagaccagcccagccaacgtgacaaaaccccgtctctggtaaaaatacaaaaattagccaggcttggtggcagttgcctataatcccagctacttggaaggctgaggcaggagaatcccttgaacccgggggacggaggttgcagcgagctgagattgtaccactgcactccggcctgcacaacagagtgaaactccatctcaaaaaaaaaaaaaaaaacaaacatgcttcccagcttatgaccttggcggctgagtgtgcagaaaagaccaataggaagagcatgaccaggggctttggagctggggaacctgggggcaagagcaatctgacgtgtgtgtcagactagcagggcttgagctcatggaaggaaggaatgaaaggccaacgcaggccgggcgcggtggctcacgcctgtaatcccagcactttgggaggccgaggcgggcggatcacaagatcaggagctcgagaccatcctggctaacacagtgaaaccccgtctctactgaaaatacaaaaaaattagccaggcgtggtggcgggcgcctatagtcccagctactcgggaggctgaggcaggagaatggcgtggacccgggaggtggagcttgcagttagctgagattgcaccactgtgctccagcctgggcaacagagcgagactccgtctcaaaaaaaaaaaaaaaggccaatgcaactggtggcaccacagagccctcctcttgtggaggtgaggaggcaagatccaaggagtcctagggtatacgtttgtaacattatttgcaaatgtccccagctctcaggggacccaagagctaatcacagccctgtaatagctcctctttctgccccctcacttgccaccccctgcagggccagcagccagaaatacttgagggagagctagagggaaaaggcaggccaggtggctttgtgcccaggagtaccagtcttgtccttgatgtaggtggaatgcatcttctcaagtgagaacccacacttggatcacatggcagcccattttgaaactctgaacgcttttgctctcctgggactgaggccatgggagctatttggccctgaggtgcctgtcctgtccacaaggcagggtctgtctgaggaggaccttctttcctcaccctgttctaatgtcacatactcctggtttctcccactaagacaggacatgggggtcctctgcctgtctgtgaatcgccccaccctgtgccttgggccctggctggtcagtaatgccactgtctgtctcagcaggagtggagcaccagcaactgttagacctcgcccagaagcacctcggtggcatcccatggacatatgcagaggacgctgtgcccactcttactccatgccgcttcactggcagtgaggtatgctgccttttgggcaggagtagtgctcagctgggggcctgtgggaggacccccatgtgcatggttatcctggtgactccagagatacctcagcagttgggaaggggttctgtggctgctgcatcacaggcacacatgttcacacacatacaccctctacccacacctgccaccttttctgttcccctggcagtctggctgttcctcagccttgtcatgtactgtttcagatccgccaccgtgatgatgctctaccttttgcccacgtggccattgcagtagagggtcctggctgggccagcccggacaatgtggccttgcaagtggccaatgccatcatcggccactatgactgcacttatggtggtggcgtggtgagtgccagcgcgagcatgggacctcgccttcagggaagagagggtgctggggctgtgtgctcctgtgcgtgggggtcacagtgtgcgttgaagacaagagggtgggtgctgaccacctatccccctggcagcacctgtccagcccactggcttcaggtgctgtggccaacaagctatgccagagtttccagaccttcagcatctgctatgcagagacgggcttgctgggtgcacactttgtctgtgaccgaatgaaaatcgatgacatgatgttcgtcctgcaagggcagtggtaagtggcagcctggtattcctaggtgggatggcggctttaaccagcacagtgggaggctgagagatgacacactggctcagaatgaataccacccacccccccactttaggatgcgcctgtgtaccagtgccacggagagtgaggtggcccggggcaaaaacatcctcagaaatgccctggtatctcatctagatggtgagtcctacagctcagcggggaggggtagagtacatcttgccagcgacagcaccaaggtggccactgctcctaactaaccaaggttagaaaggaaaactttgaagaccacgccatgccccatcaccccacccttggagatgcaggcaggtgtgagacaggtccacagcccatcactgccataataggtgaccatagaagagagggctgtgatctgagtcagcatgaggtcagggaggtccttgtcaacctgaggctggagattgtttgtgtacctgtgggtccaggattgggctgggtggacctctgagccttctctcacccttaaaggcactactcctgtgtgtgaggacatcggacgcagcctcctgacctatggccgccgcatccccctggctgaatgggaaagccggattgcggtaacatggacccctgggagaggttctggagtcttggcctggcagacacctgggaggtgtagggttggggcctggcatagcgcagcctgctcctataggcatccctggtgtcctaggcagctgtcacctgcaggggtagcatagtgggagggcagggcataggtgctgatggctgtggagatgggcggggcccatggaggtctatagcagggatcccttctgcctttcctcttttgggctggggacagctgcatgctgcctgtgggagatctctgctagttggatgatgctgactggctgaggtggtggccaggtgcccgttagccagtatgccctctgcctcaccctgcaggaggtggatgccagtgtggtacgtgagatctgctccaagtacatctatgaccagtgcccagcagtggctggatatggtaagtggcctagggggtctgctctttgtttatttcctcaggccgttctcttggcctccccttccacctctgctcccgcactgctgctcagcttacagagcagccagttaaggccccaagcagctctccccagtcccctggctgccagggagttcttgctcagaaaacctgtcccagcagttccttgactgcctgccaaggtgccttcatcaataccctgcacccgtcaggtaacgggcacctccatgtggggtggggcttcaagggccagaacatgaagggacaggctcagcacccctgggggaatgttctctcctctctttccactcaaagcctgtcttgtgctgctctgggcagcatctccgagctgggtgcggcacagggccaggtgtccctgtgcaggccaggtaccccaccctgacgctccaccctatccccacaggccccattgagcagctcccagactacaaccggatccgtagcggcatgttctggctgcgcttctaggcgggaagcctatgtaagcaagagggcagggccggggtttgtggtcccccccccaccacaaacacagcacttcggctcctctaacctgtgccacaggtgaccaccaataaaatcctctgctgagaa

SEQ ID NO: 409 - DNA, 5703 bp, Homo sapiens
  source 1..5703: mol_type = genomic DNA; note = NC_000015.10:76336773-76342475 ISL2 [organism=Homo sapiens] [GeneID=64843] [chromosome=15]
ccttcaactccgcggggcagtaggagttagttagcaaagagccgaggccgggcgcgcgaccctcgtccttctgcccctggccgcacactttgcgcacatctctttttctgcatggtggatattatttttcattatccttttctgggtgctatgggtgatcattccaagagtaagtatttctgtgtgtgtgtggggtggggtgtgtgtgtatgcttaatatgcaaaatttctaatgcagaaaaatgtttagtggattctacaagtggcttctatttgtcagaatagtttaggagaggaaaaacgaatgcatgtctcctgcaggactgcttatctttgggaatcctgttgttttattttataagtaaacactatttctcaagccggctaggatgacttcgggctgcgaaatctgcttctgttttgcgcaaaggcaattaggtttgatttagggatgtgggtttttttttttttggttgttgtttgtttgcctttcggtttttcaaagctaggaagctttctttcgcttgctctgggatatttaaactaagaaatgtctgagaggatgagcggggactgccgaaagacgatgtgtctgtgttgggataggaggcagccgctgtgagtgggagtgtgtgagcggaaatgccaggacagcaccgttaggtgttgatatccaggcgtccgcagtgcctgtgtatttactctcttcttagtttcgtgtttgcgtttagtttcaagacacgtcgacaaaacgactgtcattaatgaatgtaataacgaaatatttggggtgggggacagaagaaaccttcagcaatccacaagatactggtttttcgtttccaatgccctggacctttagagagctcatcatctttccttatggtcgcaagtcttgaaagaaagagcaagagagcgagcgggttgggttggggctggagtagccgaggccggcctgggtccgggcagtcaggcctgacgcggccccgcgcccttccccggcagagaagcccgggacggccatgtgcgtgggctgcgggagtcagatccacgaccagtttatcctgcgggtgtcgcccgacctcgagtggcacgcggcctgcctcaagtgtgccgagtgcagccagtacctggacgagacgtgcacgtgcttcgtgagagacgggaagacctactgcaagcgggactatgtcaggtgaggccggcgggaacgcgggctgggccaccgcgcgcaggggccggggccgggactggggatggcggcctgcccgcgcgccccggccctgcccagggagaaggccatccgcatcccgcacgggtgccgcagcgctcccccgggcccgggaatgcccgcaggcgggtcaccgcagtctcctggtggccacaaagtgtcctgggcgcgcgccggagccgtagcagccagggagatgagggcggccgcaggcccagcgctgacaccgccgcaccttgggcccgcaggctgttcggcatcaagtgcgccaagtgccaggtgggcttcagcagcagcgacctggtgatgagggcgcgggacagcgtgtaccacatcgagtgcttccgctgctccgtgtgcagccgccagctgctgcctggggacgagttctcgctgcgggagcacgagctgctctgccgcgccgaccacggcctcctgctcgagcgcgccgcggccggcagcccgcgcagccccggcccgcttcccggcgcccgcggcctgcatctgcccggtaagcgcgccggggcctgtgccggggtgagcggggtgtatgtgcgtgcgtgtgtgtaggggtacgcttgtgtccctaacgagaagttgtcagttgtgtgtggttccgtctgccgggatagtgtttttctgtatcagtgcggaactgtgtgctgggaacaaggctgtgtgtattctcgtgtgctcgggagaaactgcgtgtgtatgagtgtgtgagcacggagaattgtgcagaatcgtgttctccatgaccaggaacatgcagggcacagtgctaggagcagaagagtggatgacaacagggaatcttaagtggtgtccgtcttggggcttgtattaggaatttcttggaggaatatgtgttattgtcagagggtaaggtttgcccaggggtatgtgtgtaagtaacacagctccaaactgggagctgggcaggagcttggtcagccaggagccaagaacccaacaaagaggggtttttgccatcttgttttgaggcccagtttgatgaacaatttagccaggttcttctgggggagggggagtatcaatgcatagtggactgtcactggaatattctgggtcctaatcagcagctgcccagagatggggtctgagtgtataatgggcaggtacggctgaacagaaacagaggtgcctccaccccaggcaaggcagtttcccccaggtagccataggcctgcagcacagatccgtagaccaggctgggcctctgggtgctgtgtggccttgccccgctcctcccctctctggatcttcacttcctccctatagaaagaggaaactgggctggatgggctatttgtaaatatttgtccagacctagaaattcgtagaggggaacataaaccgaaatggtgcagtacagatccacggtatatatgggtcgggatcaaatggagatgtgaaatgggagcaagcgggtattcagtgcacccccatctgggatctcggagaggctcccctttgtttgtttcgggcttcagggtgcaggctctggaatcagtcactgtttccccgggatggagagaacctggggccaagcgaggagagtgccagcggctgctcagcaccttggtcggtgggaggccactgggctggggaacctggagccttgaggaaggagacaggggccgaagcccaagggcgggcaggaaggaactgttgcaagccctggaggcccgtccataaccgtggatgagtcttctacacatgtggcctggccctgtccaaatgggctctgaaggaggggaagggccctcgtaggcccccggcatattcgcacctcccacccagtcccctgggcagcgcctcgccctgggtccacgtcggtccctttccctctccagagtcctgggcaagcctctttcctcttcctctgaaactccgacttcttccggagggcttcgctcgttccgagggtcctgcgactggaggaggcacatccctgagcagccactccctccccgcagcggcctgtcgccgagctcccgcgccctgcttgagctcgggagagatcgctgcggggcagtccggcccgggagcgagagaaagaacgaaaatgcacagctctctccgagtaaggcgaacagatggagaggaagacgaacaattaaacgaaacaaacagaataaaacagaaacgaaatcgggccccggggggctgggccacccggaggttgggctcggggcgggtgggtggcggcccctcgctaacctctggcctcaccctgtcctggcagacgctgggtcgggccggcagcccgcgttgcgcccgcacgtgcacaagcagacggagaagacgacccgcgtgcggactgtgctgaacgagaagcagctgcacactctgcggacctgctacgccgccaacccgcggcccgacgctctcatgaaggagcagctggtggagatgaccggcctgagcccgcgggtcatccgcgtctggttccagaacaagcgctgcaaggacaagaagaaatccattctcatgaagcagctgcagcagcagcagcacagcgacaagacggtgagcagccgctgggccggaggctcgagtcgggtgggggctgcgcttccgccgcggtatctgcgtgcccttttctgggcgagccctgggagatccagggagaactgggcgctccagatggtgtatgtctgtaccttcacagcaaggcttcccttggatttgaggcttcctattttgtctgggatcggggtttctccttgtcccagtggcagccccgcgttgcgggttccgggcgctgcgcggagcccaaggctgcatggcagtgtgcagcgcccgccagtcgggctggtgggttgtgcactccgtcggcagctgcagaaaggtgggagtgcaggtcttgcctttcctcaccgggcggttggcttccagcaccgaggctgacctatcgtggcaagtttgcggcccccgcagatccccagtggagaaagagggctcttccgatgcgatcgagtgtgcgcctccccgcaaagcaatgcagaccctaaatcactcaaggcctggagctccagtctcaaaggtggcagaaaaggccagacctaactcgagcacctactgccttctgcttgccccgcagagccttcagggactgactgggacgcccctggtggcgggcagtcccatccgccatgagaacgccgtgcagggcagcgcagtggaggtgcagacgtaccagccgccgtggaaggcgctcagcgagtttgccctccagagcgacctggaccaacccgccttccaacagctggtgaggccctgccctacccgccccgacctcgggactctgcgggttggggatttagccacttagcctggcagagaggggagggggtggccttgggctgaggggctgggtacagccctaggcggtgggggagggggaacagtggcgggctctgaaacctcacctcggcccattacgcgccctaaaccaggtctccctggattaaagtgctcacaagagaggtcgcaggattaaccaacccgctcccccgccctaatccccccctcgtgcgcctggggacctggcctccttctccgcagggcttgctctcagctggcggccggtccccaagggacactttccgactcggagcacgcggccctggagcaccagctcgcgtgcctcttcacctgcctcttcccggtgtttccgccgccccaggtctccttctccgagtccggctccctaggcaactcctccggcagcgacgtgacctccctgtcctcgcagctcccggacacccccaacagtatggtgccgagtcccgtggagacgtgagggggacccctccctgccagcccgcggacctcgcatgctccctgcatgagactcacccatgctcaggccattccagttccgaaagctctctcgccttcgtaattattctattgttatttatgagagagtaccgagagacacggtctggacagcccaaggcgccaggatgcaacctgctttcaccagactgcagacccctgctccgaggactcttagtttttcaaaaccagaatctgggacttaccagggttagctctgccctctcctctcctctctacgtggccgccgctctgtctctccacgccccacctgtgtccccatctcggccggcccggagctcgcccacgcggacccccgccctgccccagctcagcgctccctggcggcttcgcccgggctcctagcggggaaaaggaaggggataactcagaggaacagacactcaaactcccaaagcgcatgattgctgggaaacagtagaaaccagacttgccttgaaagtgtttaagttattcgacggaggacagagtatgtgagcctttgccgaacaaacaaacgtaagttattgttatttattgtgagaacagccagttcatagtgggacttgtattttgatcttaataaaaaataataacccggg

SEQ ID NO: 410 - DNA, 17728 bp, Homo sapiens
  source 1..17728: mol_type = genomic DNA; note = NC_000017.11:8002615-8020342 GUCY2D [organism=Homo sapiens] [GeneID=3000] [chromosome=17]
gtacccacgcccccgccctggcctgggctggcaaggaagacctgtgggcgggcgtcaaaagggggaccggccctgtgacccctcaccgggggccgtgggcccgagcccccggacttccctgtaaatgtcagaggcccctccgctgggatagggtcggtctgagggcgcaggcgagtccctgctgacccctgacgcctccgacggggggaggggcaggccgggtgggagcgggaagccggggcggcagaagggggcttcggggcggtgtccttggccccagttagtcttcccagcctccggagggggcggtagcagcagaatcatcccatgggttactcgggcttggagaaactcggggttacggggagaaccctaggggaggccggggtctcagtcgctcagcctgctccgtctgtgttcgcagaagccggcaatgaccgcctgcgcccgccgagcgggtgggcttccggaccccgggctctgcggtcccgcgtggtgggctccgtccctgccccgcctcccccgggccctgccccggctcccgctcctgctgctcctgcttctgctgcagccccccgccctctccgccgtgttcacggtgggggtcctgggcccctgggcttgcgaccccatcttctctcgggctcgcccggacctggccgcccgcctggccgccgcccgcctgaaccgcgaccccggcctggcaggcggtccccgcttcgaggtagcgctgctgcccgagccttgccggacgccgggctcgctgggggccgtgtcctccgcgctggcccgcgtgtcgggcctcgtgggtccggtgaaccctgcggcctgccggccagccgagctgctcgccgaagaagccgggatcgcgctggtgccctggggctgcccctggacgcaggcggagggcaccacggcccctgccgtgacccccgccgcggatgccctctacgccctgcttcgcgcattcggctgggcgcgcgtggccctggtcaccgccccccaggacctgtgggtggaggcgggacgctcactgtccacggcactcagggcccggggcctgcctgtcgcctccgtgacttccatggagcccttggacctgtctggagcccgggaggccctgaggaaggttcgggacgggcccagggtcacaggtaggctcccttgcagggtgcgaggaggtcggctggtcctgccggcagccggacggcgccgcgagccaagcctctgtccgcagcagtgatcatggtgatgcactcggtgctgctgggtggcgaggagcagcgctacctcctggaggccgcagaggagctgggcctgaccgatggctccctggtcttcctgcccttcgacacgatccactacgccttgtccccaggcccggaggccttggccgcactcgccaacagctcccagcttcgcagggcccacgatgccgtgctcaccctcacgcgccactgtccctctgaaggcagcgtgctggacagcctgcgcagggctcaagagcgccgcgagctgccctctgacctcaatctgcagcaggtagacggtcccgggaggagggaagaaggcaagggagaggggagaggacagccaaagcagggagaggaggatgcagccaatggagaaagaaccactggcagctctagctgtttggagtttcctgggtaatgtagaggctctggccccacttggggtctcttagtgtacgaggattgcctctagagagtaggcaattcgacctctcaagtccaacatcaagcagtaaactctaatgaactgtaaactgcaaaaccttttgcaattggcttcaaagtaaacccgtttccaccaccacatactcccagctgtctaaaataaatacttggtgttcttgaaagcaggaaggagggaggatgccaatccaaccttcatccctagttcagaggtatttcctctggggcctcatctggtggtcttagcttttcaagggcctagacaccttgcaagaagcagaaagttccctgggtggattcaggggcaatcctaaccagatccatagtgtatttccaacatccagctaatacctagggatccccaagtccccagaatcccagttcagatcatctaactttactcccgccacaaagggggactagaaaccactatgagaagggaatttagatgtcaacgggcagtgaattaaccaccacaaaggtccaactcacaggcggctgcatgagagaagggtcgtaggggttgcaatttcccatcgatgcccctagattcttccaagaggattggaggtgtccaatggaggggggaggggtgcagtgatgggaatagtcagaagagaatacaagataggaatcataatgagatgggatggagggagggtcggtcagtggagagagggaggttgagaaagtagagagagaaaagcccttcagctctcagtaagtaccacagcagtcctctccactgcccaaactgcgcaagcctctgagcgtgtgagtcacccttgattccttgaattcttcgcccccacttccaggcatcaagccctgttactgttacttcctaaagatcattcgaattcatccgctttctccatctttactgtcactgccctgattcaggccacagcacccccagcccaaatcccaaaacataatctctcagatggtctctgcttcaacactcacctgcccaacacctttctccagatcaagcttcagaaatctgacagatctcaccctgtcatgcccctgttcaaagcctcacagtggcttctgttgccctggatagatgcaggcctctccacatggcttaccaggtcacctgtctttctctctcttccacctcccatgaacttcagccagaccaagctactctgggttcttggaatgtgtccttctcttttgcctctgagcttctgagtgtgctgtttcctctctcttgtccctgcctcccctggataattctgactcatcccctgaaggatggtcacttctaacagctccttctctgtccacagcctagggtggggacacccattcctgtctctgcagctccctcagtttcccctacttttactcattgcactgcctgaacacccctgtctctttggcaagaagaaaggttccttgagacggggtctgtcttgtacactgatacatctttagtgctctgcacagtgcctggctctctgagagatggcaactgggaataatagagaagcctgataagatcgggtggtaacaatagagaaggttttttgtttgttttttgtttagtttttttgtttgtttgtttgtttttttaaggaacaacagaaaatagaagccaaccaaaagataggtgagaaggcttttaggtgaatggtaggtgatgaggttaaaactatatgctgggcaaccaacaggaagaagagaggacctacaggtgatggagaattagaatcaaccaatggtcagagaggaggctgagtcctgaaaagaggaaccagttagtggggagagcaggtgtgacagccaataggagagggaggaagagagagccagtggggagggaggaagagagagccaatggggagggaggaagagagccaatggggagggaggaagagatagccaatggggagggatcctgggaacaactaactggaaggtggcaacagtggataccctgggcttgacaggcagtgaaagaatctggtctgtctgtgggctgtgaccccgacctctgagcccctactctccttctccaggtctccccactctttggcaccatctatgacgcggtcttcttgctggcaaggggcgtggcagaagcgcgggctgccgcaggtggcagatgggtgtccggagcagctgtggcccgccacatccgggatgcgcaggtccctggcttctgcggggacctaggaggagacgaggagcccccattcgtgctgctagacacggacgcggcgggagaccggctttttgccacatacatgctggatcctgcccggggctccttcctctccgccggtacccggatgcacttcccgcgtgggggatcagcacccggacctgacccctcgtgctggttcgatccaaacaacatctgcggtggaggtgagggcgagcaccccagtccccactgagacaatcgccatggaccatccacaaagtgatgaaagagagtggactcctatcctgtaatccgtcttcgatgcccttctaggccctctcccagcctctggcttgcacaggacccctctcttgctgagctccaaagccctcttggaaattttctatcattcccagcctctcccctttgaggaactatgacctacccctagagcctctctgggcccccatccccctttcctggaggggccagcatgtggcatgcctccctagagaagaggcctcccctggcatcgctcctcagtatacctcctgtcactgtcccttcaggactggagccgggcctcgtctttcttggcttcctcctggtggttgggatggggctggctggggccttcctggcccattatgtgaggtgagtagtggaatgaggtaagtaggaagtgagcttgtgccagaaatggaagtctgcagcaaaaacagcaggctgggttcactcaggagtagaggaggagatttttcttggggtgagggtgttctggtgggctggtagagtcccaggggatgtgtgctttggggatggctgccctccaggacccctcccctgagccaacgttatccctcccccgcatcccctgctggtctcttctgacggaacttggtgcccttggtggaggtgacctctttctccaccaggcaccggctacttcacatgcaaatggtctccggccccaacaagatcatcctgaccgtggacgacatcacctttctccacccacatgggggcacctctcgaaaggtgggggaggcagagaggcaggagccagttgtcttctttccgtaaatttggttccttccctgggccagtcccgaccccagctccctacttgggaagcctgatttctaccccagttctgtcccacgtctgaagtctagggatcagcaccctcatctgtgcaatgagggtaacagtacctgtcctgactactttcctggcggggaggtgaagctccaacaagaaaatgaatgtttgctttgtaaactgtaaagcgtgcacttggggagtaatgtcattatcaccttccctcattgagattccttcgcctcccatctttaaatccccaaaactcagcctgacctcaacccaggactctgacaccagaatatattttgacctcttgcattgacctctacctgctaggtggcccaggggagtcgatcaagtctgggtgcccgcagcatgtcagacattcgcagcggccccagccaacacttggacagccccaacattggtgtctatgaggtgagcctgaccccagccagacagagagacagtgggggaagaatgctcaggccctgggcagaggggaggcgcactctcaggaggacatgtagtcatgtcaaatcctgcaggctccaggagatgggggatgggagcccagacaggatctagggaaaggtcatggatccctcaaagggaagcacctaggaatcttccctccccaaggatttttctctagccactatctgggtaagggctcctcaaaagctaaccacagtgacccagagactggaggctggagctgccagggagcatgctgggaccagcaggtaacatggtgtggccactgagaccatctccggcctggtcagagcctctggccctgcccctcagcatttccacccaattcagaccagactcaggaatagcaacccctagagggggaaaagaaagtcacaaaaaagtattaggacattaactttggggctggtaaatctgaatgcggtcaagtggaggggagatgatgagaacagattgagagagagctgagagtgctgagcaaatcaagagagtagaaatttagagctcctgggcttcaggtcatgggaaggaatgcagaggctcctatcatgtcacctagagatcatcatggccaattctcagaggaggcactattgtcatttggggcagattgtcctaaattgtatgggactactctgtgccttgaagaatatttagtgtttcttgtctctggccctgtccactaatgcagctcctagtttttgtgacagttaaaactttccccacatttatttccaaatgctccttaggggtcagtactaaaccccaattcccttctaaattcccttctagtccaaatcccttataaacaagacagggccacctgcataattagcgagatccagggcaagatagaaatgaggggctcctcgttcattcatgatgatggcaggaggtcattgaaccaagcttgggcccttcggagcacgaggccctgtgtgactgcacaggtcccatgcctgtgaaccggccctgccaacagttgaggatgaggtccagcatcaggaggggagctgtctatagttcagttagttttcaataaagcctgatctacccagattttttactcccagaacatgttctctcatggcagtggatggtaatgagggttgtgatgtcgatgacacttgtggttgtattaatgcacttaataggactattggtgggcacagctgggttggtgaggacagccatccatggcttcagaatctctgtcatccaggggtgggccctctcccagatggctgtgaagtggatgggcatacatcaaaccccttggttcaatgcattttgtcacatggaagatgcattctgggacagtgagccaatggaaatgagggggaggggttctagggctccccatcgtgggattttaagagactgagttccctacccccatcctctttgctgcagggagacagggtttggctgaagaaattcccaggggatcagcacatagctatccgcccagcaaccaagacggccttctccaaggtgagacttgggcctgtgatggggcctaggtggccatcggtttctccctccttgccttctctttgcagctgggtacagaggtaggtctcagttaagtgtcccctctggctgagtgtggtggctcatacgtgtaatcctggcactttgagaggcagatgtgagggaggatcacctgaggccaggagttcaagaccagcctgggcaacataaagaaaccctatctctccaaaaattttaaaattagctgggtgtggcgttacatgcctgtagtcccagctactcttcagagggtgaggagggaggattatttgagcctgggagttggaggttaccgtgggctgtgatcatactactgcactccagcctgggtgacagagcaagaccctgtcaaaattaagaaagaaaaaaaaaaacatgtttcctccaccctggagtaggctttcattattctctgccacaccactagttctttcctttgatcttgttgcaatgtgcaattgtatgttcatctgtctgcctgcttgtttctgcctctctcgctggactgtaagctgagtgagggcctcctcactcccctccattgtaatcaagcacccaacacagtgtctggaacattagagagacccagtgaatgtttgttgatctaatgatagaaaataaaaaatgagtttccggttctgtcaggccacttgtgcagaatagccctggacattctgaatgaagtgcaaagttggcaaggaggctgtaaatggcttattctggtccttacaaccttaatgtctccctttatctccatgccatgcagcctgggcctggccttcttccctgattcctctacaggagctcttggtcacagatgcagtgacttaagtggactatgtgtatggggattaatgaactcgatcaccatttaataccaggtgtttaaaatgaaaagtatctgggcgcggtggctcacacctgtgatcccagcactttgggaggccgaggcgggcggatcacgaggtcaggagatcgagaccatcctggctaacacggtgaaaccccgtctctactaaaaatacaaaaaaaattagccgggtgtggtggcgggcgcctgtagtcccagctactgtgggaggctgaggcagaagaatggcgtgaacccgggaggcggagcttgcagtaagccgagatcgcggcactgcacttcagcctgggcgacagagcaagattccgtctcaaaaaaaaaaaaaaaaaaggaaaggaaagaaaagtatccccttattgggcatgtggagggaaaagctagaaagggcaccagtcagccagctaagccacctttttttctagcatgccccgattgtgagggcactgtcctgcagagcagtcagtcctgtcttccctaactgagggagggtgggagtctcagacccgactgacacaatgacgtaacgccaagcagagcagcccccggccaggttgcaggcacacgccatttctggtgtcctttgaaagtggcacagcttcaggccgggcaccgtggctcacgcctgtaatcccagcactttgggaggctgaggtggatggaccacctgaggtcaggagttcgagaccagactggccaacatagcaaaaccccatctctactaaaaatacaaaaattagccaggcatgatggcacacacctgtaatcccagctattcgggaggctgagacgggagaatcgcttgagctcaggatgcggaggttgcagtgacccgagattgcacgactgcaatccagcctgggtgacagagtaagaatctgtctaaaaaaaaaatacataaacaaaagaaaagaaagaaagtggcaccgctcctccctggctctcccagcaaaggctgttaaatcaggagaggatggtggttccaggagcttctccttcatgagctgcttcccttaagacccaggcagttcagagttttatggctggggccaggtgtggtggctcaggcctataatcccagcactttgggaggctgaggtgggaggatcatttgaagccaggagttcaagaccagcctgggcaacatagcaaggctcccatctctacagaaaaaaaattttaaatgttatctaggcatggtggcacaagcctgtagtcccagctattcaggaggctgaggtaggaggatcacttgaaccaaggaatgaaaggtagcagtgatttatgatcatgccgctgcactccagtctgggcaacagagtgagacctcgtgtctaaaaaaaaaggcttatgatcaataaatccgaacctgcctgggtcctgatcaccaatgcaaagttgtcttttcattcacagcattaggctaaaccatactcagtatccaaacagtggcctttgactatattgttttttccaaaaataggactatgtgtagaagagagcccccgtacataccttatcaaccatttcatccaccatttgtaaaaatctcatcttctgggtctggatactcaaaaacagatcttgattaacagccccttccccacattgccctgggcagaaaatgcaagtcaactctccccctctcagctccaggagctccggcatgagaacgtggccctctacctggggcttttcctggctcggggagcagaaggccctgcggccctctgggagggcaacctggctgtggtctcagagcactgcacgcggggctctcttcaggacctcctcgctcagagagaaataaagctggactggatgttcaagtcctccctcctgctggaccttatcaaggtgtgtgtctgggggtggtggggtgacgtcctgggggcagggatggggagcaagggaaccaagcaggctgaggctgcctcttaccctacccattccaagggaataaggtatctgcaccatcgaggcgtggctcatgggcggctgaagtcacggaactgcatagtggatggcagattcgtactcaagatcactgaccacggccacgggagactgctggaagcacagaaggtgctaccggagcctcccagagcggagggtaagagtcccctgtgcagacgaggatccaccgggatccccattatttcaagggcttctcccccgcttcctccctacctctgccctcgcactctcttcatcccacatccaccagacacaattcctgctacagaaaagatcttgtggcctctgagagggtgggctctgtgacttcggagacggggctgctgggggcgggacttgtacctgagctgcctgcagcagggtttgctctgattacaagtttgcctgagggtggggcttgtgcccaagagacggagccttccctgggcaccaccttttctgaagggcaaggcctatttgccaggctttctctgagatggctcctagagatagttgcagggctggtctcaggttgcagggtctcagaccggtctcaggctgcagggttggtggtgtctgggtgccaacctgggctttctggtgagggtgggagtctttccccagcggcgcctcagccccttccccatccccagaccagctgtggacagccccggagctgcttagggacccagccctggagcgccggggaacgctggccggcgacgtctttagcttggccatcatcatgcaagaagtagtgtgccgcagtgccccttatgccatgctggagctcactcccgagggtaaggctgccctgtgcgtggagttcggcccacaggggcaccctgcagttagaaaagagccagcctcactctttcctctaaagcaaagcccagtgatgaaactcaattatacggaggcccccttaaagctggcatctgcaggtctgggtgcagaaagccgtgcatggccagggtggggagcgtggttcattaggtcccagaccacaacagcttcctctttcttgatgctggaaccaaactgtttccacaactgacagaacagactcctctctgttctcaggggtccctgggaggagcaggggagggggagtgggtgcatcccttctgcacaggactctgagcaaactacttgatcacctatccctcacttgtcttacatacaatatgttagtttctttgcctatgtcacctcttactgacccccagagttcgaggtcctcttgttcctcctagcaacccccttccacactatactctccctccacacacacacactgaacctctgatgtaaagaaacccctgccaggcaccccctcccacatcttggtcttcaacagtcaggccagggtcagaggcagcctttgtgttctgggggcactccccctcactgtcccctcatgcctccagaagtggtgcagagggtgcggagcccccctccactgtgtcggcccttggtgtccatggaccaggcacctgtcgagtgtatcctcctgatgaagcagtgctgggcagagcagccggaacttcggccctccatggaccacaccttcgacctggtcaggggctgggagtgggcaaggactgggctggcctctgggatcccagatgcttgtcagcaacctgagacagctgcagacaggcaggctggcaggacctctggccttccaggctacctcctaaggagtagcctgaagactcggagtttgggggcagaattggaatgggggctgtggaggcttttggagtgggagatagagttctgtctgggtgggaggaatattcaattcaattcaaataacactgattgagaaccaagtatgtgcttggcctgctgtgacagaaagacccttggcctgggagcccaacgattgggctggctccagtgccctgtcaattactagctgagatcaactgacctctgggaaccctcatttcccacgtgcctcctaatcgtgtctgaaaacacagtgcccagcaccccggggtgcttgatgaatagtagatgaatggtggcagcggggttggggttcagagtgaacagccccatgagagggcccatgaggggggcataaagagggcatggcaacccaggtcttcagcagctttaccagcttccttctactgctagttcaagaacatcaacaagggccggaagacgaacatcattgactcgatgcttcggatgctggagcagtactctagtaacctggaggatctgatccgggagcgcacggaggagctggagctggaaaagcagaagacagaccggctgcttacacagatgctgcctccgtgggtgccagtgggaaggggtgggctgggagggcagctggagcccagccaggtagagtggcccccaggtgacctcactgcctgccatccctaggtctgtggctgaggccttgaagacggggacaccagtggagcccgagtactttgagcaagtgacactgtactttagtgacattgtgggcttcaccaccatctctgccatgagtgagcccattgaggttgtggacctgctcaacgatctctacacactctttgatgccatcattggttcccacgatgtctacaaggtgcagtgtgtaggggacaagccctcctgaccttcaattcagcttcaccagcctccagcccagcccttcctgcgcagcccctagcctacctgcccaatcaatcttctttcccagacctcctgtcccttatttattcctccagtccccagctcagtccttccactagcaacctggttctgcactaaccccaggtgggcccggtgacaagaggcaatcgcttcgtgtactcggggggaatgctcaaaagaaaattcacacaactccttcttcccccaggtggagacaataggggacgcctatatggtggcctcggggctgccccagcggaatgggcagcgacacgcggcagagatcgccaacatgtcactggacatcctcagtgccgtgggcactttccgcatgcgccatatgcctgaggttcccgtgcgcatccgcataggcctgcactcgggtaactcccgggtcttcccaggctccagcccatctccctctttagggcctggccccagatttcctgtagaggaggcaactcatggagcggggagtggggcttaccttgaagaggatgcacttaacaaggcttatttggggggctggtggagataatgggtgcgaagatcccccgaggccctacctaggtgcagcccagggccggccctgctagccccgccgacccccagcatctccacaggtccatgcgtggcaggcgtggtgggcctcaccatgccgcggtactgcctgtttggggacacggtcaacaccgcctcgcgcatggagtccaccgggctgcgtgagtgtgacggggacaagacggggaggtgggagggggacacgggaggtgagtcccgagctcacggcgtcccccaccgccacagcttaccgcatccacgtgaacttgagcactgtggggattctccgtgctctggactcgggctaccaggtggagctgcgaggccgcacggagctgaaggtgaggcagggccccaacccctcccggaggccccgccctgtcctgaggcaccgcccatcccgggccgcggctgcaaacctcagctcacccttctgacctggtctcccagttccacgcagactcgagatcccccacccctcaccccagtccgcctaagtccttccctctcccatgtctccccagggcaagggcgccgaggacactttctggctagtgggcagacgcggcttcaacaagcccatccccaaaccgcctgacctgcaaccggggtgaggggccggcctccgcggcagggcgagggacgagggacccctgcctcctgctctgtgtctgaccccccgcgcgcgaggcagcgatgacgtgggccctgccctcccacgccccattccccttccctgaggccaccgccccctccttgcaggtccagcaaccacggcatcagcctgcaggagatcccacccgagcggcgacggaagctggagaaggcgcggccgggccagttctcttgagaagtgaggcccggccccggacaggtactgccccctcagccccaaccccagctgccgcgtcccctctgctgcctgcagaacgtcccacccaagccaggtgtcccgatccctttctgacttagagagcccaggctggttcctaaaccccggggcttcccctgggagggaagcagccattgcaggaattttggttcagtagatctggagtggtttggaaatccaggcttaggaaactccgtaatcggggccttctgtggcccctcccctggccctatctcatccccagtgcataaacctggcttccgcagaagcctcacaggctgtgcactgcacaagagacaactctagggggcagcagtcaccagagaacaatgtgaaagcagaagccgtgcccactcccctcctgcaagaaactgacccgtgacccgctccttcctaggtgaacccccatgacccctttcctcgactcccctctgagatacccctcttttcttcaggattgttctggaaggtccttttcctgaaagttgctgctataggtgactggaagtctgtctaatgctggtggactctgcccagctctgcctcaaaggattttgggccttttacaagagctggttgcaaaaccagccatgtgaccttgggaaagtgtcacgcatgctctgctgtgatcccttcagtggcaaaatggggggtggcctaagtggttcccaaggcccctgtgcacctgacagctgggtggcttgtggccctcacccccaggagccctgagtccagcaggggatgtgagggtcagggattctccgcttcccagtgtctctcagggacccaggaaggaggatctgggattgatgcccgaccccagaggaagtggagttctgttccaccagagcagggtttgtcacatggcctgagggggcaagggctcctgtttagcctcaagcttcattcctatctccatctcccaccagtcagaaactggctgcttctcctgtgggtataatcagggaacttgcccaagtgcagagaaaagcttgcttcaatgctttgaggaaaggaaattgtgccacaccttgactgaccagaacatccaaagagcggcattctctgtttaactaggagctgctgagcaagcagttggacagaaaatcctctctgcttagaattttttctttttttttgagtctcactttgtcacccaggctggagtgcagtgcagtgacacaatctcgactcattgcaacctcctcctctcaggttcaagtgattctcctacctcagcctgccgagtagctgggattacaggcacccgccaccacgcccgggtaatttttttgtgtgattttagtagagatggggtttcagcatgttgcccagggtggtcttgaactgacatcaagtgatctgcccaccttggcctcccaaagtgctgggattacaggtgtgagacaccgcgcctgacctttgcagcaattatcaatgccctgtcctggcaagtccccagttgaagttgcctttgtgaaactctgaccttccagagcctgggccttggcacatttgactcttggtgtctgtcaccattgctacagaccctggaagaagtttgcagcaggctaggaaaccacctaggctgccaccagaggtagtgagtgtccagtccctggaggtgtgaaggcagaactggagacatcattgaccagggatacgacagtgagagggaattccggaactgaaccttcactacaccaagtgtggttggtgggccagggtcggcactgcctgtgagctcattagaaatgaaggatctcagggccccaccccagacctgctgagtctggatctgcattttaacaagttcctacaaaatattgacacgctcattaaagtttctgaatcatagaactaaatcaccctaagatctttaaatcttagaatctctaagatctcataaagccaggctacaaactagccaccaaatttcttttgtttggcctatagagtgttttgttttgagctaacatttaaaaatcaacagcttccacattttaaaaatgtatagcagatttcccccttctcttgaaatcagaagccccacatggtgcttgtgtcaccacttaaccacattctgctgcagctaaacagcaacagtcccctttatccagatgtcgccactccccacagactccgagacaccaagattttttgaacattcctttatattcctgcctggtgcctgtagacattgagcttaggactccttagcaggtattaggattacaggggctcctggacgggactttgccttcttttttttttttttaaactgattcatgacttccacaagcttagtggtattcccctccttcctaaaggtgaaggaagaatgtatcaaacatcgagaatccagcacttgtaagttctggttaccgaaggtgatgttgctacagagagcaatttagtgcaattttaaaaacattttaaattgaatttaaatacgatgaattaaagattaaaaacaaaacaaaacccgggcatgcacacacacacatttttaaaagttatttacattcttgaagattttccttaagattttctctgtacttaggtcccagggattgaagcgcagattcacatctctggccttggacctgactgtgtggatagagctctcagcctcctgtctcttccctcccgtacccgaccctgcagcccttccccttccttccctctctccctgcctgcaagggcctggagtagttaatggtgtgtgatttcggctgcctcaaggaagagtccaggattaggtgcagagggattagctgggacaggcttaggcagggctcctcccggaagcagaggcggatgagccagagggcagacccagtttaaggtagaagtggagtgggcagggctgagccagttccttcccaccttcactcagcctccttcccaggctggcctcaagctcaagtgaccagatgtgatagaagagccctgacccctccccagctagaagaacttggggaacccccaccccagagttcacagatctagtgggagaagagaaggcaaaagatgaagcctcagcctcctctctgtgcctcagcctctcctttctctgttcctgcctccctttctgctctattctcctgtctttgtgtccccacagtcccctttctgcctggcagtctctgtctgcctttctctgcagtttccaccatttctctggaaatcttatttcctggacccagtcggttatccagtctcagggctctgctgactcaagtcctccccaccctgttcctgtggcctgggcaactcccagcgcatgagagcaccggggcctggcttggtcactgggcatcccccaccttcagatgtgtttacactacctctgccagctggcctgcgccaggagcccacacttgcggttgtccttgccttggagatggctctgtagctggcagagcagtgatggccaaagcagggacctctcatagctgctgcttcaatcccacggcagagactctacagcgtgtcccggggctcacctggcgccttttttttttttttttttttttttgtgcttctccttagggtctgggccctgctccctgtcccatctgcagtggaccccaggcacccccctttgaggaggtggggtgaactgctccttggcagggatttgtgacactgcattgctgggctgtgttcctcgggctcttctggaccttgcaccgtggataccaggccatgtgccatggtatttgggtcctgggagggtgggtgaaataaaggcatgctgtcttcca

SEQ ID NO: 411 - DNA, 17788 bp, Homo sapiens
  source 1..17788: mol_type = genomic DNA; note = NC_000008.11:104339087-104356874 DCSTAMP [organism=Homo sapiens] [GeneID=81501] [chromosome=8]
tcatttcaacagctctcttcatcttcaggactaagtcagccccttacacaaaggactcatgagggacatgcagtctgtgtgcccagcctgagcccaagggtctattctgatcctttttttttttttaagataaaggtttttgcaggtataataggggtctccaacaaaaagtaaagaataattttgtagaaagattttgagactttcctaactctccgaaactacacaagctggtccttttgacttggaagctaaatttctaagatggaaagtcacatgtatgagtgggaggcatgaaaccaattattcgacctgtctggggtcatgagtgcagaggcggctcctacgaaccatctgcctcttcaagtgtggatgagaggtgggtatggcggatgcttgtcatttcccaatggctcgagtggatgtggggagtatgggagtgagggcaaaagagaaaagagggagagaggccgtccaagctttcacaactcactctcttgtgtttgaaaatatctgatttcattattttctataattaatttctagaacatctattctgaggaaaatgctagaaagaaatatgctattcatttgtatcagcattactctttgttgatattaaatggctcagtcactttatgggggaaataaagaggttgattcatggtgatgtgaccctctcgacacttctggttccctttttcctgctatatatcaagacctacagcccttgggaagtgcatttctgcattcgaagaagaatctgagagaaacctgtaagtaaactttcagaataatcttatttctaaaattgcttttaaaaaagtactagtaaattggaataaacaattgtgaccagagcatactttaaggccccctataccccgacagtctccctatgtatggaagtatcagaaagtcttttcatgttggtatctgaatatcctctgctcagggaaaactgcagcatgaatatcttcttatgggtgtagcctgggtatacgcgagccacccttcactttatgaatcccctcagctaatcctcctggtggttatggggagccctaggctggctcagtcctgcctggccaacgatgcagctcccggcacctggcacacgcagcaatgggctgaattgttccgtaaatgctattctgtttacctagtagcgttcattaatctttcctttcttgtgtgaaggctgctttcacagaggaaggcatttgctggctttcccaaggcaagaacaatgaaaacaaagtcatgaggagttctctctacctcaaatgaaggccgcagctcctgctcaagctattttggcagtctgagagaacagtacattctgaaccacattgtaagtttgcaagagcttatacaaaaaagaaagggagaaaaaaggaaaaggaaaagaaaccctccattcttcttttgttccactcccaggtgctgggctttgatgttctgtctcagaagtgactgcagaacgccagctccaagaaccagctccgctgctcactgcacctttcatttcagagagcatggggctagtggggaccttagaactcagctagcccataggagctgaggtccaggaggtgacatgacctatccaaggccacgcaacctggcttgggtagaggcaggttggaccacaggtctccgtttggcgctcttttcctgttctgctctgtcctttgatcaaattccttttaaaatgagattcacatcaagccagtgagggaggctgatgggttcagactgggttcccgcaggggaccggcagggctggttgaggagtacagaaagaacagagtgcttgtccgtttgggtttattgtcccctggggtgtctgcagactatatctgggcttgttgagcataagccattggcttctgcacaggcagagtcagaatgaactggtgtcacttaatgggaattgcaggacatcagatgaggcaggagctttggaaatggggagagaggggagcaataagatgctcccaaggtcattgtctcctggcctttcctccagagaaggtcacatttcttcctcccacactttcaatagcagtaagcctgtgggtttctgcttaccagctctggagacacatgggtgatgtgcagcttcaatacccctccagtctagaaagctcctagggtgggccattcatgtggagattctcattattatttcatggctccattttttgtagcttctgactggaccttgtatctgaagcaaggacacattcatctgcaccttgaaagttgatctgtgctcaaaagacagtgctcaggaatgccggtctccttcactcatcaaaaaggtggccaaacagagctctgtgggtgggggctgtgagccctgtgccctccatgctggggctctcaatgctcccactgacactgagatcccatgcagggaaaacgattgaggtgtatgtaccttgcagaggtgtctgctagctagcatgggcagggttgatgtggaagtctggctgtttctgtttcccatggcaacagcttggccctgcatgaaagcaggtaaatgtgggctcaagccagatgcacagactgcatggctctgcagggctctcagctcaaatcagggctcttcatccctaaccctgttctgctattttcctgttcccttccactcagccacaaaaagggctttaaccccatgaaagagagatggggcccttggtggtactctgctgtggactgctaaggcttccctgcctgaggtgtggtagaaactgcagttctgagataaaagcaagagagtggccattactctagggatagtgctgttggtaaaagccagaaacaggtattgtatcctggggacacaagcatgttgagtcaggaatagacattattgacaatggaggcaaaataaagagaaattacaggttaaagggatcaggtaaacttttagatgctgccagaaaaaaacgatggagaggcagagggagggactctgtaagcacaagagaggggaataaaacagttagaaatctttgggcaaaaataaacatttccgaggtatagaggaaaacctttatttgtgagactggaacttggtttaagcatggcttttaaatgtctccagggataaaaggggaaaaggtaattcacaggaatggagaagaggagggctaaggtgagaagccagccagagaggagagaagagagccatgtgaacgtcatctgatgatcaaggctgcactctcacaatccgtggccaaaatcagccgtcagagtgtttaaaaataatttgagccaacagttttttaagaaccagaagatgtcacccaaagaaatctagatttctgacttaaaaaataaaagtcagaaaatctggtgactgcctccatagagaactttcaagaaaatctgctgggttggaggctgctgttcctacaagttaaatgggggcatgggctctccagccccccagagacccatggcccactggcccacaccccacactcccaaggagtatctctatctccttacttccttcactgtttctggtgcttgtctgacccctgtaggcatttgaaatgctaagtgctgcctgcaggggacaggatgagcccccattcctgaccccagctcaacagggaaggtgagaccaacacggaatgcacttttcttccccatccctgggagagatggctaagttgggagagacagcccttgatctggacctcagaccaggatgggcctgcgtccggggtgcccgagtttaaggggtgagcaaggtgagcctaacgctggctgtaacagtctctgagtaaaatataggtattcacgactgcacgatgctgtggagcaagtgttcacctggggaaaggagagctgcagtcagctttagatggctcaataaagctatgctggcagaggaggggaggaccctggatgtggttgacaacgcaggacagctcatcctggcatggtgaatctgcatttcaggattcttttgtgattgggatcctgggaatatagttcaaccaaattcagaagctgctctatgatcatgtcaaagaggggctgagcagttgtccattctgacccctcagggtcatttaaacatgggttaaaatcctggctcttgcacttattagctgtgtgaccttgaccaagttgtttaacctctctcagccccagtttcctacctaaaaagatgtagctacaatagtacagggttagaaagcgtgtatatcagatgctgtggccaggcataaagtaacacattaataactaccgtctattattaggagtatttcactaagcctcagacattgacacaagctatagtttgtctgcttctctaattatgtattctgtggtgactcaggaccaactggatattgttatggacagaatgtttgtgtcttctgccaatttatttgaacccccagtgtggctgtatttggaaattgggtctctaaggaagtaattaaggttaaatgaggtcctaagtgtggagccctcatctgataggactagtgtccctataagaagaggaaaatgtaactgcctcaccattgtctaagagagagacaagagactggcagccaaacagagcagtgggtaaaatgatttctgggtgccatgttggaaaagtctttgtacttaattaaaggcgacacagagtgaagagataccagagagctcacccaccttctctccccgccatgtgaggacacagggaggaggcagttgtctgcaagccggggaggggtcctcaccagaacccaaccctgccagactttgatctggaacttccagcctccaccactgtgagaaatcaatttctgctgttgaagccacccagcctgtggggttctgctatggcagcactggcagatgacaacaggtacataggaaattttaattccattactcaggaactgtagtggaattttaaaacaggactcatgaaaagtcagaggtgagatattaatgtgatgggaagtgtgtcaccaagtggtggaaaactgggggtctccctcctagcttagagtcccttagcctctttggattttattttcctcaactgtgactatcagccagggaggtgtcaatcaaaataatctggacttgtgctatccaatacataggctccagttatttatttaactttaagtaatttaaattttatttaatcttaatttaaatgtaagtgatttgatttattaaaattaaaattaaatatcataattaaataaaataacactaaaagtaattaaatttattaattaaaattaagtaaaatttaaaattcaatttctcagtcgcatgagccctatgtcaagtgctcatgtggccagtgcctcctatgctggacagtgcatatatacagcacgcccagcatcacagacagttctatccaacagcgctgaattctagagcttgctacctgaagcctagtcttcacgagagcagcttcagcagcacctgggaaattgttaggaatgccaactctcaggggccaccctaaaccttctcaatcaagatctgcattttcacaagattccctccagtgatcacgtactcaagtctaagaagctctgaggtatgattccctccagctcaaaaaagaaaatttatgaatctgggtatctgcttgacaaagtctttgagaaagaaaacacttgcttagcttatcaaaattccagtttactgatttgcctaagaggaaagaattgaaatatctgaaggaagatcagcagaatggctgcacctccacaggagcaaaaagaaatcagcagatgtctaaaggaggcatgggtggcgtcaccgtgcctggagggttgtacaccttggaggttggtacaatccagctcctatctctttttttgtagttgttttttaaaaagagagatgggggtctctctctgttgctcaggctggtctcaaactcctgggctcaatcaagcaatcctcccacctcagtgtgggattatagccatgagccaccacgctcagcctccagtgcctgtctctaagcctcccgtcagcttgggcattcaatctttgcctaaagagcagagaatggacattcttcattttctgtggcagcaaagaaacaacaaggaatgagttgcatttactggggaccttttatccagagagtcttaaggtgcttgctaaggttcccctcattaaaccaaagggagcaggtaggtcatatattcaattagggaaaatgaggaacagagaagaaatcaatgccacagtcaacgatgccaaaagggcagactggaacatcagcctttgggctcatgggccgaaattgtgctctggagcttgagctgtaaaataagagaagataccttcagtcctctcactgcagaaagttttggtgtctggtgacgtgctgtttttaacacaaaaataagaaggataatattagagctgttgcctgttaagaaaacgtgttcttcttacaggacaaaattgcagtcgtatatcttctttaattgatactagattttattgcagaacgttaaaatgttaatgtgtccataaatctttttcatactttcagaaaaatgtctgtattaggaacacactgtacaaggatgaaggcaagagaaaggaaaaatgaatccagaatatacattattaattttttaggaaggaagcaaaatggtgcctcataaaggaaattagaaaaaagttaaacagctgggatttctgatttcctttaaagaagaatctgctagtttgagagatatccttacagagtcaactattttgatgcagggaacaaaaagtgagcagataatggaaatgggcttgtgatatacaggtcagctcttaacagccactggcagaaggtgtgatgcctccagcaggggcaaacagtgagctgagggtcctgtcacatcacgcagagccatggaattggggcatggtacagatgacagggcctgcccaggagttggggaagtctggcctaaatcctgctgtgccgtctccactgtgtgattgctgacaaattccggcaagcactcagagcctcagtttccaatgtgccagatgcaaagagcatctgcaggcttggggcacggttagagagatgctttataaaaagtgcttacaatgtaatagggaattatcatcttttagggtatcaatcaaataatggtttggggtcaaacccaaagtaatgggagagcaaagagtcatgcctgggaggagaggccacagctcctgacttggtctggtgctgggcatcctgccctctgcccacctgcccgcagtcctcctgcctgtgccgtggagcctgtctgactcggtctgtaatgccagggaaggttcagcagcacaggggcctatggtaaggcctgtctctatcttcacccttcagtccagcctctgattccaaaaggaagcaagctttcaggaaaaaggaactatggccttttgctggcccccattttaattaccattctaattccctttcctgctgatgctgtcagaacatccttatatgtgggatctggactctgctaaggccagttccacatggcagtgaccactcttcaacactcaggctcgcctcatatctcttttctgctctgagcatttccattcagattatatggcaggaactgcaagcactctctattcctggtggagaaatttacacatgtttattcataacctgcctatttcccccattttatttctgcccttcgttaacctcattcggcctgaacacagaaagaataatttcctcacctctggttgctcagttcacaacctctatccagtgcctggattcatcttacacgacaaatgtaattcactggctctcactgtattcagctactccgtaaattcagacccatcctatttaatgtgagaagggatttatttgagattgtttaaaaactgatcaatgtccgcattaaaatcccatacatatgatataacgcttattagatattttcatgtcaatcaggagagaatatcaaatttattttatatatatatcactccaaatgaatccaagtctctctgagagcatcacagacctaaatctgtgtgactgatggcgtgttagcagctccagagtgccttcattttaattattccgatctaggaaaaaagaaaagatgattatctcagtgacaaaaaataaatattcttcttttctttgtaagattctcaggaggaaactgttcttggagggcaggggcataagagggaagaagccgtggttacagagcagagacacaatggcctcagtccaaggctgcatttaagtttggatgcccttggtgtgctttctggtctgtaaaattagagcacaagaaaacagatgactattaaagagtaagcttgcataatgcagtttattgacatttcagcctctcaacctagggttcaactattaaggcttatgatataggactgttgcctttatcaataaacaaagactctctagcagaccagtacagaattcagtggcttaaaataaatcagcatttatgatggctcacgtgtctgtggtcagccggtgggccggctgagaaccagctggtctaggatggcctctctcacatctggcagttggacggctattggctgagctgatggaattgcctggtcaggtgccttttgtcatccagcagtccagcctggtataataggctcaaaaatggccccctcagagttgtccatgtcctactgctcagaactcatgaatatattacctcgcatggtaaaagggaccctgcaaatgtgtcttgagatggggagattatcccagattatctgggtgggcccagcgtattcacaagggctcttataagagggaggcaggaggatcagagtctagagagaaaacataaggataaaagcagagggaagatgcaacattgctggctttgagatggtggaaaaagggtccatgagccaggaaatgtaggtggcctctaaagctgaaagaggcaaggaatcaagttctcccccagtgcctcctgaaggaccacagcattgcaggcccattttagactctgacctccagaactgtgagagaataaatacgtgctcctttaaaatactcagtggttatttgtacagcagcgatagcagggaaatgcagctggacttaacacagcaggagcagggttccgtgagagcacgtggagcgagtcccaggcccaggattgtcactgtcatttctgccgcattcgattgggcaaagaagtcacaaggccaggtcagatgcaaaggatggaggaatagacctcaactcttggtggtggaaggtcaaagaagctgtaaagtcatatttcaagggagaggacacaggaagagtaaagaattatggccacgttttttgtagtcagtctaccaccatggcctttacgaaggtcagaggacattcaaaagtaatttctgaccttggtttctttttcattttcaggacgcagggagcatgggtatctggacctcaggcactgatatcttcctaagtctttgggagatttacgtgtctccaagaagccccggatggatggactttatccagcatttgggagtttgctgtttggttgctcttatttcagtgggcctcctgtctgtggccgcctgctggtttctgccatcaatcatagcggccgctgcctcctggattatcacgtgtgttctgctgtgttgctccaagcatgcacgatgttttattcttcttgtctttctctcttgtggcctgcgtgaaggcaggaatgctttgattgcagctggcacagggatcgtcatcttgggacacgtagaaaatatttttcacaactttaaaggtctcctagatggtatgacttgcaacctaagggcaaagagcttttccatacattttccacttttgaaaaaatatattgaggcaattcagtggatttatggccttgccactccactaagtgtatttgatgaccttgtttcttggaaccagaccctggcagtctctcttttcagtcccagccatgtcctggaggcacagctaaatgacagcaaaggggaagtcctgagcgtcttgtaccagatggcaacaaccacagaggtgttgtcctccctgggtcagaagctacttgcctttgcagggctttcgctcgtcctgcttggcactggcctcttcatgaagcgatttttgggcccttgtggttggaagtatgaaaacatctacatcaccagacaatttgttcagtttgatgaaagggagagacatcaacagaggccctgtgtgctcccgctgaataaggaggaaaggaggaagtatgtcatcatcccgactttctggccgactcctaaagaaaggaaaaacctggggctgtttttcctccccatacttatccatctctgcatctgggtgctgtttgcagctgtagattatctgctgtatcggctcattttctcagtgagcaagcagtttcaaagcttgccagggtttgaggttcacttgaaactgcacggagaggtagggcccacaggtacttctcatggtttatcccggctatttgctggtctgtcttgcaaaagatcatgaacctcccgaggcagggcagtggctcattcacctttgcatccttggtgcccagcatagtgcttggcacatagaaggaacccaacaattgcaggtcaaattgaatcgaagtcccaatgttagggtgtgattctgcattagttccctgtggctgctgtgacaaatggccaataattgaatggcttaaaataacagaagtttattcttggatagttctggggggagaagtatgaagtgagtgtcgctggcctgaaatccaggtgctgttgccgctctttgcatcttccagattctagtggccgatggcatccctttgcctgtgaccacatcactcccgtctctgctctgtcatcgcatcactttcttctttgcatgtggaaaatctctctctgcctctgtcttaaagaatctgtatgactgtattaggactttccagtataatccagggtaatttctctatctcaagatctttgacttaataacatttgcaaagatcctttttccaaataaagtaacattaacagttccaggcactaagatcttatatcttcagggcatcatccagcctcctacagtcaacaaacactgaaatgtggaaataagtatctctgaggttgaacatgaagtggattcccaagcaggactatccggcgtgaacctaagagacacggatttagggtctgccttcctctcatcctcaagcttaggcaagtagacttcaagcaccttctctgagtgagaacttttctgtgcatcttgagtccttatcaaatacaagagggttcccaaggcatcagtgcaatgtttaaaaggatgattgttgaaaagggctcctaagttacccagtaaaatggctggtgctagtagctgatagcacccacttttaaaaatgctacacagctacacttcggttttttgagacagattggattactagttctcaattttaaatgtgtgttaagaatttcctgagttggacatagagtttcaggcctcgatttacacagattttgttttaactgggagagcattttaaatgagcatgcctgtgatttcaaggtaggtggttcatagaccacattttgagcaactctggtctaggtcttagaaagcaaggacccgctaacccagaggtcctcaaccttggatacagagttgcatcactgcagagttgaactaacaaagcaactcaattcctctctccagaatcaccagattctgttttaattggactgcggcgagagatttttaaaacctcccagagtaattctaatgtgcagccaagattgagaacccctgttctaaacccctcactccaagaacaaagccagaaagttaacacctaattgccatcagatggatctgtgacaaatcttcattagccaggatagcatctgtgtctgagctggtgcctcccgcatcttgagggatgtggctttctctcctctattctccttctctctcctcttggcagccatggacaaacagagaagatggtggggatggggcatcccatcgtttatcttttcttttccattttctctgtggatatttgtgcttatgctgacatttcagaggatctggatattgtgagacacttgtcttattgttttttaaacccagaaattgccaggctgaatgacgtggtgtgtgtatgcacatgtatgggtgtgtatgtgcatgtgtgtgatgcatgctgggttaagtacactagcccaggctggcaaaaataatgcaggtgaaccccaaaattggggcttagcctaggagggttcttggctttgcttgggaaagaattcaagagtgagctgacagtgaaagaaagcaagtttattagaacagagtacagcaaaatgactgctccataggcagagaaagactatcgcataggcagagtggcccagagtagcactcatggattgctgatctcttatatttatacctagtcttaattttatgctaattatggagtgggttattcatgagctttctggaaaaagggtggggagttcccaagccatgtaacacaacttctgggttattgccatggcctcatttgtaagctgtcatggtgctggtaggagtgccttatgcaaatatattataattagcatataatgagcagtgaggacaactcgaggttttttttcatcaccatcttggtcctagctgattttggctggtttctttgttatatcttgtttctatccacagggtcatgacagaggctcagtaaacaagtcctgcttatctcctgcctcaaaaacaccaacagctgtttctttttttaaaaagattattacttttaacttttattgttatttttaattgacacataatcattgtacatatttatggggtatccagtagctgtttccacgggtctgatttgccctactattcctcaagctgcaataggctgtgccagctgctggggaattcatggaggaaaaacggccacaatgttgcctgcaaaccctcccatgaagccccacttgccatttctctctttctctctcagggccttaaatcctcctgctgcattcacacttttcctcccttttcctctggctcagcagatctagtcccatggctcctgccctcctaagcctgggctgcttctcagagttgattattctgagctctctgagtcccctgaagaatcccgttaattacaaggcaccctgttgctctagatatttggagcagggtggataatggaagtagtgttttagctgaaagccaaacaagaatttcagacatgcttgatctttgggggtggccaggaaaagggtctcactccttcactgccattctcctcctgtgttctcctttcttgtcttcccccctcaattctccctctctctcctacatttttcttctctctcatttacttctctctcagcaagtacccatggctgtgttgtgaattctcaccatgttagatagaggggaaaaaaaaaagcaagctctgccttccaaaaaaacccagctttccaatgacaatgccctgacacctttgtctttgggcattactggctcctgggggcacaaagatgtctaggttgtgagggcctccttgaggggcttatgtcctgggagggaggtcaccatgaacacacgtgaaacagtagggtggtgggcactggaacagatgtgagtacgagactgctgtgggagcgcttctcaaactctctcctgctgtgtctgggagactgtgctgccagcagccagcttctgcatgactgacgatgccctgcccttatgccagggtgcccttgggggctccttgtcttcaccattgcctcacatttgccaaggagaagtcacacaggaagagaaacactggctcaaggtgctgccaatatttctccctcactttaatatgattttaattatgtgttttgaataaagaagacgggaaatgacccaggtagagctagctctgtgggtgggcagtgtgagtaaaaatagccagagtttctacttattgggcacctactatgttcactgcacttggctgcattaacttttcaggactggctgacagcagagcctggcctccattcattgcttagtgttgtgccaacaaattgtttacttaagagaggaatataaatattgaaacgttggggtgccatttagtatactgctcaggcattttggaagaattaatttgtcttccacatcaccctcaaccaaccccacaccaaagtgttgactcagccgttctgaagcccggattcccagctgcaaaatccccagttaaatttctagacaaaataactttgtcccagaccgaacacccgctgctttcttattgcaggatttctcatcactgactcaatcgatatgtttgtttcttcaatagtattaaaaagagttcatgtctttgctctggggactgaaatctctctatttaattgtaggcagcctatctttttaataagagaaagggagaggcaacacaaatgtttttcgttgcttcggcacagtgctggggaaattatagatttgatttggcatttgtgtagaggtcccaggtttggggtttccaaagtcttcacaggcactggaatagatccaaggtgcccagcgtccgctgggtgtagttgggttctttttgagaagtcatttaccttttcccagccccagggctctgtggcactagagtgataataacttactaagcaccccagtctataaggctaatgctccttccccaaggtgtttaatttacactgggagtagtttattcatgggcaggatctggtccattaactcctgttttgccaaattagaaaagaaatccactgagagattaaatgactttcccaggtcagagaaagaaagagctggatcagcacacacttctcttgtgggtggcttggctgggtggctcaatgtcatctcctgccctctgtgtcagtctgctgagggcaactggcttattctcttgccttcaaaaagaaggaatgtacctctcatgagcatccaatagggatgagaatttttcctatttttaggacctgcccaaacatgatttcagagtctccttcaataatgtgggctagagggccaacgtatcaacccagaagggaatatagtacactaaataagaataatcccccctaagctccagaaggtagatgtagaacataatttaatgcctcaacatctctgtgaccttgtggtctgcttaaggggtattgggaggatatgatggggtcctaaggggctatgttctaaagcaatcttctccctgagtttagctgactccccgctctttctttcgccccatgtgtgctaacatgtagaaacaagtattccatgaaaatgagttatgtgatcaaatttgttaggaaaactgctgctaaaattaaaagattcctctgcctactcctcagagccttcaacagtctaatgggcattgtgattttcaaaagaagggatagagtaaaaaaaatgtatttaatacacttctctcaagggaatctttactgtatttctacaaacccatttcagaaaacactgcaatagttacaaataagacacatctcttctcctttgctccaatcataacacacaaaggaagatgtgatagttcctttggccaaagctccctgtatatttgaagatagtgccatgtgctgcagggaagtactgagaaagacaagaactgagtacaaaaatggcatgcatcatgattattttattctttcattttagaaacaaggaactcaagatattatccatgattcttcctttaatatatctgtgtttgaacccaactgtatcccaaaaccaaaattccttctatctgagacctgggttcctctcagtgttattcttttgatattagtgatgctgggactgttgtcctctatccttatgcaacttaaaatcctggtgtcagcatctttctaccccagcgtggagaggaagcgcatccaatatctgcatgcaaagctgcttaaaaaaagatcaaagcagccgctgggagaagtcaaaagacggctgagtctctatcttacaaaggtaaggccaagatggtggtgtaacctccaattgaggaagtgttgagtttggagggaaatgggaaaggggacttcgaagcatttaatgcttcaacttcacatcagggcttgtaccccagcagtagataggacattgaggaaaaatgaacaaacgtacgtggctaggactcttaactctgtgatttgaatgctgatccaaaggatactacaagatatcttaaaatattggtttcaagaaagtatgttcagtcattgtagagaggcgactggagaggtccttagtgttgactagtaaaggacaaagcacagtaagatatgctttcctaggtaaagaaaaaacagacagggaaatgtctactatagctttgtaaatgccaaagaatttgttcattttccagtgtgtgtttgtgtgtgtatatatagagagaggatatacaaaaatataatatatacacaaatatataaataaaaacatgactcatacataaaatggacatatatcaaaaattttacgtaatttaatacatatttattaatgagggaatggtaagaaaaattagaaccaaagaataattcaaagaacacacatatatataggccatcaggaataccaaacgaatttgcttaatagatgcaaaactgtctttttctttaagggtggatgggaggggtcagttgtatgctactggacggagatcatgtgcatgtcatggacaagaatcactcacattgtttctatcagccatctgcaacttacagaattgggaaatagcccatagacaatggaagaccaacataacccacaaaaataagcttgtctatttcagtcttttgctgtttttcccaacatctttaaccccacaatgaaaaattgatgtcagaggcatttaaaatgactccaactccaatgcccatttatccacttttctgtctcttcagattcatttctggcttccagtcctgaaaatgattaggaagaagcaaatggacatggcaagtgcagacaagtcatgagagaccccgactactcctcagccacatcgcaccaacaattctcttcaggtctaggatggcagtcactattcatgccggataatagagaactatgtgacgcagtcctctcaggagtctgagtttacagagccaacttgcagcacctggttatgcctcctttcatctcaaagccaaagagctgccaggtaaatggttatgtggtctatgttccaaacaaaccacatgatcttgcctgtgtcacaatgtaacaagactctagctgggtcccctggtgatgagtttcagcatagaataatgttcaaggaaaagaaaacgaaaacagtttaaatctctaccacagcctcacaagcaaatgctaaggggaacatacatgtaaaaagccagcaaactatcttcaaactcttccgtccttaatgtcttccatggctattgcccccacaatggtctcttttctccctgctcccttattaaagaactctttctgaaacccagtcctagcagctccttgtttcttcttaccaccgcctgcacttctgccctctacctgcctctattttgttttctcctcttttagcaaatcccctggctggtatttatgacagggtggcctacggaccatgtgcattaaaattatatacaattcttgttaaaatatatatttgggccccttttcttc

SEQ ID NO: 412 - DNA, 116769 bp, Homo sapiens
  source 1..116769: mol_type = genomic DNA; note = NC_000019.10:c16472012-16355244 EPS15L1 [organism=Homo sapiens] [GeneID=58513] [chromosome=19]
agtgcgcacgcgtggctgcagccccgcccccgttcccccggcgctcggagcccgagtccgcgggaagatggcggcgccgctcatccccctctcccagcaggtacgggccgggcgggcctgggggcggcgccggggtgcggggcgcgaggcgagcggtgcggcgaggctgaggcgctgggagactcagccaggcggcggcgggggcggcgcgtgctgaagggcttgcggcgggcgggtgggcaggcggccctgaaggtgacaggccgggacccgcggcctcccgtgcccgagcgaccctcgcgggcaccggcgaggcgaggaggtgcgcagcgcgtgtcctctccgcccagggcccggaccctgccgccgctgaagctcccaggccggggacccgcggaggcgctgggctgcatcccggaggggtgggcgaggggtgcgagcgtttctgtcggcgcggcggcccagcgagtctttgtctccctccggtcccggcgcccgggcgggcagggtcccgccggagcccggacccgtcagcagcagtgcgatctcagactgatcccctgcctccttggaagctgcttccgccacccctgcaccgggcgcagatcgtacgtctccgggcgcctctctgtgtcctcaaattcgcctgatgcgcttatgaaggggcagtatcgatagcgcgacacagacatgcgaaaaagagccatgcgtaggcagctctgttatttgggagagactttcattcattcattttctatccatccctcaaatgtgcgttgggtcaggtgctgggagcgctgcattcttccagacagacaaggtcgctgctttcctggaggtgacactcgtgggaactagaaactacctgtgttatgctaatcacagctgcctttatttgctgaatacctgtgttgtgcaaagcaccatataagcattttgctagaatgatctagcacagcatggtgattaagagtgaggacacagggtcagatcatgtgttcaaatcttggctccagccccgatttctctgtgcctttggttgaagctcttagccattccacccatcagttgcttcctttggaaaatggagatataaaaatgtgttgggattatgtgaaaattaagcacgtgaaaaagcgcttagaacagtgcctagcatatgagaggcactcagtgatcctataattactgtcatcatttaatctctgccagatttggacgtttgggagtagagaccgcagcaattaagaattccaaacccaaagagagttgataggccggttgcatgcttgcatgactggttagctgatccaaggagagagaagtgcacagctagccaatttgcaacactgtcactaagttaacagtgctaaaacccggtgattattaattagcaagttcttgttactgacatgaaagtgctctgtaaactgttaagtgtcctaccgataataggtgttaatagctaagtgctacagtttagagtatgtagtcagggggtggggggcggggaaggcgggagtcgggggaaaatcacctaagatcatttcatgagaaagcactaagcactcccagtttgggaggcgtggatctttctaaaacttcctgtccaatttttttttttttgagatggagtattgctctgtcacccagggtggagtgcagtggcatgatctcagctcactgtaacctccgcctcccgagttcaagtgattctcctgcctcagcctcctgagtagctgggactacaggcacgtgctaccacacccggctaatttttgtattttttttttagtggagacggggtttcaccattttggcgaggctcgtgtcaaactcctgaactcgagtgatccacccgccttggcctcccaaagtgctgggattacaggcgttagccactgcgcctggccaggtcactgacttcttagcctcttcctgttcctttccctatacatttgttgaatgaaggcgtggcctggttttcttcgtttggaaatgtcagcacttctttacacttgctctcgagtgaaaatctacaccatgggttactgttggcccaggtgtgaggcatggccctcccaggcccttactgtctagctcaggagatcacttgggttcacagataactctgggggaaccaagggtataattccaaaatttttggttgggggcaaaagggaagcaccctgcagcaggtggctgtgatctggttggatttaggtgacagagcacacttggcaagcagatggccaggtgaaggtgagcaaagtggataacccagcgggctagcctaggggaggaggggtgtgttttctccacccccactcctgtctgcacttttcccatcagcatctttttcagtctgttctgtactccatgacatcatctcagaatctccttccttatatactcttttctgaccctgaatatcaacgtaaattcgaaaggtctgcacctctgcctctttaggagtgatttttttttcccaacagcatctcagtgatttgtgtgtctccctgtccccctgctcagctctcttctgctttccaaaaagccttccgtggaaatgcatccagatctctttcctccttgtactccccgaggttaccggtggcccctccgtccttaaccccggtgccctgtggctgcagccgatcctcctcgaactccgcaacactggagcccgtcggtcttcactcttcatcctctctcctttcagtctctccttcttgtcccctaatttcagcctccctacctgcatcttatctctctgtgcgctccctcccctggagcttctgtgcagaggacttcaaacctgccttctagagtccagaaggtgtctctctcctgcacctctgccagcctgctggactctggaatgggccatttccttgccatgccccaaagtggtctgggccattctacttcctacttgcccactccctcccacttaatcccacgccactgtggaagtcatctttttgatttttgagacagggtctcgctctgtcccccaggctggagtgcagtggtaggatcatagctcactgcaacctcaaactcctgggctcaagcaattctcccaccttggcctctcaagtagctgggactacaggagcgcagcaccaatcatacccagctaattaaacaattttttttttgaagagatgaagtcttgctatgctgcctaggcaggtcttaaacccctagcctcaagcaatccttctatctcagcctcctaaagtattggaattacggtgtcagccactgcatctggctaggattcatcttctaaaacatattcccctgttccaaaaacctttcacagctcccattccccttcctccaaaagaactcagtttatggctgggcgctgtggctcatgcctataatcccagcactttaggaggctgaggtggatggattgcttgaggccaggagctcgagaccagcctggccaacatagcaaaaccctgtctgtactaaaaatacaaaagttagccaggcatagtggcaaacgcctataatcccagcaacttgggaggctgaggcacaagaatcgcttgaaaccaggcggcggaggttgcagtgagctgagatcgcgccactgcaccccagcctgggcaacagggtgagactcagtctcaaaaaaagtcagctttgatgaccttagtaagccctgaatcgactccacctaaccttgctgggtccctttcctgcacttctggctcttggcaacactttctagcctcagcatccttagctgtgttgctccggttgctagaacatcactgtgagctcctgccgtatgctgcctgccctgaaggacggtctttgaggcctcccctgtgttgtcctcccttagccccacccgaatgagagttctctcccttgtaccttccgtgggtcccttttgtgaccgctgtacctaggaagcgcgtggtaactgggctcagtgatgaggagagactgccctgggcccaaagagctacaccttcctcctttcccccttgttatgtgttcttcatccaggagcttttgctgtatttcagtaggtgcctccattctaggaggcttttattccccttttacaagtgaggaaaccaagacccacagaaatagagtaacttgctgaagtctcatagttggtgggcgcagagctgaggtcacacctgcgtcctcctgccgcagagccctgctgttccagatggcctgctgggcacctctcccagagcagcacccggccagtgtgtctggaatgaatgctgagtggctcggacacttacttgtcctcttgtcccttgtttcttttcttcctctgaaataagtgctagtctatcttagtagaatgctaatggcaatgcagtctaaattgatgagaacgaagttttagagtaaaatccactcctgaaagatccagaattccctgactgtcacttattgacctgcactggcctgttttttttttgtttttgttgttgttgttgttttttcgactaaatagattctccctgggcaagacccctccacctccattctgaactttaaaacaactttccaggccgggtgcagtggctgacgcctgtaatcctagcactttgggaggctgaggcaggtggatcacctgaggtcaggagtttgagaccagcctggccaacatggtgaaacctcatctctactaaaaatacaaaacattagcctggcgtcctggcggacgcctgtaatcccggccactcgggaccctgaggcaggagaatcacttgaacccaggaggcggaggttgcagtgagccaagatcactccactgcacactccagcctgggcaacaaagtgacactacgtctcaaaaaaaaaaaaaagaaaagaaaagcaggcaccatcaggtgcagtggtgcctgcttttcaatgtttaggtccttagatgtttgtttggattcccagatattccttcactgccctcagtcctgcaaatactttctgtaccttagttttctcatctgcagaatggtactgtggactcgcttgacctgctttgtcacagtagagtgtcaggaccctgccgtgtgacgcatgtgctctcagtgctttccttttttttttttttttgagacagagtttcactcttgtcacccaggatggagtgcaatggcgctgtcttggctcactgcaacctctgcctcctggattcaagcgattctcctgtctcagcctcctgagtagctgggattacaggcgcccactaccacacccagctaatttttgtatttttagtagagatggagtttcactatgttgcctaggctggtctcgaactcctgacctcaagtgatctgtctgcctcagcctcccaaagtgctgggattacaggcaggaggcaccgcgcctggccctcatgcctgccttttgtagatcacactgttcgttcagtgagtatttatttggcatcttctttttgctggacactttctgggcagtggatggaacagtgaatctgaaggcagtgccgcctcacggggctgacatcgttgggaggggcccagatataaagaaatgagcccaatgtgtagtgcattcggtggggattgatgctgtgagatgagtagagcagggcaggttccgatctgatgatggaggtcaggaaaggtctcaccaccaggctggaaggactgagtaaagaaaacatcatagattgcctggttcatcctcccggtcactctggccagtattatcttcagtgtataggggcaagaggggcagatcactggaggccaggaagggcagatcactggaggtcgagagttcaagaccagcctggccaacatgctgaaaccctgtctctactaaaatacaaaaattagccaggcgtggtggcacatgcctgtagtcccagctcctcaggaggctgaggcaggagaattgcttggacctgagaggtggaggttgcagtgagccgagattgcaccactgtactccagcctgggtgacagagcaagactctgtctcaaaaaaaaaaaaaaaaaaaatagataaagtgaggccagagattgttacgtcccttgcccaagtttgtacccagtgagctcaggcagacatggcttttctgacacaggttcaggcctcttcattgcaccatagtttcttgtcttggaaagttatttttttgtttgtttgtttttaagtttatgacatctcctaacctcatttgtttttatacctagttattagatatcatgtagtctgagtttttattttattactttaatctcatctcattaaaaggtagagagggacatggaaaggcctgcttattgtcttcctttttcctttagagacaggctcttgctctattgcctacgctggagtacagtggtgcaatcaaagctcattgcagcctcgactcttggcctcaagtgagcctcccacctcagcctctcaaggaactgagactacaggcatgcaacaccacacctggctaatttttaatttttttgtagagacaggatcttgctatgttgcccaggctggtttcgaactcctgacctcaagtgatcctcctgcctctgcctccaaagcgctgagattacaggtgtgagccaccactcccagccagttgtctttaggagaatccaaaggtttccctgccagagtggtaatcagtgctcctggcccatgcagaattgagttgtccaggcccggcccacagcagaggctcaggtcacgggtggtccaagctgcaggaggggcagatgactggcttccatttgggtgttggacatggttgtatggaggagagggcgtgtttggtgtaggccaagcttgtccaacccatggctgcatgtggcccaggatggctttgaatgcagcccaacacaaatttgtaaactttcctaaaacattatgaggttttcttgtgaattttttttttttttttgagactaagtctcgctctgttgcccaggctggagtgcagtggtgcaatttcggctcactgcaagctccgcctcctgggttcatgccattctactgcctcagcctcctgcgtagctgggactacaggcacccgccaccacacctggctaattttttgtatttttagtagagacggggtttcactggttaggcaggatggtctcgatctgaccttgtgatctgcccgccttggcctcccaaagtgctgggattacaggcgtgagccaccatgcccacccgtgaattttttaaagctcatcagctatcattagtgttagtgttagtgttagtgttagtgttagtgttagtgtattttatgtgtggcccaagacaattctagtgtggcccagggaagccaaaagattggacacccctggtctaggccatggggaatagcctttcacacggaggcaaagaggactgagccagagctgagaggctgcaggtctaggtcaaagggccaaaacatgcggctgggactttggggttcatgtccttcctttaatttaggcagctcagggatgagaggaggaaggtcttttggtaaataagacgtgagagtttgtgtctgggctacaaatcggccgaactgacaggatgtctgcttgccgagagagtggccagtggctggtgggggctgaggagctgagacctgcccactgtccttcgcgctggactgggttttaccgctggtcagagtggtggccctgaagtttgctcctgcatggagtgcagaccattagctcttaaagcttctttgggcttttcccttcataggagtcccagctcttgatactacaagctttggggtgaaagtaaaggtcacagatgaccacagacatttgtctcggatttccatctgcactgcctgtggtgtggaatgtagacctgataacagaatctgtttactgactgcctgcaggtcaggctgacataaagtcacttctcctcctcttgggcacaccagccaggctggatcaggcgctgctaccggcagctgacagcacacctgctccccgtgtttcccaggcctgcagtcctcattccctctgctctgtggccccctggcccctctttctgtcatctgcgcaggcgatccttcatcttgcctcaaggcgtttgcatctgctattccctctctctggaatgctctttccaaacccttcatcctctggtgaatccctacaccttttcatatcagctggggcatcacttcctcagggaagcctttcctgacaaactggcccagcatctctgttaccactggtggagatggacaccttttccatttagccgtttataattttctctttgcggggttgattgatggtctgtcttccccaaccacctagactaggtccacaagggcagagactgtgcctgttttattcatccttgtttgccaggctgcagctggcactcaggtgctcaacaatcatctgttgagggaagagtagcatgggccacattatgagaggcagtagggagctatggcaggttcttgaggagtgacacctttagatgatctggctgcttacacagggagtgcttggagctgggttctagctccgagacagtctctgtgatatgggcatgaagtgatcaagaggaacctggcctgaggttgtttcaggaagagtagaaagggctgggggtgaaaggaatatgtggggtagctgtttggacaggtgagggtctaggtgggagaggaagcagggggaagaagcaggcatagtgtctgcaaccgtcaggttgaggccaccttcagggagccaggacagcagcagtgggagtgcctggtgggcagagcctggtgggctgtggctgtgtcagttgagtcaaaacccatcactttgcaggaaaccctccaagccacgtgagaccccacatttaggtacagtcaaaaagaagaccagctctggggctggggcaccatgagattctgtctgctgagctactgtgtgctgtcttgggaccaagataaataaaaccgagccccaccctccaggtcagctcaactgcagctgggcacccaggcacacagaaaattaggacatagtgtgacacactcgtggaagtcaggtggcacccacagcggtgggatgaatcacctccactgggctgggaataaaggacaggaggaagagggcgcctgtgcctccttttgtcttttccctcctctgttccaacaggcctggaggaagcagctgggtgcagcctctctgactggctgtacactgcgtggaccagtgtcctgcccccaccctttgcacaggccctgtctcccaccaccatcttcacagcttcctggccccctctctgccttctcagagtcccacttccctgattctttgttttactttattttttcttgaggtggagtcccgctttgtcacccaggctggagtgtaatggcatgatcttggctcactgcagcttccgccatctgggctcaagcaattctgcctcagcctcccaagtagctgggattacaggtgcacaccaccaagcctggctaatttttttgtatttttgtatttttagtagagacagggtttcaccatgttggccaggctggtctcgaactcctggcctctagtgatccacccaccttggccccccaaagtgctgggattacaggtgtgagccaccatgccctcccccccacttccctgattctggtaacctggtctcccagaacaggtggcaacgggaccccagccctggtggtaccctgactgccctcaccagtgagtgggcccaggcaggcagctctgggccctggggagagatttggggcacaggtctgatgcaggagtgagggaatgttgtgggaccaacaatggtgccattgtccctgtgcttgtttctagatgaggaaactgagagggagagaggtaaaacaactggtcagacccccatggagaacaggcgtctgaatcagaccatgggctccaaagccaccattttgtcctatgattgccacaccatgggctccgggagggtcgaggagctctgtctttcctgctccctgctgggttcccagcccctgaaatctgggctcctggcacatagtaggctggtgatatctgttgattggaggctgggtacttggaacagcagccaggagcgcagtctgtctctccagctgtctttgagggtagttgacagaagggaacgttttgtctcttgggtgaagaaacaggcacagggcccagagccgcctgctcgagcccactggccggtgacagcagtcagggcaccaccagggctggggccctgctacctcctcacctccgctcatcagagggtgaggaaagggctttcctcttgtgtaagtgacatcaacaagtgtgcctctgtcattacgccaatctgtagaaaactggcttttctttctttctttctttcttttttttgagacagagtctcactctgtgacccaggctggagtgcagtggcgcgatctcagctcaccgcaacctttgcctcttgggttcaagtgattttccagcctcagccctccgagtagctgggaccacacgtgtatgccaccacaccctgccaatttttgtattttttgtagagatggggtttctccatgttgcctaggccagtttcgaactcctgagctcaaagcgatccacctgcctcggcctccgaaagtgctgggattgcatgtgtcagccactatgcccagctggcttttctttctttctttttttttttttttttaagagacggagtcttgctctgtcgcccaggctggagtgcagtggcgcaatctcggctcactgcaagctccgtctcccgggttcatgccattctcctgcctcagcctcctgagtagctgggactacaggcgcctgccaccacgcccggctaatttttgtatttttagtagagacggggtttcaccgtgttagccaggatggtctcgatctcctgacctcatgatccgcccgcctcggcctcccaaagtgctgggattacaggcgtgagccaccgcgcctggccccagctggcttttcttaatctgaagaggacgtgcttttcaattttatattttccagtggaagagaaaactatctcatttcacactctccaaaggggaaagatgaaacacgaaaaaacttgatgatgaggccctcacactgagcgtgtttaaccaggactgtacggttatggggatggactgtccccctcaattccccccacaccctacaaatggcactgtttgtggttggggggtcccagacacgattggcctaggcgcatgttcttgcaaacgttcttccctttgagttttttctttgctgagaactagaacgctctgtgcccgcggcacccccgtgctggctttggaaactttctctgtgggtcgaggcttctggagtggaggagcaggctccacaattgctgatgggctgggcaaggttgtccatcaccagggtgcaaattgttgctgttattttgcttgctcacaccaggccatggagttggcattttcttttaggccagcctctgagttggcatttatagtcagttgactttattgatttaatttgttgttgttgactcttagccactagaaaatgtcctttaattcacatttaatgcacatttaaaatgtcctttaattcacactaagtgggtttttacaggtgtgtacttatctgctgtgtgtaaaattgtattttttttaagaaaatgacagctgagactaagagaattggtgaaacactgttctttttttatttttagagacaggctctgtcgcccaggttggagtgcagtggtgccatcacggctcactgcagcctcagactcctgggttcatcctcctgtctcagcctccttagtagctgggactgcaggtgctcctcagcacaccaccacgcccagctaattttctgatttttaatttttgtagggctagggtctcactgttttgcccaggctggtcttgaattcctgaccttaagggatcctcctgccttaatctccaaagtgttgggattacaggcctgagccaccattcccaaactgaaatattgttctatcctagatgttgggagctgcttagctgttgagttgagagagcaaatggctaccatatgtaccatagtgtagccaacatttgttgaaatactttattgcttggcaaagatcaattggcagggcaggctataaggactgtgattttacacctgcaactcacgtgctgattcacagccttgcctgacctccctccccgcccaccattctttgtaaatacggcctgctcccctgtctcaggaataataatacaagagtaaccataataggggatgtaataatggcttcccattgcagagtgtatttcacttgcatattctcatttgggacttaccagcatcctcaggccaggtgctgtctattctcattttacagatggggacactgaggcccagggtggcttggtggcttgtcctcactgctactgagccacagagctatgtctgcccgctccccactaccaactgcaccttcctgcactcagcccaccacctgcctccctcaacactttaatctcacccatgccctcaacagacatttactgaaggcctgcttctaggagggcacagcgtgatccctccaccctccaggcattaagaatgtagtgagaggggccggtcattacagcagcttttccatcaaatcaacttcaggaagtgtcccttgtcaaagtttggggctatgggagtgtggaggcaggagggacttatttcatttgggggaacctagggtcatcttagagcagggcgttggcctgcagcaggcagcggccccaagcatagggaatgcagtcacgcaccgcataaccatgatggactgcatatgtgacagtgctcccgtaagattatactgctgtatttttcctgtgcctttgctatgtttagatatgtttagatacgcagctacttagcattgtgttacagttgcctgcagttttctgtaccgggccacgctgcccaggtttgtagcctgggagtaataggctagaccacagcccaggcgtggagcaggcgctgccttctaggtttgtgtaagttcactccaggatgtcctcacgacgatgaaattaacctgacgatgcaactctcaggacgcatccctgtagttaaacgatgcatgactgcatcttgtgccaagacaaggagtgaaaggtgcccgatatgttcagtagagctctgccagccgggggaaggaggtgagacttgagtgtgatatatgtgagtgtgagtgtatgtgggtgagcctgagtgtacatgtgtgattgtgtgtatgtgtgtgtggctgagtgtgtgtgagtgagtgtgtgtgtggagtgaaatcagcccggcaaggtaggagatggccagggagcactttcaggactgggctcagggcttggaccttagcctccgttacacaccctgaagagcctttctgagcagaggagtggctgtgtgcgaggtgcagtggggaagcgggtgaaggcagggccgtgggtgaggaggctgggccaggctctgtagaggcatgtatggggcaagcggggtgggggcggggcggccctcccatcaggacagagcccctgtccttgtccttgtcacccctgctgtgcatttgctcttctgtgttggtgtgtgtgtcagctcactggctttgatgccctgactatgatgctccatggtggcagcaaccatctttctgctcactgtggggtccgggagcctcgaggggtgcctgatgtttagaggggccagaaaaagaacagtgcactaggaggctgacgctgtcacccacagcgatgaggaggaaggtggcatggcactgacctggccagtgcaggggatcttggcgtccttggcagggagccaccccccactgtcaggaacaccccgacaggaggccagacccatcccaaccgagtcctgggcagtgtgctctgttagggagtagtagatggcagggacattggagcccaggagtagctgatgcaggaaaggaatgttgggaaggcccggggtacactttggaaagttgggagactctgggaagtgggcccttgtgggaggcggtgggtgttcctgctgcggaggacacactgctgagtcattgagcccctctcggtgttcccccctcccccccagtcttgggtgactgctctcccatgtctctccagggagaccgctcatgggtcagaggaaggaaacagatggaactgaataggtctgttctctgagatgcccgggaggggtgatgtccaggggacacaggtcagcagctgggagggctgctcagaggcttcatctgcttttgctcttaagcagcgttttcaggagggagggctggaatctgttcccctcctgcccgggcgccattccagttccatcccttctgccctctgcatggctgcacaagacccttgagcccttccctacacgcccgcccctccatccctccaggacccagctgccctggtatttcctgtggtggagcctcctccctccctccccgtggcaagcctgtctctggcactgctttggtgcgggtgctccacagcctcgcttgactgagtctccctggacaggctcagccatggagggggggccttccaggtctcctggtgccctgggtgtatgtctgctgctggctgcggactggccctccatcctgtctcttccatctagctcttggcagccgtctctgtgctttgtcacagctccatgaggctgtgggtggggaatgtcccgttgttcacctccacacctgcaccaaggtgtctagaatggcaattagatttccacctcaatgcccctggggacatcccaaggaaacacattcgtttttagggaactggcatgtcctccttctccgggtgtctgcattgtgagtcgctgcagtccccaggctgctggagttctgctgctggagggccatggcagtctctctctgatcacttccttccagccctgctccttgcagcggatttctgccgtttaccatctcatatgcatatgcgcccaccttgctggcctgcaggcaccccctccccatgttctgcttgccctggggatgacatcctgtcttttcagcacagcgtgcacagaccctggcatcctatgcacatgcccttccacctgactggggccgtgctgaatcacccacagctcacctgtcttctctgtcccggtgcacacctggccccaagccctgagttcccctcactgtgcctactgctgcagtcatatcatgcggtcccctgtgccatagtcctgggctgactttgtcccgcctgcccttcctgaagcccaggactctattttttgtttgttttgtttttgtttttgttttgagatggagtttcactcttgtcacccaggctggagtgcaatggcatcatcttggctcactgcaacctctagcctcctgggttcaagcggttctcccgcctcagcctcccaagtagctgagattacaggtacccgccaccacgcccagctaatttttatatgtttagtagagatagagtttcaccatgttggccaggctggtctcgaactcctgacctcatgtgatccacccaccttggcttcccaaagtgctgagattacaggcgtgagccaccacgcctggcctgaagcccaggactctgtcctacacacttttgtatcctcagtgctgcctcttagcacgagttcagcatgtgttgattgagtgagcaaacaaataaatttccaggtccaaagaagggagagctggggaatccaagggtggaccctttttcaggagggttttttgtttgtttgtttgagacagggttttcctcttgttgcccaggctggagtgcaatggcacaacctcggctcgctgcaacctctgcctcctgggttcaaatgattcttctgcctcagcctcctgagtagctgggattacaggcctgtgccaccatgcctagctaattttatatttttagtagagacaagatttctccatgttggtcaggctggtctcgaactcctgacctcaggtgatccacccgtcttggtctcccatattgctggaattataggtgtgatccactgcgcctggctttcaggaggttttatgcgaagggtggggggaggtcagtagctggaggtggaagagagatggagggatgtttctggggagagggtacatttttacctggagccagtggaaggagggcgatgaggaggataccaggaatcacaacagccggtgattgacaagtccccgggggtgggagtgctcaccctcatctccagatgcagaagctgaggcacagagaggctgctcgtcctgccccagggttgcacagcattccagcagcaggacaggactcaaatccacatttgtctggcagcactgttgacctccacatgagacagcttctcttagtgaagcaagatgggagaacacagcccataggtgtagatggagctgggcagtctctcctgaagacgtttagggctcagcatagtcctgcatcctccacagggcagtgcatcgaggcaggaagcctgctgcaggcaatgttttttctccagcagttctgtttctggaatgctgagtttggtgctcatgcctgtaatcccagcactttgggaggccaaggcaggaggattgcttgaggccaggagttcaagaccagcctggcaaaataatgagacccccccaatctttacaaaaaaaagaaaaaaaaaattagccacacatggtggtgcatggctatggtcccaattactcaggaggctaaggcaggaggatcacttaagcccaggaatttgaggctacagtgagctatggtcgtgccactgcactccagcctggacaacagagctgtctctctttttttttttgagatggagtttcgctcttgttgcccaggctggagtgcaatgatgtgatcctggctcactgcagcctctgcctccctagttcaagcaattctcctgcctcagcctcccaagtagctgggattacaggtgtgcgccaccacacctggctaattttatatttttagtagagacaggcttttaccatgttggccaggctggtctcaaactgctgacctcaggtgatccacccaccttagcccccaaaagtgctggggttacaggtgtgagccaccatgcctggcccagagctgtctcttaaaaaaaaaaaaaagaaaaaagaaagctttcaaaccttgattctgtgttctgacgaccttcctggtccatgtcattgaccttgctgctttgctgcatgtctaaatgctcggggcagttctcttgcttgttggttcctctccagggcagcgactgtaggccttacccctgtgccatgccccactgtaggccctgagttctgtctggtttggatggaggccttgagccccgagcatgttcgtcttctgctggtctcacaaggcactcatttgggtccctggggagaatccatgaaaattccttcagatcctgcttttccttgcacatctttctatttctgtctaatttacaaaagcagctcatgctgacatagtacaccagggaacataggaagccatgaggaagcaaactagctggcccgtagaaatcctggtaagcatggccctgtcccgccaggttccagtagcggggcgataggataccgtgtgcttataagccaggtcacacactgcacctgctagattgcccccttctcatttagcaagctgatgaagattggaccccatttgtaaacattctgctgttttgatggctgtaaggtatttattctgtcccatggagactcagcaatttattagcagcttaaccagtcctctgctgtttccagtgccttgcagtctgcatctgtgccctcaaggggggaaaacagcgaaccctcttacccttcccccactcctgcatcacttctcagtctcccaggagcagaccttgtagccatggtagggcacacttgtgtgtgttctaaaggaatgccagtttgtattgtttcacagaagcacgatcctgtcaccaagctctcctcatttgtcacacttaaacctgacgcagcttgtgccattagggtccttgccaaggcagaagcacatcaaatggccttttttttttttttataggaattcttttttctttcttggatttcagctttttttattgtagatacagagagtacatgtgcatatttgttacatgagagtattgcatgatgctgaggtttggaatacggatcctgtcaccctggtagtgaacatagtacccgataagtcattttttttttcttttttttgagatggagtctcgctctgtcgcccaggctggagtgcagtggctcgatgtcggctcactgcaagatccgcctcccgggttcacgccattctcctgcttcagcctcccgagtagctgggactgcaggcgcctgccaccacgctgggctaattttttgtatttttagtggagacggggtttcaccgtgttagccaggatggtctcgatctcctgacctcatgatccgcccacctcggcctcccaaagtgttgggattacaggcatgagccactgtgcccagcccaaatggcctttaaacacattaaaagttgatggctgggcatgctcacacctataatcccagcaccgtgggaggccccggtgggaagatcttttgaacccaggagttagagactggcctgggcaacaaagcaagaccccgtctctacaaaaaataaaaaatagtaattagctgggtgtggtggcatgcacttatagacccagctacttggaaggctaaggaaggaggatcccttaagtccaggaggttgaggctgcagtgagctatgatggcaccactgtactctagcctgggtgacagagcaagtctctgtctctatgaaaaataaaataaagcccgggcgcggtggctcacacctgtaatcccagcactttgggagaccgaggcgggcagatcatgaggtcaggagatcgaggccatcctgactaacacggtgaaaccccgtctctactaagaaaaatacaaaaaaattagctgggcatggtggtgggcacctgtagtcctagctattcgggaggctgaggcaggagaatggcatgaaccggggaggcggagcttgcagtgagccaagatcgtgccactgcgctccagcttgggggacagagcgagactccatctcaaaaaaaataaaaaaataaaaaaataaaatagatgtagagggaagggtttaatgaattcccatgtacccactgcccatttacaacagttatcaatattttgcagatttctttgtaccaccctttgatcttttcccccacctacgtatatttttagttcttaggttttttttttttttttttcagatgacattttgctatgttgtgcaggccggagtgcagtagccattcagaggcccagtgatcatagctcactgcagcctggaattcctggcctcaggcaatcctcctgccttagcttctcgagtagctgggactacaggcgagtgccactacacctggctctggcttgtgtttttttttttttttcgagatggaatttcactcctgttgcccaggctggagtgcagtagcataatctcagctcgctgcaaactctgcctcccgggttcaagtgattctcctgccgcagcctcctgagtagctgggattccaggtgcctgccaccacgcttggctaatttttatatttttagtagagatggggtttcaccatgttggccaggctggtttagaactcctgacctcaggtgatctacccacctcagcctcccaaagtgctgggatgacaggcgtgagccactgcacccagcctcctgttgtgtggttttttttttttgagacgaagtctcactctgtagcccaggctggagtgcagtggcgtgatcttggctcactgcaacctacgcctcctgggtttaagcatttctcctgcctcagcctccagagtaactgggattacaggtgcacgccaccgcacccagctaatttttttgtatttttagtagagacagggtttcaccatgttggccaggctggtcttgaactcccagcctcaggtaactgcctgcctcgacctcccaaagtgctaggattacaggtgtgagccaccgtgcctggcctgtttttttttaatcttagaaattgtaggccaggcgcggtggctcacgcctgtaatcccagcactctggcaggccgaggcgggtggatcacgaggtcaggagatcgagaccatcctggctaacatggtgaaaccctgtctctactaaaaaatacaaaaaattagacgagtgaggtggcgggcacctgtagtctcagctacttgggaggctgaggcaggagaatggcgtgaacccgggaggtggagcttgcagtgagtggagatctcaccactgcactccagcctgggcgacagagcaaaactccatctcaaaaaaaataaaaaaaataaaataaataaataaaagaaattgtatttcaacatgcacctctaacagttaagaccgttttcctttacataaccacaatgccttatcacaccttacacaactaataataacgcctttggtattggtattatctgataacaagaccatattcacatttccctgattgtctgcaaatgtcaccttgcatttggtcattaggtttcctaagtctttaaagaaaaaacaaaacttctcattttgagatgatggtagactcacttgcagttgttggagagtctgggcgggcgcggtggctcacgcctgtaatcccagcactttgggaggccgaggcaggcagatcacctgaggtcaggagttcaagaccagcctggccaacgtggtgagacccggtctctactaaaagtataaaaactagccgggcacggtggtgggtgcctgtaatcccagctactcgggaggctgaggcaggagaattgcttgaacctgggaggcggaggttgtagtgagccaagattgcaccactgccatccagcctgggcaacagagcgagactcttgtctcaaaaaaaaaagagcctgtaccatttatccagtttcctctgaagcaacatttgcataatggtggtacagtattgcatctgggatattgatgatgatggctatgttcaggttctgaaggaagagtcctggattctctggggacccaaatgaccaccttgcgagaccagcagaagttggacatgccctggccaggcgtggtggctcacgcctgtaatcccagcactttgggaggctgaggcgggtggatcacctgaggtcaggagggcgagaccatcctggccaacatggtgaaaccctgtctctactaaaaaatacaaaaatttagccaggtgtgttggcatgcatctgtaatcccagctacttgggaggctgaggcaggagaatcacttgaacctgggaggcggaggttgcagtgagccgagatcgcaccattgcactccagcctgggcaacaaagtgagactccgtctcaaaaaaaaaaaaaaaaaaaaagaagatggacatgcctggggctcacggcctccgtccagcccagacagaactcagggcctgcagtggggcatgacacaggggtaaggcatgcgttccctgccctggagaggaaccgagaagcaatagaaccacccctgagagtttagacattcagcaaagcagcaaggtgaatgacatggactggggagggcatcagagcacggaatcaaggtttgaaagctttttttttcttttttaagagacagctctgttgcccaggctggagtgcagtagcacgatcatagctcactgcagccttgaactcctgggctcaggtaatccttctgcctcagcctcctgagtagctgggaccacaggcatgtgccaccatgcgtggctatttttttttttttgtagagatagggtcttgttgatagccaggtacagaacacgtccctcctgttgcccttttatagccacacccacttccctcccagcccatctcttccttatccccggcaaccaccactctgttcatttctacaattttatcattttaatgatgttatgtgatggaattattcagtatgtaacctttgaggtttggcctttgtcattcagcataattctctggagagtcatccagattattgcatatgtgtcagctgttcattccttttcattgctgagtagtattccatggtgtgcttggaccacagtttgctgaaccactcacttattggaggacatccggggtgttaccagtttggagcagtgacatataaagctgtggccaacactgcatacaggatgtggtatgaacatgactcttcatttctcccgggtaaatgcccaggacagttgctggttcatgcggtagtttcatgttgtgtttagtttttttttgttgttgttgttttaagaaactgccagtctgtttccagagtcaccgtaccttttaactttcccatcagcagtgtatgagtggcccagtttgcctgcatcctcaccagcatttgatgttgtcactatttgttattttagccactctgatagcgtgcagtggcatctcactgtggttttaatttgcattcttctttttgctaatgatgttaaacatattttcatacgtttatttgccatctgctatatttcctctttggtaaaatgtctttttgccttcagatcttttgcccatgttcttttcttcttcgtgtttttttgtttgtttgtttgtttgtttgtttgttttttaagaaatcagatcttgttatgttgcccaggctggtcttgaactcctgggatcaagcaatcctcctgctttggcttcctgagtagctgggactacaggtgtgcaccacgacgcctggctagttttttaatttcatgtagagatggggtctcactatgttgcccaggctggtctggaactcctgggctcaagcagtcctcctgctttggcctcccaaagtgctgggactacaggtacgcaccaccatgcctggcttgcccatgttctaatttgattgttttcttttttatgctgttgaatttgagagctctctagtatatattttagatagtagtcatttgttggatatgtgctttgcaaacctttctttctagtctgtagcttgccttttcacctttttatctggcttttttttttgagacggagtcttgctctgtcacccaggctagagtgcagtggcacaatctcggctcactgcagcctctgcccgctgggttcaagcagttctcctggcttagcctcctgggtagctgggattacaggtgcacaccactacacccagctaatttttttgtatttttagccatgttagccaggctggtcttgaactcctgaccccaggtgatccgcctaccttggcctcccaatgtgctgggattacaggtgtgagccaccgcgcccggcctttctccccccccctttttttttaatacggaattttgctcttattgcccaggctggagtgcaatggtgcaatggtgtgatctcggctcacctcaacctccatctcccgggttcaagcgattctcctgcctcagcctcccgagtagctgggattacaggcatgcgccaccatgcctggctaattttacatttttagtagagatggggtttctccatgtaggtcagactggtcttgaactcccaaactctggtgatcctcctgcctcggcctcccaaagtgctgggattacaggcatgaaccaccacgccaggccttacatggctctttcacagtgcaaacataaagtttgtctgccaatctttccttttgtgaatcgggcttttggtgtcaagtctaagaactctttgctttgccctagatcctgaggattatgttttacatttgaattcatgatccactttgagttacattttgtacgaggcataagacttttagttcgaggcccatgtttttcctatggatgccgattgctccagtgccctttgtggaaaggctttccttcctcctgaaatacttttgcacctttgtcaagaaatccactgggcagatctgtgtgtgtctgtttctcagattctacattctgttctgtgcattactgtctgtgcccgccccctgccaatactccactgtcttaactactctagctatagagtcagtcttgaaatcaggtagactgactctttccactttattattctttttcagaattgttttagcttctctgcctttttttttttttccgaagatgaagtcttgctctgtcgctcaggctggagtgcagtggtatgatctcggctcactgcagcctccgcctcccaggttcaagtgattctcctgcctcagcctcctgagtaactgggattacaggcacctgccaccatgcctggctaatttttgtatttttagtagtgatggggtttcatcatgttggccaggctggtcttgaactcctgacctcaggtgattcacccaccttggcctccctaagtgctgggattacaggtgtgagccagagtgcctggccctgtaatacttaaattactagtgagatggaacattttctttctaactttgctgcatctcttctttctgaattgcctctctctttgctcatttttaattgagatgtctttttccttgtgatttggaaaagctctcttttcacttgccaagtcttctccttctcttggtaacatttaccttagctctgctgtagaaacctctgatggagcagttggagagagctgcccatccagtccaggaaggttagacataccccagcgtttccctgatgccttttgaatgttttgagtcaagtcccagttctgccccgtgcttgccacatgactgagccaggttatctcacccgcagaatgtgggccggcctgctgggagggctgggctcacattgggtgatggttgtgcaaggcctgtgggggcctctaaggggaaggcagaaatggaaggattatcaagcaagctctactccgggctatgtttttgcatccatatgtttttctaagtaggaactcagactgagatgtgtttcagtgttatatgcctaacttcctgcaaaacttggcagtggcattgaaaaacatagccattatggggtctcagctttcctggggaaatggcaggtcatcgaaaacactggctttcaagtccatttatatgctcaaattgagtgttgccttttgacctcttctgtttaataaaatgctccagcacgtcatcacggacgtgcattttcccaggccagcatatgcatgaggctgtcctgtggtccggtgcacagccctgtgacacctgggctgtcattacagggtgcacagtaggtgagggtctgactccaggaccacctatcctgggtgcttcactgactgttgctcattggctgttgtggtcctgagtagggcaaactcagtttccccacctgtcaactggactagtaatattacctgccctttagcgttgtcgggaggatgagaggtactggataggaaacaagggattataggtacttctctgaacattttacagtgaaaatggattgctttccaaaagtcattttgaaccaaggctgatgatcattggtttgttttgcacaagagcgcgtactttgctagcagagtgagagtgagagtttgggcaggaggcagccaggcatgaagatgtaggaggcgtcctgccctcggccacgtgcggggatcagagttgggtgaaccctgcttaggagtcgttagaacacaatcctgagacagtttctcctccgaggtggttctgctgggtttctccatctcaactgctgttgtcctgggttacagttacaggcgcttgtgtgaattgcggtgttttaaagccttcagagcagaaggatgtgaacttgtccttctccttgtgcccctctctctgtcatcccacttgtaaattgtttctgggctggaggataagtgaggaggccacaggaactttgcatgttgtctcttagcattttgagttaggaagagcaactgaaagaccgagctgaaagctacactgaacctcatcaacaattcacacactgcagaggcgaagatggcgtcttctcagcacagtgggctgggtcaggagaacacatcgggtcagctctgctgcacttccttccattcctacggccatcctggtgccacctgcagcctcttacggtgcaggcctcatcccctggtgcgtcccctctctgctgttgcctcgggcttggccccaggctcactttggggtcagacatgggtgggcagctccagaggctgctctcagcatacagagggctctttcccagtagctgtgaatcttccttttgggggccaagaggtctctgcacaggggccagtgacagactgcctggggctggggatttatgtcattagcaacatgtgtcttcagttctgtcgcaatgacatatcagggcagcgtgcaggtgtgagtccattgttcctgggaagaagcctggcataagaggaagtggcagttggggcctggtgctgtaccttctttcttcccccttctgcttttgcatatgcaaaacctgacatatgtgtaattagatcaaaacctctgaccactgtcattgttccaggttacccagatggactcccgtggtgatgagcaatggttgagccatactccctgggctttccctcagctgtaggtcttttgagagtgacatccggtggtcatcaagtgttcgagccggatgagcctttagcatggatgggcagaggttggagctctgggctgtgtccttcagcgactcttctggattagtccaggccttgtttctcttggttgcggatcttgttgctcattagcgcctgggaagtagagcagatatttaataaccctgcatgcctcaaagactgaaactcttttttttccactggaatcacagtagcttggaaacctctttcccttgcttcccatgagattgttaaaaaactcgcctggggctgggcgtggtggctcatgcctgtaatcccagcactttgggaggccaaagcaggcggatcacctgaggtcaggaccagcctggccaatatggtgaaacctcgcttctactgaaaatacagaaattaagtgggcatggtggcacgcacctgtagtcccagctactcgggaggctgaggtaggagaatggcttgaatccaggagtcagagattgcaatgagctgagattgcgccactgctctccagcttgggtgacagaacaagaccctgtctcaaaaaaaaaaaaaaaaacttgtctggaaatgtgcttcagatccagacctctctgatcattggcaggaagggcacctttgtcatctgaagtgagggcctctggagtctgtgaacccatggcaggcgatgtgctgtttgctgcctagacctgaccactgtcacctttactgacagatgacaaacagcctgcctgccttggcctcctttctgtgggtcttcttcctctggggagacatattttggaaataagctggagtttgagcccagaagttgacacaggtgtgatggctggacactgtcatctaacgaggttgtaagatgctaagggtgatagccactccttcctgtacccctcacccaggaatggtgtcactgcctccaagcacgaggggggcagccatcttggggctgctgttgctatacacacttacctcctatgtcttttccatgatgtctttgtctgttttaaaatgatggctcctaaatctctggcttttcttgctttttcatgttattctagttttttctgccttttcagtgtttccccctttcttttcctcttttttttttttttgactttttccctctcccctttcagatctttatgctattttccttctattttcattttgtcatggtagttttctctgtactttcacttcttttttttttttttttttttgagacggagtctcgcaccgtcgcctgggctggagtgcagtggcgcgatctcggctcactgcaatctctgcctcccggattaatgcaattctcctgtctcagcctcctgagtagctgggattacaggcgcacaccaccacacctgactaattttctgtatttttagtagagacggggtttcactatgttggccagactgatcttgagctcctgacctcgtgatctgcctgcctcggcctcccaaagtgctgtttgggattacaactttcacttctttatacattcacaggtgttggcgtcccccagagacgctgaccataatccgggcattattatttttttctttttatttttgagacagagtttcactcttgtcacccaggctggagtgcagtggtacgatctcggctcactgcaacctccgcctcctgggttcaagcgattctcctgcctcagcctcccaagtagctgggattacaggtgcatgccaccacgcctggctaatttttgtatttgttgtagagatggtgtctcgctttgtcatgttggccaggtctcgaactcctgacctcaggtgatctgcctgccttggcctcacaaagtactgggattataggcgtgagccactgcgcccggcctgggcattatttttagcttcaaatgaccctttgtagcacaacaatatgcaagtggtgggtgcgtattggttcaaatccaatgactataactggaaggagtctacgtccccctggttttattcattgtgagaaatcgtacaacagcagtcccagaatttgttggataaacactgtaatcctgcccccaagatagtcctcttttccctgcccagttctattctctttagctgtttacacatccattctgtataattaggtgtcattgtgcattcttcacttttatcgcttattacatcagcggcaggtttgtgtgctcttttttcacctcacttactaaaacaccaacgcacgtaaacttttacagccagcatttcagggactgcataattccccaccaggttggcacactcccctgggtgtccctccccttccctgggagacgtctggcagagctcaggacacagcgggaagtgtctggacttggccgccagccaggctggatccaggtgtggcctctggtggccccgattagctgcgtgaccctagatggggaagtgacctccaaacagcgatgtcttggggctctgaggtgtcgggaaatggaatatcttcagtgccaagctgaggacactgcacttccttccttccctggtgggaacagttactggccagcgctctccgggcgcgggctggtcagtgtgcgtctctgagcactcaggtagctggaggaggatggatgggatggttgagaaccagacccaggccagggaaactggtcgaaagcttgcaggcctggtgatttatgataatgcgtggaaacttcttttctgattccggagccagagaacaatctcagaggatagagtgtcctttccctctgagctctccaggagctgaaatccctttgctcagtgaatggaaattgacactgggctgctgctgctgtttcctgagtgactatattgtttgccctagaatcaggatttattaaagaacattaagcttactttttctaaatcaggtaagcataataatatctgtgtctgaagataaactgaattctgtgttcagaggatgtttaaagtgcatgcattttgactctaactatcatcatatattttggtcatgacaaaattgagggggcaaccctttttttccccaaggggttgtgttcacttttgaccaatatctgtggtttcatttacagattcccactggaaattcgttgtatgaatcttattacaagcaggtaagtttagctgatgtctcttcagatggaactagagcatgcctgagctgaaagcacagtacagaatagaagcccggctgagcggccttttgtccttttctgttcactgtcagcggatagttagcgtggcgggtgccacttcacctgctgctgcatttgctgaaaagttattttgcctcttggtctcccatttcaggtcgatccggcatacacagggagggtgggggcgagtgaagctgcgctttttctaaagaagtctggcctctcggacattatccttgggaaggtatgtgaagatgaatagtgatttctcttctgtggctgccctcacagctccccccgcaggtcagggccagcctgtgcaggcctccttccatggggcccggcctcctgggtagtggcctggtcgctgcagacctctcaggctgcagctggtggatccaaatgcccaggtggcagcccccaccactactttggtagcagataagaaacccgagtacttttggggtcttgatagcttgtggacttttttttttttttttttttttgagacagagtttcgctcttgttgcctaggctggaatgcagcggcgcgatctcggctcactgcaacctcctcctcccgggttcaagtgattctcctgcctcagcctcttgaatagctgggattacaggcacatgctaccacacccggctaattttttttttgagacagtctcgctctgtcgcccaggctggagtgcagtagcgtgatctcagctcactgcaagctccaccttctgggttcacgccattctcctgcctcagcctcccgagtagctggggctacaggcacctgccaccacgcccggctaattttttgtatttttagtagggacggggtttcactgtgttagccagactggtctcgcactcctgacctcaggtgaatcgcccaccttggcctcccaaagtgctgggattacaggcgtgaaccaccgcgcttggccacttgcggactttagttgggggaagaagggtgtcataaacaccattggcttgggagctgagtgcacctggatgtcctctgggccctgccgctgactggctgtgcgcccctgggcagatcattcacctgctctgaattggcttcttcatctgcaggacaacctggggacagtcactcctgccccgcaaggccagtgatggggtggtggcggctctggtttttgttaacacgtggacagtgatcggcagtcatgcttatgagcatttttgtgtttccgcagatatgggacttggccgatccagaaggtaaagggttcttggacaaacaggtatatacacatgtacacagagcaaatggaggggctgggcagagcccccaggctgggtgacctccacggctccttccacattcctccactgtcaagtattactaggcatgagcacggctgtcaaacttaacacgggaagttttcattttgaaataaaggtcttttaaacacttggagccatctttcatggctagtgtatcttttatttatttatttatttatttttcttttaatgttttgtaaccttacatgtgattaaagtgttgtccagactttttattttggaccagtctctcgtggaagttgcacaaatagcttggagggttcctgtgtatcttttgccagctctccccagtgatggtgtcttacataaccacagcacagtgatcagagccagaaaataacattggtgttattttttatttttttgacatggagtctcactctgttgcccaggctggagtgcagtggtgcaatctcggctcactgcaacctccacctcccaggatcaagtgattcccctgcctcagcctctggagtagctgggattacaggcgagaaccatcatgcctggctaatttttgtatttttagtagagatagtgtttcactatcttggccaggctggtctcgaactcctgacctcaggtgatctgcccacctcggcctcccaaactgctgggattatgggcatgagccaccacgcccagccacattggtgttattaatgtaacaaagtagacattggtgtaactttgactaaaggccttaatcagagttttttttttttttttttggagacagagtctaactcttgcccaggctggagtgcagtgacatgatcttggctcactgcagcctctgccctctggattcacaagattctcatgccttagcctccacagtgaaaaccccatctgaaaaaaaaaaaaaaaaaatctgaaatctgaaactcttctgataccaagcatttgggatgaggaatactcagcctgtacttataagtgattttaagtggtcgtagatggccattttgttagaagggaccttgtttgtgctgtgccatgacttgtgatccagtctgtccaggaagcccccttcacttgtacctcccttctttgaggttcatggtgcatgtctgcatgtttgttgttttgtttttttattttttattttttgagcctcgctctgttgcccaggctggagtgcagtggtgcgatcactgcttactgcagcctcgatcttctgggttcaagtgatcttctgcctcagcctctcgtgtacctgaggccacaggcacacactgccacacctggctaatttttattattttttttgtagagacgaggtctcactatgcccaggttggtctcaaactcctgtgctcaagcaatcctcccatcttggcctccctaagtgctgggattataggcatgagccaccgtgcccggcctcatgtctgcatgttaaaagttctgagaattcctatggaaaataaatttgactttgcttaatgcagttcctctaaacttacttaattcctttttctttttttctttactatttattaatttttctcttttctcagaccttgcagggatgaaaggtccccttttctcaaaaccctcttatgatcctctacactctgcaagggcttctgaggacagcaggctgagaaaggccgatcctagcacttacctctttgaagacacttttaaaactgttaacagtatttatagctttaaaagtatccatgttcttaggccagttaataaaaaaaaaaaaaaacagaaaaaaaacaagctaagtgatccctcacaagtccactgagcctttgtgtggtgggtcctgggttaggagggaggcacctgacagcctagttcaacttccttcccgtgtctaggtggggtccacgtcaggccactgggggtgggcaggggatgttccattcaacgaggccgaggggatcgtggtgaaccacagatatgagtttctgaccaaccgtgtgtatttacgactgctttaaaaaaaattcaacacatagccaggtgcagtggctcatacctgtaatcctagctactcaggaagctaaggcaggaggacaggaatttgagaccagcctgggcaacatagtgagatcccacctctaaaaaaataaataaaaacttagctgggcatagtggtgcacacctgtggtcccagctactcaggaggctgaggcaggaggatcgcttgagcccatgagtttgaggttgcagtgagctgtgattgcgccactgcactctgggtgacagagtgagaccctatctctaaaacaaacaaaaattcggcacatatttggtccatcattcgtaaccttaaccatgtttaattttgttgctttatacaacctaacatttcctaaatgttgggagctcatagtttttggaaaatatatgcatctgaaattttacagatttccagatgcagtggaataagtccattttattttattttatttatttattttgagacggagttttgctctttttgcccagcctggagtgaagtggcatgatcttggctcactgcagcctccaccctctgggttcaagtgattctcctgcctcagcctcccaagtagctgggatttcaggcacctgccaccacgcctggctgatttttatgtttttagtagaaatgaggtttcgccatgttggccaggctggtctcgaactcctgacctcaggtgatccacctgcctcggtctcccaaagtgctaggattacagacatgagccaccacacctggccaggataagtccattttagtgtattcatttaagcgatgtccccaaggtgagtccagttcagcccaacgctccaaggggtttttgcacggacggccttcattgttgaagtgcacatcctctttccctgaagcctgctgttagagacagctccccctaccctcactggcgatatgctgtttactccttccctttctttggacttgcagggtttctatgttgcactgagactggtggcctgtgcacagagtggccatgaagttaccttgagcaatctgaatttgagcatgccaccgcctaaatttgtgagtgtccaagtccttcaagttcacattcttctaataccagatgtgtgtgtgtgtgtatgtgcatgtgtgtatgtgcatgtatatttccatgttttctctagccttccccttttattgtggtgaaattcacataatagaaaattaataattttaaagtgaactatttagtggtatttagtgcatttacagtgttgtgtcttcattacctctgtctagctccagaactttttcatccctccgcaaggagaccccatccacattaagtaatcactccttgtctccccctcccagtcgctggcaaccactaattttatttctgtcaatggatttgcctgttctggacatttcctatcaatggaattctctaacatggtcttttgtgtctggcctctctctcagcatcgtgttttcagggttcatccatgttgtagaatggatcagtgtttccatattccatttactggatggaccacatctttatccattcatctctctggacatgtgggttatttccacccttttgactgttgtgaatagtgctgctaccagcattcatgtacaaggatttgtttggacatccgtttttaattcatttgggtcaatacgtaggagtggaattgctgggtcatgtggtgattctgtgtttaactttgtgaagtcttcccttttttgaaagcactttgaaacgtgtatccttttcagcaaacccacccacctatgatttaattctgtgccagccacaaaggaatgtttctctctcttctcagcacgacaccagcagccctctgatggtcacaccgccctctgcagaggcccactgggctgtgagggtaagtgaacgggaatagctccctccttggctctccttcagatagaattgttccagcagttgttctagaattgttctggaattgttctagtttgatgttgttcagaacattttataggatgattgtgtcagctcttctgtctcagtgtgagtggccacagcacttggatgaaacgcctcttctaatgaacaccttttacaaaggctgtggcccttcactggaattgggagttgcctacctggacaactaagtgtcaggagttggattattaaagggctgcagtttaaatcttgcatctttaggtcacattctgtggtttttgctgcttgtgttggttattcagaatagaagaggaaacggtgagagcttgcaagcacgtggacccccaaatgtgtcccttgctttctcgcttctttccagccactttgcatgttaccattctttcctccctgatgttctgattgctttgtgaaaagcctctctcagcacttgaagtgttatttttaaaacagaggatgttgtggctggaaagataagctactgcgtccagaaagaagaaaaaaaacgagggctgtcttctaagtacagaattccttctaaaggaagtgagcatggtccctccaagtaacatcaggcctcctcaccttcccttcactttcagactgtcacatttcctcacgtttatgtggcttaaatcctgacatgaataacactcttgctctcaaataaaggtcccaagcactttcgtcccatgtttacacggttggtttgctcccttcttggagaggtcatgggctgggtgggggtatctgtgcagggagaggacatgaagatatgtcatgtgactgaggagtcatgcagtcacctctgtcatcaagcactttgccagtggcaatcactgtggtgaagggtttctccctgtcacccagcgcattgtgtggactttgaaaaagagctactttgtcatgggaaacagtgccaagagatcttatactttaaaatgtgatggctcttttccaccaggggttatgtccaggcctcactggaagagctgggactgaggggcctggggacctcgcagagaggagtcagggagcacaggaccagatgctgtaattggggtgtactgtggtcgagagagattctgcattccattcacagccacagtcagaaagaacaagcccgaagtgccaagtgtttgtttccgttgtgaacatttctgggcttctgaaggcactgagtcagcaagtccgatggccaggagaggatcccaggcccccgagaaagacctgcagcgctcagcttcttagcaccaacagctgtgaaagcatgcggtgtctgccggtgatctcatctctgtgactgagggctctgtcttggtttttgtcttttaaaaattaaaaaatttttattgtggttgaaagacacatcatgtaacatttaccatcttaaccatttctaagtgtacagttcaggaatgttaagtttcctttggagggtggaacagactggaagccactgcctcactcatggccccttttacgggctgcctgccctatgtctttcagaacagcaggaactgtgactccccatcctaatgctgtaccttccctctgttcatgaagagctattcctatttacgtattaatttatttaccattagaaatggagggcttcctgtatgtggctgggcttggtggctcacacctgtaatcccagcactttgggaggccgaggcaggcggatcacttgaggccaggagttcaagaccaacccggccatcatgttgaaacaccatctctacaaaaaatacaaaaattagccgggcctggtggcgcatgcctgtgatcccagctactcgggaggtacgagtgctgaggcacgagaattgcttgaacctgggagtcggaagttgcagtgagctgagattgtgccactacactccagcctgggcaacagagcaagatttttgtctcaaaaaaagaaaaaaaaaaaaaaaaagaggacttcctgtactttaagttgattttgataattatttgctcaagcactaacatctgctcacacttttgtctttctggtacaagtgggctccttggaggcaggtgagactgatctttgtctccctgcaaagacactgccccaccatgggagactcctgccacactcaggcagcagctaggacgaaggacaagacccggggccagggcctccctcctgaggaccttggctcccagatccgaggttgccataacgttatttccttcagggtatatgttcactttggaaaccaaggggccaagactgttctaagatcattttgtgcttttagccaagggtgatgatgggtccgtggccattttcacttggctttcggtcagagctcggtctggacattcacacaggtgtgctctcctacttactcgggctatttctttccaactaggtggaagaaaaggccaaatttgatgggatttttgaaagcctcttgcccatcaatggtttgctctctggagacaaagtcaagccagtcctcatgaactcaaagctgcctcttgatgtcctgggcagggtaagtgggccacgggcttggttcttctgcactcagtgtccctgctgtgtgtgggcgccactgttctctttccccatggtgcttacaaggctcttgctctgttttctccctgtgccatcaggggctttcatcagcgctcctgtgggtccagccccagctggctcagggcttcctagggtgtggcttacagtgttcacccagtccctggggaaggtgccagaatccttccacttcacagatgaggaggtggactcagaagtgaaattgctgcctggggctttgggaccagtagagctcagtcttaagctccccaacttgggctttccccctttccattgtgctgaatgtgggaatgtgtgtctgtgtctatttatttatttatttatttatttatttatttatgagatggagtcttgctctgttgcctaggctggagtgcagtggcacgatctcggctcactgcaacctctgcctccccggttcaagcaattctcatgcctcaacctcccaagtagctgggattacaggtgcatgccaccacgcccagctaatttttgtatttatagtagagatggtgttttaccatgttggccaggctggtcccaaactcctatctcagattcacccgcctcggcctcccaaagtgctgggattacaggcgtgagccaccacacccgggcttttttatttctttttttgagtttttagagatggggtctcactgtgttgcccaggctggtctcgaactgccaggctgaagccatcctcccacctcagcctctggagtaactgggactgcaagagcaccaccactcctggctcttttctactattaattactctttttcttctgataaagctcaaggtaaaagtattttcaactctgctgcaaatttaggaaaaattttatgcattctctttaaagaaagtcttagcctggtgcggtggctcacgcccgtaatcccagcactttgggaggccgaggtgggtggataacttgaggtcaggagttcgagaacagcctggccaacatggtgaaaccctgtctctactaaaaaaaaatacaaaaattagccaggtgtggtggtgttcgcctgtaatcccagacacttgggaggctgagacaggagaatcgtttgaacccaggaggtggagattgcagtgagctgagattgcaccactgcactccagccagggcaacagagcgagactctgtctcaaaacaaaaacaaaaacaaaaaaaaccctcaatttaggctggtgtggcggctcatgcctgtaatcccagcactttgggaggctggggcgggcagattacttgagtccaggagtttgagtccagcttgggcaatatggtgaaaccccatccctactgaaaaaaaaatacaaaaaactagccaggtgtggtggtgcgtgactgtagtcccagctactctagaggttgaggtgggagaatcacacctgagcctgggaagtcgaggctgcaataagctgagatcgtgccatggcactccagccagggcaaccggattgagactctgtttaaaaaaataataataataattaattttttgttttgttttgttttgtttgtgagacagagtctcgctctgtcacccaggctggagtgcagtggcatgatctcagctcactgcaacctttcctcccaggttcaagcaattctcctgcctcagcctcccgagtagctgggattacaggcatgcaccacaacagccggctaatttttgtatttgtatttgtatttgtatttgtatttatttatttatttatttatttgagacagagtctcgctctgttgcccaggctggagtacagtggcgcaatctctgctcactgcaagctccgcctcctgggttcacgccgttctcctgcctcagcctcccaagtagctgggactacaggcgcccgccaccacgcctggctaatttttcatatttttagtagagatggggtttcaccatgtcagccaggatggtctcgatctcctgacctcattatccgcctgccttggcctcccaaagtgctgggattgcaggtgtgagccaccatgcccagccaatttttgtatttttaatagagatggggtttcaccatgttggtcaggctagtcttgaactcctgacctcaggtgatccacctgcctcggcctcccaaagtgcaaggattacaagcgtgagccaccgtgcctggccaaattaattaattttaaaagcctcaatttgtttctgttaactaaaagtacagttgtcccttggtatacttagggggattggttccagggcccctatcatacaccgaaatgtacgcatactcaagtcctgcaatcagtcctgcacatacaaaagtcggccctctgtatattcgggtttcacgtcccacgactactgtattttgtatccacgtttggttagaaaaatacaagcataagtgagcttgcacagttcaacaaaccatgttgttcaagagtcaaccgtgttttgctttattttgcgtttcattatttttatttttgatgatacataatagttgtagtgtggggtccacgtggtggtttgatacatgcacacaatgtgtaatcatcccagcagggtaattagcatatccatcacctcaaacactgatcctttctttgtgttgggaacattcaaatcttctcttctggaagactctgaaagatatgataaattattgttagctatagttcccctgttgtgctgttgaactttagaacttattccttctggcccggtacggtggctcacgcatgtaatcccagcactttgggaggccgaggcgggcagatcacgagatcaaaagatcaagaccatcctggccaacatggtgaagccccatctctactaaaaatacaaaaattagctgggcatggtggcacactcatgtagtcccagcgactcgggaagctgaggcaggagaatcgcttgaatctgggaggcagaggttgcagtgagccaagatcataccactgcactccagcctgggtgacagagtgagactctgtctcaaaaaaaaaaagaatgtataccttctatctaaccataaatataagtattatttatttatttattaaaaaaaagttttttttttttgagatgaagtctcgctgtcaccgaggctggagtgcactggcaccatcttggctcactgcaacctccgcctccctggttcgagcaattctcctgtctcagcctcccaagtagctgggaacacgggtgcaccccatcacgcccagctaatttttatatttttagtagagatagggtttcaccatgttggccaggctggtctcgaactcctggcctcaggtgatccgcctgccttggactcccaaagtgctgggatggatgacagtcgtgagccactgtgcccggccatgcatacatctttgtatccatgcatctatgcacccatgtccctccgcatccctatgatccattcatctgtgtgtgcacatgcccatgcaatgtatttatccacatctgtgcatgcgtctttgtgcccatatgtctatgctgccatgtccccgtgtgtccatatttatacattcatccgtgcgcacttgcatccgtgctgtcatccatctgtgcatccaggcactcacacatcgtgcatctggtcagtcattcagtaagcatttttcagagcctgcagtggaccatgccttgtgctgggcagtgggaaggtggggataattagataccgtcaaagaagtcaaataagtaatagctaagaggctgagacttatttactgagggcttagtatgggcaggccgggccctagtgctctgcgtgaagacacacatccagcacttgcagccctcctgttaaggactgtgtctcacacccctccaccacccatttttcagatggcgaagcagatcttcagggtggttgggaagtcaccttggttgcacagttgtggaagggtggagaagggatgaggtcctactgtggacagggcggggcagggtccagtgtgcattctggagcagctgtccctagagcctgccctcttcacctgccctgtccattagacacccccacagcatccctgataatcacagtttggcccagtgagggcagtggtggaggggagggcccctgacccactcgagcacggggagcagggcagctggggaagactttctagaagaggtgcccctggtcacatcctccagggtgagggggactctggtagaagtctgggcatgtgggcaacttgagtgaaggcacagaggcctcaggcagtctggcatgccagttagggccacagctccccctggacacttccaccccccaggggacattgggcaatgtctggggacatttttggttgtcacacctgggtcgagtgctgctggcatctggtgggtcaaggccaggaatgctgctcaccaccctgcagtgcacggcatggcccacaccccagagcatgatccagccctaacaggcagtagtgctgaggtggggaagccctgggctgagggaggactgtggagccagaaaggcctgttggagtcctggatccctggtaaagtaggtggaggtccccgtggagtctgtggaggctgggttggggtgcagggacctgctaccgtcaggggctcagcagcagccaggtgacagggccccatctgccaggctgaggagcagggtggggcagggtcaggtgtgtgttctggagcagttcctgtggtagccatagggacaagactgggatagggaggccagctggaggctcttggctgtgtgggctggtgaggcctgagcctcgggcgcagcagcagaggtggagaggaggaccagatgtgagaaacctgcatggactgaagccctggtgattggctggagagaggtgatgctgacacatgaagcatcatggatagagccacgggcatctgcttagatccggggactggcagcctgcccagcgttggcctggcaggcagtgtgcccatccaggaaggctggcatgggtcaggaagctggcagcgtgatggtgcttgagatctgcacgtgtcttaggcacgctccagaacccacgcctgcctgccttctcttcagcgcactgagtggcctgacacctgtctcaccatccactgctggggagtggagacgagacccacagacctgctcagacatgagctcgcagccctgcccagctgagaatgcaagggaggggtggggtttgcaggagtgagcatagggagtgtgggtgtttagggcaacacctgtactcaatcaaagctgtcttttctaagatgtctctgtaagacaataaagaagaaactcagggtaagtttaaagtatagcctttaaacttataatcttataatcaatatgattataatcatgatgattgtcagaccacagatctggtagttgacagtacttcacaggtgatggtttttctgagaactcgcggactggtcctgaaatgtatattgactgccgtctcctgagcccagtgagtgccacggctgagagtctgagttccggcaggtggtctcactctcacccagtccttcctcccacagttacccatgctggtctctcccttgcaggtctgggacctcagtgacattgacaaggatgggcacttggatcgagatgagttcgctgtggtaagtcctgctgtttcctccccacccagcccaggaaggaaatgtgcagtgcgcaggggttgctggattcgtttgtctttctctcttttttcttttcttttttcttttcttttcttttcttttcctttccttttcctttcttttcctttcttttctgtctttcttcctttctttctttcactttctttctctctctctctccctccctccctccctccctctctccctctctcctctctctgtctccctccctccctccttccttccttccttccttccttccttccctccctcccttttctttctttctttctttttttttttgtttttagatggagtctcactctatcgccaggctggcattcagtggcccgatcttggccaggatggtctccatctcctgccttgtgatccacccgcctcggcctcccaaagtgctgggattacaggcgtgagccactgtgcctggccttctttctttctttctttctttttttttttgatacggagtcttgctctgtcacacaggctggagtgcagtggtgtaatcttggttcactgcagcctccgcctcccaggttcaagcagttctcttgcctcagcctcccaagtagctgggattacaggcacctgccactatgcccacctcatttttgtatttttagtagagacagggtttcaccatgttggtcaggatggtctcgatctcctgcctagtgatccacccgccttggcctcccaaagtgctgggattacaggcgtgagccactgcacctagccttctttctttctttctttctttttttttgacacggagtcttgctctgtcacccaggctggagtgcagtggtgcaatcttggttcactgcagcctccacctcctgggttcaagcaattcccatgcctcagtctcccaagtagctggaattacaggtgcactccatcacagccagataatttttttgtatttttgatagagatggggttttaccatattggccaggctggtcttgagttcctggcctcaagtgatctgcccgcctctgcctcctaaagtgctgggattacaggcatgagacaccacacccagccttccttctttcattttttaagtgtttgtcttgacatagttctttgtatgtaggaaagtttcagtataggttgagtatccttaatctgaaagtctgaaaccagaatgcttcaagatctgacattttttgagcatcaacatgacactcaaaggaaatgctcattgaagaatttcagattttggatttttggattagtaatgctgaaccagtaagtgtaatacacacattcagaaattcagaaaactccagaactgaaaccctgtggtcccaggcattttggataagggatacgcaacctgtaatacagagaattattttttgtttttgagacagagtcttgttctgtcaccccagctccagtgcagtgacgtgaacacccttgctgcagcctcgaactcaactcaagcgacctccccccttggcctccgacagaaaattcttttgaaaactcttcagtcaaatttcccagtgtcactaatttcctacatttgttttatctttctcctcccttcttcctccctccctccatcactctctcgcccttcccactgctgcacgaagttttcctgtgaaccattttagggttaagttgcagacatgatgcctcttcatccacaaacacttcagtgcgtatttcctaaaaacaaggacttctctcacacataaccattatccacttcaaaatcaggaaattcacatcatagcattgcatttatgatgttttcattatatcctgtatataccccttatattctgtatgagcgtgtctattattatctaatcccaggatattactcagattttatcagttgtcccaaaaatgttccttgtgtctaaagagaacccagtcctgtgtgttacatcctgttgtcttttgtctttcgtttcctgggatctagaacagttcctccatcgctcttcgtgtctcttgacgtggactttttgtttttttgttgtcgttgttctgtttttgagagggagtctcactctgtcatctaggctggtgtgcagtggcatgatctcagctcactgcatcctccacctcctggattcaagcgattctcctgcctcagtcttccaagtaactgggattataggtgcccaccaccacagccagctaattttttttttgaatttttagtagagatgcggtttctccctgttggccaggctggtcttgaactcctgacctcaggtgatctgcccgtctcggcctccaaagtgctgagattacaggcatgagccaccatgcctggtttcaacgtggacattttgaagagcacaggccagcagttatggagtgttcctaggcctgggcctggctgccaggtcctcttgatgacccaggtcatgcactcttgtgagacaggaatcccacggaggtcacacccgccccacatgggcctcccacctgggggaacgtgatgtcaacatgtcttcttactgccatgttgacattcatcactgggtcaaggtgggtcaaggttgtgggttcctgtgggcagttgctctttttccctctgtgctcagttcatctcatgtggggcacgccttgatacggtcaacacccatgactctcagactcttccatgagagttccaccatcgctgatgagtctcgccttaatctggcaagattaattatgatgatggtggctgccaaatggtgatgtgctaatcaaaaccatcattccttgcacttttattagttggccttccacaaggaatttatttctatggctgtggcctgcctcatggatgcatcctcagttccactgttttttgttttgttttgttttgttttatagagacagagtctcgctctgtcacccaggctggagtgcagtggcgcgatcacagctcactgcagcctccatctcctgggctcaggcaatcctcccacctcagcctcccaagtagctgggactactcctgaacgtcttgaagtacaggtctctcttctggtgtctttagacttccaaatccagtactgggaaggtgccagccctggagctggtggcctccctgagtggtgaagggatgcatatggagtctggcttgattggattctttctgtgtgcatttcagtctcgaggaataattcaacacatgtcttggaaagttacacataaaagataactcatgaggaatgatttcttttcactctggtcagcttgggagcgtcctgacagagtgtcctgtcactgcagcccccaaagggctgccctctgccttctcctgatggtcccggccccagccttgccccttcagtgccattgttgtttgcacctgcaggccatgcacttggtgtaccgagccctggagaaggagcccgtgccctccgccctgcccccgtccctcatcccaccctccaagagaaagaagactgtgttccctggcgccgtccccgtcctgcctgccagccccccaccaaaagacagcctccgctccacgccgtcccacggcagcgtcagcagcctcaacagcacagggagcctgtcccccaagcacagcctcaagcaaacacaggtacggagccctcagcgggcacagccccctctcagagcacagtaggatgtttctcgggagttcttaacatgcaaccccagaacggtcaagcttgtgatgaaatgtctttaaaaaatgcttgtggccaggtgcggtggctcacgcctgtaatcccagcactttgggaggccgaggtgggcagatctcaaggttaggagatcaagaccatcctggccaacatggtgaaaccccgtctctactaaaaatacaaaaaaattagctgggtgtggtggtgcgcacctgtaatcccagccactcgggaggctgaggcaggagaattgcttgaacctgggagacggaggttgcagtgagctgagagcgcgccactgcactccagcctgggcaacaagagcgaaactctatctcaaaaaaaaaaagtattcatttatctcattatttcaacatggtctcccctatgttactcaggctggtcttgaactccttggctcaagtgatcctcctgcctcggcctcccaaagtgctgggattacaggtgtgagccaccgtgcccagcctgtgtctgcagagctcttgccaagagttttgaaagtcaggttaggggaggtactttactggcaacgaagctagtggggccaaactcactggtaggcacaggtcacccagcgtcataacccacctctctagtgatcttctggtggttctctcaagaccctctgactagaccgattttaccagtggcccctggtggggtggggtgggagggtatagctcctgcccccacgacggcattggtaggatcacagtcatgaaaacgagcatttctgggggcctacagtccacatgctccccctactccaacttcctcatctccaggccagcaatgctcttgtctgggcctcccaagggccacccgattttgccctcatgccaggtttgagtgaagccacttccagccaccagggtctgatatccttcctttgggacctgtggctgctgagccggccttaaagcccagctgtcactgggagagccagctccacggcaaggctgccccgtgttgggtttatagtcaatttggcatcagaatcttgctgctaacatactctgaggctccagaaatcaggcagtgagttccttttgtttgcccagcaagtattattaggactcttgtcatcccagagctataatttcatacgtaatttcttcttgggacccgtgggacacagaaccccccttgtttctgtgtcccgccacagctcagcttgtctgactcctgttacctctttgtgatccctggcttctgaggttagcttgctgtagctccgtgacttaaaaggcagcaagcccatttctcattagaattcctttattggcatctttacgtccaccagacttgagaaggctcacaaaatttacacagtacaatgccacaagtaaaaatcaggttgctcttgccatctgaactctcatcatttgaattagatccatagattttttttttttaaatatataagagacaggatcttgctctgctgccctggctggagtgcagtggtgcaatcacggctcattgctatctcaacctcctgggctcaagtgatccttccacctcagcctccctagtagctggaataggtggatgccaccacacctagctaattttatttatttatttattttgtagagatggggtcttgctgtgttatgctggctggtcttgaactcctgggcttgagggatcctcctgccttggcctcccaaagtgctgagattacaggcatgagcactgtgcctggcctagctccatggattttgataaattgtttgatcaagtccttgctgtacttcatcacacatacttgctacgtgaaacccctgaactaagctgatctgggtcacatggtatcccttgtttcccaagcttgctttctgatttccctgagttggtatcaggagcctgttagatttggacatcacaggagactcgttcatgaagagtaaacgagtttaaccattgtttcccagtcttgaccatgagtcccttctcctcaatcctatggacatcttcgggttgtcaacactgtgagaactctttgagaaatcccccccccctttttttttccccgagacggagtcttgctctgtcgcccaggctggagtgcagtggcacaatctcagctccctgcaacttctgcctcccaggttcaagcaattctcctgcctcagcctcctgagtagctgggatcacaggtgcctaccaccacacctggctaatttttcgtgtttttagtagagagggggtttcaccatgttggccaatctggtctcaaactcctggcctcaggtgatccacccacctcagcctcccaaagtgctgggattataggtgtgagccactgcacccagcctaagaaatcctttcataactgagaggaatgactttgagtggcagtttcaggcatcatggcgttcattgaaggtgaggagtggagtggcttttctgtacagttgctgcgtggagaaggaacaatcgatccctccagccacatttgcctgtcctttttctctccactccctcatcatctagataattcaatcaggtgtttattctcattgctattatgagattgtttaaaaggagtgatttgtgtaaatatttaaaaaaaaagggaagaggaaaagcacgtctagagttcaggacacagatgccgtgaactgtggcgtggtgggtgtattgaaggcccgcggtaatgcaggtggagtaggccacggaaggggcctgcccctgagtgcctgaggggcctcaatgcctctgaaccaggaggtgaccgggccctggttgacccatgatggcgtttgcctctctcaagttaactgtgagctggtggcgagaggggtcgcacgtgcagcgggtgacccagccccagggctgtgaactttgagctgcactgggctcgtggctccatctgccctggtggggttggggctgcatgaatgttggtggggcctcgtgggtggtggccctcttggatggtggtgtctcatttgttacctgtcagtgacgtgtgtgtactcacaccttgggggtatctttgttgtctcaggagtggggcagggacatagaagggtggtcttcagagtcctgggacaggacactttggctgcctgtagggcagcctttgcgggctgaggagtgggaggaccagggaggctggcatgtggccgggccggttctccagggacggtccttccaagtgggtgctcgggagggtctttcctggcatgcttgaacccatcccctgaagatcacagcctccctcacaccctgggtggcagggtggatggacaaggagagcgggtgatggggtggagagaggtgcagactggcatctgggtgagcttcacagagccagcctcaacctgtctcagcctcagttttgccagttacagaacaaggatcacatctgccctcttggctcatggaagtgaggagagtttgatgccaaatgtgcatggaagtgctttaatcgccccatcatcaaaaagcatgtgtctgggggtcataaaaagcttccagattaactgttttgccaaaaactgtttcagccaacagtgaactgggtggtgcccgtggcagacaagatgcgatttgatgagatattcctgaagaccgacctggacctggatggctacgtgagtggccaggaggtgaaggagatcttcatgcactcgggcctcacccagaaccttctagcacacatatggtaaggccggacaggtggcagttgtggctgtgggtggctccagggggcctgtgggtgaagactgtggagggtggtggtcagggggccccctccagcctgtcacaggcttccgctgtgtctggcgtcctttattctccctggcctgacagaggctgagcaaggtgcacgtgccaaggctcgaagcccgcgctccgtgacggtcagttcactgtctttcagtaggaagggcctctggtccgtcttaagtgctcccaggccatttgcttacacagctgggccctattcttgctggctgtgatgctggctctaacaggaggcctggactttgtcacagccgcctccgggaggtgcgggcagcagggccttggagcctctagcagagtggcctggcagggtgagggcgggggcaggaggccctgctctggaaaggccagtgctttggctcctggcgggagggtgagcacaaggagaccctgtcagtgcctcagagcccagtcgaggagtcggcctcaacccctctttcccccagggctggacacagccgacttcatagggctggggcactcctcttgccactggccagggctgaagtcacttttgagcttgttgctcagagccttgtggccttagagaaggcttcacttgggagctatcaaaaggaaagaattgctggataattctcgagaggcaaatacctccaagtagagcagtgaaattcaggatgttacttagtggcttgggggaaatgactgtccttagtggtaattcacagatgaccacactgtgaggtgggagcctgagaactagctgtcgcagagtcatcacccaaatggccaagccgcctccaactggctagggacagtgggtctcagctgcctcagatccagtgtcccttttagaaaccaacaaaacacagtgtcccctttatgactctgaaaccaacacacatacagttcctggttagcgccctgacaccctgactgtcatgtctaggggtcagtagagggaaagtaatttataatgcatgctgcaattgacacatgatgtaatgacatggaaatgacacaggaaatcactaatccacctggatcaaaagaaggaactcagaggtcattccatgcgggcagcaaaggggaaggaaaggatgatcaggctcttgaataaccatgagaaaagaagtctagatgtgtctgcgagtggctggggcggggcatggcccaatgtagatgacacaccaggagggactgggaggagggggagcatgaagacagaggctttttccctgcgatggctgccaccgtacgggtcagcagagcaggatgtggtgtcagagccggatggccgctgactgagccacccctaagcttgcttctccttctttctctcagaaccttccacaggtgggccttggagcccacactccttgagagatggcaggagcagagaaggggcgggagtggagaggcagctgcagcccacgagcaggctggggcccgcaggggcagactggggagagacagtggcagtatgaaatcgtcagggcctcgaactgtggggataactaggcatttatcagcaatgttctttgagatctgctcattctccgcagctctgttcacggactgcatttgggtataaataagtctgttagaacggtcccagctctcttttggtaaaaggggaaacttctgttgtaatggcttctgccgcagctacacgggaggtgggaaacgaggtccctcgttgagagggcagcatgggtgaaggaagacatttttcatagatgccaaaggccttgtccttactccacaagggtcccttcccttcctggttggctcctcatttttttattttttttttttgagacagagactcactgttgcccaggctggagcgcattggcgcaatcttggctcactgaaacctctgcctcctgggttcaagtgattctcgtgcctcagcctcctgagcagctgggattacaggcgcgcgccaccatgcccggctaatttttgtatttttagtagaggcgggatttccccatgttggccaagctggtctcgaactcctgacctcaggtgatctgcccgcctcagctcccaaagtgttgagaacacaggcatgagccattgcacccggccctggctggctccttgattgtgagtgtcgcggagcctctcacctcagctccacaggaccactgtgtgctgctattcagatgctgccttggcccatctttcaggacatccaagagctatgtgggcaggggacgcttagttgtgggggactgtcctgtgcattgtggccatgcccctgtggcagcctcatttgggcacaagaggagtgttttagaccattgggctgctgtgacaaagtgccatagacagagtggcttagaaacagacatttctcacggctctggggggtggaagtctgtgatccaggcaccagcagatccagtgtctggtgagggctcactgcctagtttgtagacggccacctgcttgccgtgtcctcacatggcaaaaggagcagagagagccttctggggcctcttttataagggcactaatcccactcctgaggctccaccctcatgacctcatcacctcccagaggccccacctcccaacaccatcccattgagggataggatttggacataggaatctggggggacataaacgttccgttcataacaaggaaagagagtcgttgctgattctttcttcatcatgatgacaccccaaagtgctgctgtcatccccattgaaggccagtagccggggccattcagatgacccagagctacagggacaatgcttggtctcagcacccatttccacggaagggctggtctactccatgcctgcagcatcagagcctgccccacgcacgagataagccaaaggaagaggcagctgcatctcagccctagtgaggttttcccagggggtcggctcctcagcccaggtcaggggcttggggttcttcagccctgacagccctcctagggtgggggacactgggagcggggaacccctgggccacttcctgggaaggagatgtgaagtagggaaggagctggggcttgccaccacgccctgccgttgttttcgtcgctgtcgtttttgaaaagcaagggatcggtgacttgggttcaggctgagtcggcgcctgtgatgtgtaattagcatccccacgtttctcccagggccctggccgatacgaggcaaacggggaagttaagcaaagaccaattcgcgttagctatgtatttcattcagcagaaggtcagtaaaggcatcgaccctcctcaagtcctctcgccggacatggtcccgccttcggagagaggcacgcccggcccggtgagtggtgctggtcatgccctgggggtattgacatcccttcccaccgcctgccaccaggtggcactggtggcacacatgagcccacggtggcgggtgctgcctgtggtccctgccttcctcaacaggggcccccgggagggtggcttggctgcccaggtatttccccaggcagggggctgacacttttgctacctcaccctgtgtactaaagggacaattttatccctgggcccgagaactgctggtgcctcctgtcaggtgatgtcaggttgctaattagagatctcgcctctgaattcaattctaggacagttcaggctctctcggctccggggagtttactggcgtgaaggagcttgatgacatcagtcaagagattgcccagttacaaaggtatgttggaaacggcccttccctccacatccagatgttacacgaactctcccaggttgttatcggaaatatcagaggctcacctggaagtttgctcatcacaggtttattcagaaggaaggaaaagatacagcttctgaggtcctaaactggctcaaggggcttgaagaatgacatcttccatttgaatcagcctcagccagagcccgtagcatctgtgtggtctcaggcaggtcttgaccagagcctgtgggtggcagctgtgtggtcccaggcaggtcgtgggcagagcctgtggcagctgtgtggtcccaggcaggtcgtgggcagagcccgtggcagctgtgtggtcccaggcaggtcatgggcacagcctgtggcagctgtgttgtcccaggcaggtcatgggcagagcctgtggcagctttgtggtctcaggcaggtcgcagctcagtagccccaggcatcagcccctccccagtgctaggaaggccttgttatccttgacagctagggcaattgggtctcagatggcgaggagcgggcttaggacccagcagctgaaggtgtgaaggggcctccaggtctgtggctccccttcttgcctagtgccttagtttcctcatgtgtaaacgagggctttggatgggctgtctgtacttttagagtctggtataaagaaatgcagtcacttcctgtattcccctctggatcctcttcaagaatgacatccttttttgttgtttgtttttcagacagggtctcgctctgtcacccaagctggagcgtagtggtgtgatcatggctcactgtagcatctgtttcctaggcttaagcaatcctcccacctcagcctcccgagtagctaggacgcaccaccatgctggctagattttttttttttttttttaatttgagacagagtctcattctgtcacctaggctggagtgcagtggtgtgatctcagctcactgcagcctctgcctcctgggctcaagtgatcttcccactcaccctcccaggaagctgagagtacaggtgcatgccaccatgcctggctaatttttttatattttttgtagagatggggtttcgccatgttgcccaggctggtctcgaactcctgagctcaagtgatcctctggccttggcctcccaaagtgctgggattacaggcgtgagccactgtgccagccagcatcttttttccagtcgattctaggacagggtggactcttgtgatgacggggcaccatgcagaagggcccaaaggtgctttgccctctgtgggaaagagattgtttacttggctgaaaatggaaagggctttgactttcccagggaggatggatcctggtcctagctgggggatccccgggggtcatattaacaggtgcagtattctatcagctcctctggccttggttttgtgctgttagcagagccctgatgagcaaaggcaggttaggtcttggaggggatcaaggtgggtggctggttagaaaacctgagccacggcctgagtcaggcatcccacttcatgttcagtgcagcagatggttcctgttctgtctcagctcctgggggccgtgttatccaaactggcgatcagcaaggatgtgcagcctgacaaggctgagggtgtcttgaggatgcagggccagcatcctagagcctgggcaggcctgagaatcaggaccgggcaggccaaggatggagggagcccctgtcgtgcaagggtcagggtctaggaagggacgctggggcgtgaatcaccccagtgtggcctcagacagccagaagccttgtttccccaatgtggaggtgacaggctggtgtgtgcagagtgcccatctgtaggaggctggggcctgcagtggccccttgagcaggtggctctgagagtggcccttgattcggggagtgtgggctgagctttcctcttatgatttcacactgccataagccagcaagggcatgtcaggtccttcagtttaaagagcactttgtattgtaagtttctgggcttgtggaaatgaatattccaatgatcacttactgtgtgtctggcgacatgtccctgagagggccttattgttgcacaagtcctgggtccctgggcaggaggcagggtctgttagacacatggtgttcctgtccctgaggcagcctctttgggcacaagaggagggtcttagtccattcatactgctataacaaaccactctgaatgggtgactgaaacatcagacatttcgcacagttctggaggctgcaaagtccaacctccagataccggcagatcgggtctgctgaggacccatttgctgattcctggagagtcaccttcttgccgtgtcctcacagggcaaaaggagcaaaggaagctctctggggtccttcttataagggcactaaaccctgggccttgtggctcacacctataatcaatttttcctgttccaagccacccagttggtgatttgttacagcagtgctaggaaatacatgcacgaattctatctcagtttaaaaataaaagaaggctgggtgctgtggctcatgactgtaatccaagtgctttgggaggccaaggcaagaggatcggttgagcccaggaggtccagaccagcctgggccatatattgagacctcggctacaaaaaataaaaaattagccaggcctggtggggcacacctgtggtcctagctactcaggaggctaaggtgggaggattgcttgagcccaggaagtcaaggatgcagtgagctatgatcgtgccactgcagtccagcctgggtgacagagcaagagcctgtctcaaaaaaaaaaaaaaacaaaaccaaaaaaaggccaggcgtgttggctcacgcctataattccagtactttgggaggctgaggcgggcggatcactaggtcaggagatcaagactatcctggccaacacagcgaaaccccgtctctactgaaaatacaaaaattagctgggcgtggtggcacgtgcctgtagtcccagctactagggaggctgaggcaggagaatcgcttgaactggggaggcggaggatgcagtgagctgagattgcgccactgcactccagcctgggtgacagagcgagactctgtctcaaaaaaaaaaaagtagtagttcagacaggctgtcctgggctgtccagggtgtcacaggctgaggtcaaggcgtcggctgggctgggctcttgttggaggctctaggggaagaatctgtttctaggctcattcaggtgttggcagaatccatttccctgcggctgggggtccgaggtctctttttcctttctgaggtcagccagggccactccatgctcctggacactgcccctgttccccctcacgtggcccctccaccttcaaagtcagcaagggcgctctgggtccttatcacacttgggacatctctaacttccacttgggcaaccaggtggagaaagcgcgctgcttttagagggtggttacattgggagcgatccctcccatggtcacaggtcctacctacagttgacggggaagggactgtacagggcgagcagtcgctgggtctcattcttagacttctgccagcacacagaggggcttttgtgggggtgaacagaatcaggccttgggaaggggtggaggcttattattcactcttgttttcatgaaatatttttaaacattcagagagaaatattcactggaacaagacattcgagaaaaggaagaggcaatcagacagaaaaccagcgaggtgcaggtaagggtctcgttcgttttggttacatctactttgtgctaaatgtagttcaggaaaacttccctccctggctggtggtggggaagggcaggggtctgccctggatggaaacatgagctcttgggggctgcagaatgaagtttttgtttttttttttttcaggctgaattcactttatttttcttgtataaaaaccctatgttgtagccacagctggagcctgggtgctctgcatggagactctggtgtaggtcttgacaaggtggtcagtgaactcctgatagggagacttggtgaatacagtctccttccagaggttgggagtcaggtagctgtaggtcttagagatggcatcaaaggtggccttgtcgaagttgcccaggatggcagtgcagcccctggctgaggtgtagcagtcattgatactagccatcatgagcagcttcttggacacaggtgctgagacaatgccagtgcccctgggcgtggggatgagttacaccagcacagagttgcagtggcctgtcaccttgcaagggacaatgtggggtttgctgatcttgttcccccagtagcctctgcacacggggacaatggagagcttggccagtatgatggccctgcggatggcagtggccgcctccttggagcacttaatacccagaccgatgtggccattgtagtccccgatagcaacaaacgccttgaacctggtgcactggccggcgcgggtctgtttctgcactggcataatcttcaaaacctcatccttgagagagccccccaggcaaaagtcaatgatctcagattccttgatgggcgggagaagagatagctctcctccagggacttgatcttcatgtccttgaccaggcggcccagcttggtgatgggcatccactccttatcctcggccttgcctctgcaagctccgtggccttggtcccggctccggtgctgtccacggccgcgaccccagccccagatgccactgctgaaacctccgtggaagttactgtggttgcccatcccagggcctctgacaccccccccccccccaccccccgctgcaccggtgtcatccgccattcggtgttttctcggagaagaagaagtttttaaaaatatatatatatatatttttccaaatagagatggggtctcagactcttgagctcaaatgattctcctgtcttggcttctcaaagtgttaggattataggtgtaagccaccaagcctggcgagagtgaagatttttttttctttttttttaaaaatggagtcttgctctgttgccaggctggagtgcagtggcacgatctcagctcactgcaatttccgcctcctgggttcaagcgattcccctgtctcagcctcccaagtagttgggattacaggcacgcaccaccatgcctggctaattttttgtattttagtagagatggggtttcaccatgttggctaggatggtcttaatctcctgacctcgtgatctgcctgcctcagcctcccaaagtgctggaattacaggctaaagtttttaaagttgcttataaccatagacggtggcttctctttttctaaaattgagacaagttggccctctgtatccaagggttctgcatctttggatctaaccaaccacagattaaaaaaataaaaaaataaaaaataatccaaattgatgaaacaatacaatatgataactatttacatagcatttacattatattaggtattataaataacctagagatgatttaaagtatacgaggctggctgtagtggctcacacctgtaatcccagcactttgggaggccgaggccggaggatcgcttgagcccaggagtttgagaccagcctgggcaacacagtgggaccctgtttctacaaaaatatttgcaaaagccgggtgtagtggcatgtgtctgtagtcccagttactcaggaggctgaggtgggagaatcacttgagcccaggagtttaaggcagtagtgagctgtgattgcactactgcactccaccctgggcaacagagtgagaccctgcctcaaaaataaatgaataagtaatatggggtggtgctagggtaggggacatgtgtaggttatatgcaaacactgaaccgttttatgtcacacttgagcatctgcaaattttaataccaatctgaaggatggctatgtaattaatgtcaaatgtgctgtattaaagtgtacatttcagtggtgtttcgcataatcaccgtgttgattaaccatcactctatcgagttagaacctgattgtttctcccgtaggcgccagtaggcccataaaaacatctagccctgaacagtaaatggaaggttactttctgaaagattcatcgttaactgttctctttcagtgagtggaagagtttgacactaactttccattaacccaaaaggaaacctcatccccattaagcagttacttcccattctcccctttctccagcccctggcaactactcatcttttttctgtgtgtatggatttgtacccagccacaatggggcacatttccttcatctgttcctcccatcggggaatatttgggttttcccactttttggctgttgtgaataatgttgctaggaacatttgtctgcaggttttcgtgcgaacacctgtttgcatttatctcaggtacctggagttccggacatttcctgtcagtggaatcatacaacacatgaccttttgtgcctggcttcttccactcagcatcatgtttttgagggtcatccatattgtagcatatattagcgttgaattcctttttatggcagaataatattccattgtgtggatggagcacattttttgttttaagaggcagtgtctcactccattgcccaggctggagtacagtgacacaaccttggttcactgcaacttctgcctcccagactcaggtgatcctcccacctcagcttctcgagtagctgggactacaggcatgcaccaccatgcttggctaatttttaatttttttttgcagcgacaaggtctcactgtgttgtccaggttggtctcaaactcctggactcaaagcaatctgcctgcctcggcctcccagagtgctgggattacaggcatgagccaccatgccaagccacgatgggccacattttactcatccatccctcattgatagatgttttggctttgcaaatattgttgctaggaacatttgtctgcaagtttttgtgtgaacacctgtttgcctttatctcaagtgtatacctgggagtgaatttgctgggccacatggtaactgttgaggagctgccagactgtttttcaaagtggctgtaccattttacattcccataagcagtgtactagggtgccagctctgcacagcctcaccaacacttacccatttcccgtttttccttctagccgtcgtggtgggtgtggagcactgcctcattgtggatttcattggcatgtccctcatgcttccctagcgacgtcaagtatctttccatgtgcttattagccatttgtatgtagtcattggagaaaaatcattccgattccttgcccttttatattgaaaaaatttttttcttgccgatttttaaattgcatttttttttttttttgagacggagtctcactctgttgcctaggctggagcacaagggtgcaatctcagctcactgcagcctccgcctcctgggttcaaatgattttcgtgcctcggcttcccgagtagctgggattacaggcatgtgccactacacctggttaattgggttctttttatagctgattttttttttttttttttttttttttgagacagagtctcactctgtggcccaggctggagtgcagtggtgcgatctcagctcactgcaacctccgcctcccaggttcaagtgattctcctgccttagcctcccaagtagctgggattataggtgtgcaccaccacacacagctaatttttgtgtttttagtagagacagggtttcaccatgttggccaggctggtctcaaactcctgacctcaggtgatcctcccaccttggcctcccaaagtgctgggattacaggcgggagccactgcgcctggcctatagctgaatttgaagaattctttatcatttctaggtagaagtccttgtcagatatgtgacttgcaaataccttctcagcatccactgagagtccactctggattgtctttccacattcttgatggtgtcttttgaagcacaagttgttaatgttggtgaagtctggtttatcctttttttgctgctgttgcttttggtgtcatagctgagaacccattaccaaatctcaggtcacatgatgtatccctgtgttttcttctaagagttttatagttttcgcttttccatgtaggtctttgatccatttctagttaatttttgtatatagcataaggcagggatgcaatgtcattgttttgcatgtggacatctagttgtcatggcaccattgtttttattattttactttaaaaaatttgtttttagagacagtctcgctctgttgccgaggctggagtgcagtggtatgattctagttcactgcagcctcaaaatcctgggctcaagggatcctcctgcatcagcttcctgagtagctaggactacagggtgtgcactgccacacctagctaattcaaaaacaatttttttttgttaagagacagggtctcgctgtattgctcaggctcatctcaaacacctggcctctagggatcttcccactctggcctctcaaagtgttgggattacaggtgtgagccaccatgctgggccagtgccatttgttgaagagcctcttctttcccccgttgaatggccctagcatccttgtcaaggatgagttgactatagctgtgcatttatttttggaccctcagctctatcccattgacctatctgcctctcctcatgccactacatcactgacttgattactgcagccctgtaaaagttttgaaatcaggaaatgggcatcctccatctttttcttctctgtcagggttgtcatggctattctgggtcccatgtgtttccatgtgatttttttttttttttgagacggagtctcactgtcactcaggctggagtgcagtggcgcaatctcggctcactgcaaccactacctcctgggttcaagtgattgtcctgcctcagcctcccgagtagctgagaatgcagatgcgtgcccccacacccagctaatttttgtatttttacaaaattttgtaaaaatttgtatttttacaaatttgtattttactgggtttcaccatgttagccaggctggtctcaaactcctgacctcagatgatctgcttgccttggcctccaaaagtgctggcattacaggcgtgagctaccgtgcctggccccatatgaattttggaatcagcttgtctgtttctgcaaagaagccagctgggattctgacagggattgtgtggactccgtggactgttggggttatttttgtcttctttttgctctgagctccccttcctaacctcgagctggtgggtctttgtccctctgggactttctgatggctccttctccattacggaatgaggtccaggttccttcagttccacactgttgttacctggtgtccagagctaccccatccggcctaacgctcttcccatcttcccttcccttatccatcactccccttagatgtggccacccacatccccagctcccacaactaactctgtttcagttattctgtgttatcacccccaaacttcttagacttaatgcctcagttcaggggtttggagacacagtctctgtcccatcagcagccaccccttctggcccagggtctccactagtgtctaggggaatccaggagttgtcacgtcacaggggttggctgcgctgtggcctgacggagcaatgacatttttcaatgaagggggaagacggagactgccctgaaggaaactgcagctcaggttcctaaatgggggagaaactatgtgcaaaaaattacccagcaaggtttaaacaattgtgtatttcagctttattgattttatatatcaagaagggagaaagcaagaatcaagaaggggaaaagaaggccaggcatggtggctcacacctataatcccagcactttgggagactgagtctggcggatcacttgaggccaggagttcaagaccagcctggccaacatggtgaaacccagtctatactaaaaatacaaaaacacagaaacaaaaaaatcacgcaactgggcgtggtggcgtgcacctgtagtcccagctactcgggagactgaggcacgagaatcccttgaacccaggaggcagaggttgcagtgagctgagactgcaccgctgcactccagcctgggtgttagagtgagattctgtctcaaaagaaaaaaaaatgctggggagtggggagaagaaagggaagggagagccaagagtgagtagggcaggagcttctgaggaggggttgagactgtgagaaccctcttagagaagtggtgaggtaccctgagcacctttgtcactgcagacgctgacatggcatgtgtgtcttagtccatttggcttgccataacagcacaccatgcactgggaggcttataaacaacagaagtttactgctcacagttcaggaggctgggaagtccaagatcaaggggcctgcagattcagcgtctggtgaggacccacttcctggttcataggcagcaccttcttgctgtgtcctccctcagtggaaagatcgaggcagctctcaggggcctcttttataaggccactaatcccactcacaagggctgtacctaatcacctcctagaggccccacacctaataccatcatcttgggggtgagaatttcaacaacagacattcagtacacggcatgtggccagtgagttccctcttgtcctcctgtcatgcctcttctgggcaaatattctctgctctgtgcatgaaggatgtgatgtacacattttggcatctttggtttgaggaggaggtaaaggagggaacttctctgggcaggccaaaggtgttggagcccctagtgtcctggatccatgggccgtggcctggaaggagccagtgtggcgctaactagaaccctgaggcccaggacaccagggagttgctgccagcgttacccggtgatggggccagggttagacttaggaggctctagaggcttccgtccctggtgggagcatcgctcggagcattgggctacctcaggctctctctgtgccccccactggacacctcacccattcccacgtgtttaaataccaccttgatgctgacacgcctgactttatgtttccagcatcttcccttcctggcacactcactggagtctttctcctgagtttcctgtcgaacatgtccataagtgaccctgattgtcccctccagatccagccctcaagtgaaaggccaggggcagggagactggggaacggagaccccagcttcctgaggcatgatttgcctatcgaggcagggaagcaccaggatgtttttgtccccatagtgaggagaggggagaccctgggccacctctggttttgttatctcagggcaccagccaccccagcagcccaggctggctctcggactcagccccaccacccagccatggctccccgcaaacccacccctcctctccattctcacgaccaccacctcactcaggccccagctgctgctgcctctccctggaccccacccgaggcccctgcagttcctgcgtcctgatggccccttgcaccacgctccacatggcagctggagggaggaggcttgtcacaatgcccgttgtgctatttcagctttggttatttatcttaaagacagataatgcatttgcgtggttgaaaatcaggaggtgagaagcctctgccctcttcttgggtgtccccatccccggaggtgctgttcatgagctcctggagggggccttccagaaaggttgatgcataccacacataccctccccttcccgttcgcacaaatgcagtgtgctcatgtcccactgtaaggcaaagcacacggcgccatcccgttccatggccaaggagcgtcccacagtgtgggctgtgctggaaccttccagccagcacctcatggacatctgcattgtttacggattttgctgtcatagacgttgtatacctctgcacacgctgtatgcttccaggatgcttttcttggaagtggaatcatggggcattggagcctcgggctgaccatctggatccatcccacggggtcagagagagcttcagaaacagaatcatgatgtcccgcctcccacactcacacatcccaccgggctccccaccacagagcccagcgcagtctccttggcgtggcctgtggggtgcagcctctgatgcctccacccattcccttttgctctagctggagtgcgacaccccccgaccctggggtccctgtggttccctccgccaggctctgtccctggctcttcacctgcctggcacctgctcacctgttggccccatcctaaatgctgcttttgtgggcatcttccctgcccacaaggtgtgactgtagtttccctgtgacccccttggtgccacttgtccacgtttatttgcgtttgggtgatgttcccctccgcagccacagctgcatgtcatccgggagctggggcctttttctcacagggacccagccccttctctcgcacctggcctctgttaggccatcgggaaatacctgctgagggagctggtgagacagtggccctgggcctccagcccaagaggcacacattggccgtgggtgtgcacggaatgctggccctgagcacggtcacagtgggtggtttcggaggcttcccctggacttctggcccaggctgccccccgttatcttggacatgcttcatttttcccatcctcacgtaaacccctgcaactcctccctaggaattacaaaatgacctagaccgggaaacaagcagtttgcaggagctcgaggctcagaaacaggatgctcaagaccgcctggacgagatggaccagcagaaggccaagctccgagacatgctgagcgacgtccggcagaagtgccaggatgagactcagatggtgggtcccggccacctccggggcagcgccctatgcacaggcaggggcttcccaaggactcccctgagctcgtgttacctgggaacacaacacttagacatcctactgggtcaatagagttcctccaaacaccacgtggaaaagtgtccaagcacctgtggcttgacttcctggccacccccctgtactcctagaagtcaggttgtataagtgaatggccttggtccctgcgaacttgtgccctgaacacaccccacctggctgtgccccacaacacagggagttccagggtgcctgtgtcccctcctcaggtgtctctgaggctcctcacagatcccggaggctgcaacctcagaaaactctatgacgttcagcctctggggggatggacagattgttcgtgcttggtcatgcccctcattattccaaagtgatcttccgttagccacagtgggatgagcccatctgccttttcatttgtgtctctattttgggtgtagaaagaggcctgtaaggaagccaggtgtcgggcctgggttaggtgtctgcgtccctggcttagcttgtttcggggatgggggctaagagttctttctcggagtcccatttcatcctgcactgtgaatctctttaacatcttttaacatctcatttcagatctcatcactgaaaacgcaaatccaatctcaggaatctgacttaaagtcccaggaagacgatctgaaccgagccaagtcggagctgaaccgattgcagcaggaggaaacccagctggagcagagcattcaggctgggcgagtccagctggaaaccatcatcaagtccctgaagtcaacgcaagacgaaatcaaccaggtacttcacggagtcgggtccctgccacatgccagggaccagcgagccccaagagccgaggctgccactgctgaactcctttgctctcacccttgttacttacgtgagggtctcttttgggaggctgtggtgctggcctggaggcgcagggccaaggactccccagggcatgttccagagtttgttggcattggcctggaggagttcactttcctttcctgagcacacagcatcttcaaggagtaggcggggtggggtgggaacacttaattaatggctcatttggagagaacttggggttctttccagcctggtcctcacacaaacaagagggacaaagtcagagagatgacttctttgtccttgggcaagagaacagacgtcatcctccacagccactggtgtgttcaggaggcgccaccctggagcatcacgccatgcaggacccccattctctaagctgcctgggacgcccccaccctcttcccagtccaggggggggcgctggcttctcgtggcctgcagccgttgcccttccctgctctcctgtgggcagtagatgaaggcctctgtcctggccctgggcatccagtctacacagtggttgtgacactggccctcgcctgtgtcggagtggccaggcacacttcttttaccaattgaactggtctctgtctgtgctccattagccagtttataggccacagttgatcgcaagcatggaccgctcagagatttaccaccctttcttgtgctttatggttaatatctgtaggattactttcagtgttttctcttctaacccttagagtttgtagttgggtgtcaggagcaaagatatgttgctttgcgcagtgcagtgccttacacctgtcatcccagcactttaggaggctgaggcaagaggatcacttgaggccaggagttcaagaccagactggacaacatagcgagaccccatctctacaaaaaatacagaattttttttgtattttttgcagagatgggtcttggtttgttgcccaaaaatataggtggtgacacgcacctgtagtcccagctactcaggaggctgaggcaggaggagctcctgaggtcaggagctcaaggctacagtgagctatgatcactccactacattccagtctgggtgacagagtgagaccctgtgttttaaaaaaaaaaagcgtcttttctgacatgttttcctgaccctgcttaatgctgatgatgtctttgttgcacaggcaaggagcaaactttcccagctgcatgaaagccgccaggaggcccacaggagcctggagcagtatgaccaggtgctcgatggagcccatggtgccagcctgaccgacctggccaacctgagcgaaggcgtctccctggcagagaggggcagttttggagccatggtaaaggttgaataaacgtattacagtatggggctctggtcccctggtgtgacagcagaacatcccacccgccagatctgttcatggccaacgttggttccagccaagtgcaggcggctgtctgttgtttttgctgccactttgcgcgttcacaccaggccttgcagcctggcacaggtggccatgctgaatcctggcttccagaacaaagtccaagataggcctggatcctttcagaacctgttttgaatgccctccatctctgcggaagtatttacattgggccaaccacccaagttcagagggcttctcaaacttaaccaaaattggatcagtttctgctcattgtggaaaccccacattctactaatcagggggcaggggacatctgaggggcatgtgtctatgtgtatgtgtgtttccacaaggaacaccttgaaaagcaaatgtgttgctaaagatgaggaagtaatggcaagcagcgccccagggtgttgctctttcaagtaagaattggcctctcctgaaattttggttatgtttaaaaacctctgcactttactctgacctcatgaccctggagttgtgatcaggcctggggcaggggactgtcggccccttacatttttgagagctcttgagcccctgataccaagacaggtgtgaccttttccttaggtggtcacatcccccctgttcacaccagagtctgcccctgcagcctcgaacctggggacatgtagtttcccatttcgtcttggtgctgttccgggagcggatgggccgggccgcgcatgtctggatgtttccttggtgctctgctgcctccagcagctctctccgtgctgccaccctctctcccagggctcctccctggagcccttctgctcctgggcctctgtacgtcatggattcctcttcctccctggaataagagtgagcgctcgtgctctctaaacaccacacttgcctctttatgttcaatgcttgatgtgtttcttttctcagcagccaagtcctcagtcccaaggatttatggggaagcacacgcgtcccctgggctgctgggaaggcactgctggcgagctcatctgtctcttgtgtctggcccccgctgggtgcaccgcctccctctttcctcccatactctcttttctcgtggactcgtaatgaggtggtttccatagccgcccccgggcccgtcatcatcagctttatcgtctaaatttaaacgatgagcattcatccttcatgagttacgagaagccagaactcctcgctttgctccctggctgttcttggcgtgtgtgtttccgtctcacaacccggctcctactttccccatctggcattgtcccctggcaccgcttttggcttgtcctgctcagtcttcgttcagggaacagcttcctcttaaatgtcccttttgcaggtttttagaaaccggttttcttggataaaagttggcagtgaagtggcagtttgcaagtggccagtgattcccccaactccaaagacagatttttacctttctggttatttttgttcatcttttgggcagggcaaaggttacctgagacacaattactttgggaatgtagattaagatacgttacatggaaacttgcaactggcatccgaaagaaaaactgtttttatcctgttgtacaaatacagtttttaaagcatttttctggcttgtttctatttcttaataaatacttggaagagagatttttgtttactcctgaacacttcaagactgcttcagagccgagagagaggtgtcttagttctcccttgtgggtcgaagttgggggttttaggtccctgagaatagtgtatccacagtggtacatctggaacttcctatgtttggacagttctactcaggttactaaattccatgtgaagctcacgcagtgtgactttatctcaaaagtcaggggtttttttttttttttgtttttgtttttttttttttgagacggagtctcgctctgtctcccagactggagtgcagtggcacaatctcagctcactgcaacctctgcctcccgggtccaagtgattctcctgcctcagcctcccgagtagcagagattacaggcacgtgccaccatgcccagctaatttttgtatttttagtagagacgaggtttcacagtgttgcccaggctggtcttgaactcctgacctcaggcaatctgcccgcctcgacctccccaaatgctgggattacaggcgtgagccacctcacccgccaaagtcagggttcttaaagccatatttatttcttgtctatcatctgattatgagaatattgacctcttgctcaccatccaatcaacttatggagagaagctaataaatcatcccagacttaggccttactgaggacagattaagaaaggttgattgatctgtcacatccagacccagtggcatgctggagccagtttttattgactttccagaaccgattattaaataggaactggccgggcacaatggctcacacctgtaatcccagtcctttgggaggctgaggtgggaggattgcttgaggccagctgcgtgccactgcactccagcctgggtgacacagcgagactcaatctctaaaaaaaaaaaaaaaaccccaaaaagcaaaaaacaggaacttgtgagctagttgcttggaaacttgaaatcaaccatgatgagactgtttacaccacaggaattggcagaagctctaaaccagggcttttttctgagagaactgattcccagcacacccctgctgcccagcactcctctaaagggcgggaatgtcacagaagcttcttcagccccctttcagagttgccgtgtgtatttcctaagaagggtacaacttcacactggttgctgaacttgttcaagatattacatctctgccaagggccgtgtcattcatcctggcccttgtctgctgtactcgtgtcccccaagttggcagatgggtctgttctccttagtaggtggtctgcaaggggtagagttgatggtatctttgtaacagggaaatctcgtttcccactctgattctgtgcaatggaatcaaaaccactattagttaccctgacctcctgaatcctgctggggtctcaggcttccccttggaaggggaaggagtgattgtggcttcaggccaatgactcctgagaaagtgattgcaggcctgactgtcagtgcagggggcttgcagccagcattcccagaacctcagtctcttctctgccattgttcactgttacttggcagtcttccaagtgacgactgaaaacactgaaaaaaaaaaaccttataaataaatgccaattaaaaactaaatagagccaggcatggtggcgagtgcctgtagtcccagctacttgggaggctgaagcaggaggatccttgagcccgggagttctgggctgtagtgtgctatgctgattgggtgtctacactaagttagtcatcagtatggtaccttctgggagcaggggaccaccagtcgcctaaggagaggtaaacctgccctggtcagaagcggagcaggtcaaaactcccacgctgctcagtagtgggattgcacctgtgaatagccattgccctccagcctgggcaacgtagtgagatcctacctttaaaaacaaactaaatagaagctttcattctgaggtcaagctggcattcttaactcgctgctttatccaggtcatgattcctctctttcttctggaacaaatacattcctccttccatggggcagtgtgaaaggcagattttccacgtgggcctcctggcttctttagagtaggacttctccatctttatctgcatccgagacccccatcagacgcttgctgggcgtgtgtgtcttgtggtcgtcagcacctgacgtccactcagcactgtctccagctgcagtgcttgtggacatctgtacttaacttgtctaagaacccggcttggtttccccaccttgggaaaaccctgtggtcggaggctccagctattctttcccaggtaagaaaaaccattccatgttcatcagatggcagggatgtgggtgcattctcctgaagtgggggccgaggaagcggcactcatgctgattcacactcattcacagcccagaccggtggcttgtcttaactctgtacctctcataactgtcctgcacccctaagttggctgccccagggtggtggcagccttgctaggaaactttcttttggacctttgatgtcatttccccacaccattgtccctatttttgtggacgccccggctttttaatgattttgttttggtcggttggaatactggactggtttgtgagtcctacgcaggaatgccagtgtgtctgccaaattcaatgagggtgttgtgctgtttttttaatatcacagtgaaacattcatgttttcactgagggtgtgtctttattaactaaaacagagtccttatttaaaccaactgtattgttcccatgtatatgacaaacccacccttttcagactacttcccattacaaaaatgtgctcttcaaaagtaaatattttttcttctcgtttaaatgaacctgtttgtttctagaaatacacactttaaaaaaaaaatgcaaagcattgtgtatgctctagtaattctaactgcataagtactcatttcctcataggacagaaacaaccagcatgtttcttggtatgaaaactccattttcccaaatgcccacctaggtacatactcaccgagaaaaggatgattgaggaaggtcacacctctgaaatgaggcctgtgctgctgttgttgagtggctctttacagttttcttcatggcatttccaagtttattatttttttctgactcattgattaaaaaaaaattgtttaactttcaggtaaaatagacaaacagccgggcgcggtggctcacgcctgtaatcccagcactttgggaggccgaggggggtggattacttgaggtcaggagatcaagactggcctgcccaacatggtgaaaccccatctctactaaaaatacaaaaattagctgggcatggtggtgcacgcctgtaatcccagctactcaggaggctgaggcaggagaatcacttgaacccgggaggtggaggttgcagtgagccgagatcacgccactgcactccagcctggatgacaagagtgaaactctgtctcagaaaaaaaaaaagaaagaaagaaaaatagacataaacttgaccatcttcactgtctttaagtgtacagttcagtagtgttaggtatattcacattgttgtggaacccagctctagaacgttttcatccccatgaaatacccactccccatccccccacccacagcccctggcagccactgttctacttcgtcactgtgaatgtgatgactctagggttctcatagaagtggaatcataccttgtgtgttgttttgtgactgtgatttcactcagcagcctctcctcaaggttcttccatgttggagcatgtgtcagaatttgcttccttttgaaggctgaatcagattctgttgtgtggctcgttacaattttcttgatgacatttcaaattcattatttttttctgacttagaaaaaaattttgtttttccgtttatccattcattcatcgatggacatttgagttgcttccactcaatgattttttaatgaacttttattttagaatagtttttagatttatgaaaaaattgcaaagataggccaggtgcggtagctcatgcctataatcccagtacgttgggaggctgaggtgggaggatcagttgagctcaggagttcaaaaccagccctggcaacatagtgagagacttcatttctacaaaaaatataaaaattagccaggcttggtggtgcgcgcctatagtcctggctactcgggagaccgacgtgggaggatcacttgagcccagatggtcaaggctggagtaacccatgagtgtgcaactgcactccaacctggacaacagagtgagaccctgtttcagaaaaagaaaaactgcaaagatagtgcatagttcctctatatcccacacccagttcctcctgttagtcacatcatatatagtacatttgtcacaactaatgaaccagtattaaacattattattcactcaagttcatacttcttcaatgatctttaattaatttttttttttaaagatacagggtcttgcactgttgtggctggagtgcagtggcacaatcatagctcactgtaacctccacctcctgggttcaggcaatctcctgagtcaacctcccaagtagctgggattataggtacacgccaccacaccttgatttttttttttttttttttgagatagactcactctatcgcccaggctggagcgcaatggcgtaatctcagctcactgcaacctccacctcctgggttcaagcagttctcctgcctcagcctcccaagtagctgggattacaggtgcccggcacaacacccagctaattttttgtatttttagtagagacaggttttcaccatgttggccaggctggtcttgaactcctgacctcaggtgatccacctgctttggcctcccaaagtgctgggattacaggcgtgagccaccatgcctggcctcatttttaaatttttgtttttatagagatgggattttgctatgttgcccaggccagcctcgaactcctggctaaatcattctttttagggtcatgctactcaaagtggaaatgtgagttaagtatggaattccgtactttgctttaactcagaaataataaaatccctgtcctgtttcttcacaaaattgtaggatgatcctttcaaaaataaagccttgttatttagcaacaacacgcaagagttgcatccggatcctttccagacagaagaccccttcaaatctgacccatttaaaggagctgaccccttcaaaggtatctcacttgctacccactttctcattgaaagactgtgtgttttatgtcgaatttagagtggttcttcaactagaaaagtaaggacatgccacaatctgaaatggagggggaaaggaatgccttttttttttttttttttggagacgaactctcgctctcttgctgtcagccaggctggaatgcagtggcgcaatctcggctcactgcaacctccgcctcctgggttcaagcaattctcctgcctcagcgcccatcaccgcacccggctaatttttgtatatttagtagagttggggtttcactgtgttgcccagtctggtctcgaactcttgacctcaggtaatccacccgcctcagccccacaaagtgctgggattacaggtgtgaggcaccgcacccagcaggaacgccttttaagcttcttatctcaccctgttaaccagagagccaaggcatcaagatacagtgggaagtgttccaagctcaccacaagacccacatttgaaggcagcttggccagcccccttgaacccttcagtacttcagtttcctaatccctcagcaggttaataaatttcctccttgctcacctcacagggttgataaaataatcagagctagtaatgatcatgaaagtacctggaaaaccatggattcctacataaacctaaggtctggataattttaggagtctgtccagagccacacctgagtcaagaataactaagaattccagaaacaagatttccaagtttctgtccatgtttcagagcaaaacagtatttccaggaggaaggctctctacatttttgagaaaaacactgaggtggggagagggcagcgggagcttgagcttcagcttgggtttgaagcctgccgggtctgagaggcgaatctggcagcccctgaagcccaggggtgccgccgcctcattgctgcagggccggtgataaagtgagggacagcccagggtcctgtgtcctcttacccagggagctggcaggcagatgggataaaggaaacccagcatgggaagagaggagtgaattctagcccactctgtgtcttccccaactccagtctgtgtgggacagccagcagtaccttccttctcatcttaaacatcctagccagaaacagctgcctcctccaggtccccctctttgatttgccaaggttttgagggcaggtggatagtagagaaggaactaacattctctccctacactggaggagtagaaggcaatgaaaggcttgggaggtgggtggctgtgtccaagggcccggcccgcatcctgtgccctagagctaataagcatttctctcctcttccaaccaggcgacccgttccagaatgacccctttgcagaacagcagacaacttcaacaggtaaaattcagtgtttcccggaccggtctttagactgtgtccagtcctggctcagaagtcgcatgtggtgggacttgtgtccacatacaccggggatggcagccatgtaactgggaaggacggccgtccatccatgttgtacccattctcggtcccgttcccttctggaggtggctcccctccccaggtccagtcactgcccgcaccccaccctggagtgtggtgggatcacattgcttgctaatttatttatttattttatttatttatttatttatttattttttattttttttttttttgagacggagtctcgctctgtcgcccaggctggagtgcagtggcgcgatctcggctcactgcaagctccgcctcccgggttcacgccattctcctgcctcagcctcccaagtagctgggactacaggcgcccgctaccacgcccggctaattttttgtatttttagtagagacggggtttcaccgtgttagccaggctcgtctcacactcttgacctcaggtgatctgcccaccttggtctcccaaagtgctgggatgacaggcgtgagccaccatgcccgaccgatttattttttttcaggtgaaatttatgtaacataaaagtcactgttttaaagcatccaattcagtggtattgagcacactcacagtgttgtgcaatgatcaccttcatctagttccacaacattctcatccccccaaaaggagaccccatcccaatcagcagtcactccccattccctcccgcaacccctggcacccaccaacctattttctgtctctatggatttacctgcgttgtttattattattattattattattattattattattattattattattatatccagctcctgcaggatattttatttatttatttagagatggggttttactctattgcctaggctggagtgcagtggcgcaattatagctcactgcagccttgacctcctgggctcaagcagcctttctgcctcagcctccttagtagctgatactacaggcgtgtgccaccacacctggctaattttttattttatttttctctgtgttgcccatgctggtcttgaactcctggcctcaagtgatcctcctatctcagcctcctaaagtgatgggattacaggcatgagccattgtgcctggccaggatattattatttttaaagtcaattttattgagtggcataatttacacagaacaaaattcacccattttactatgtaataagatgagtttcattaaatatgcacggttgtgtgcaatttgagaacacttctgtcattcctgaggcccctttgttgtcaccctccaccctctcctcagggtcccctggccaccattatcctgttttccgtcactagcgttcttacctttctagaatttcatgtaaacggcatcattctgtgatgtgttcttttatgtctgggttctttcacttggtataatgtttacttatggggcatttttccttctagatccatttggaggggaccctttcaaagaaagtgacccattccgtggctctgccactgacgacttcttcaagaaacagacaaagaatgacccatttacctcggatccattcacgaaaaacccttccttaccttcgaaggtgagtggggtgggacgttgcccgggagagctgcgtgcctgctctgtgtggtaagggtggcgcttcccgaaggcccccttcccttcgtggagcgtacatggtgcctgcgagtgtgggccatggtgtctgttctccgggagctggtatcccaggctgatttcattcctgctgagtgagggagctcactggcctagtcactgcagtgacatcctgtgagccccaaggtgcagttagcagtccagtggccccacatcagggcaaggaggatgtcacccatagttcttatttctctatccccattcctacccctcaactctagtcatctgcccccactgccccttcatctcccaaaaaagactaaatcacacaagcaccacatgctcgcatggacccggccaccctgcacggtccttgtaacacacagcactggtggggaccttagagtcacgtttggtaggtgctcccgtcacggcaggagtaagtgcaggcgtctcagcccggctgccttgcctggtgtctcctgagagcatcagccaactctgaccctccagtttccaactccagcatacctgtactcccatccccgggcgtggcagacaccgggtattttgcatattatgcccaagagattgggttaaataggtgtcaacttggatttcaaaaccaaaaaaaaaaaaaaaagcagcctcggtgatggagcagaggatgttcatgatggagtgagcgtgcttcatagccttcttccgttttctaggctgcaacccaggcccggggcctgctcagagacgggcactcaccctccttctcagggctcctgctaccctggcgcccacctcgctcactccctgtggaccttttggtctttagcgcttgaagctccttgaaggcaaagactcatttgcagtattttcttattggcccctttttaatgtccttaagacctgtagtgagaatttccctagcattcctggtattggtgatctgtttaccaatttcattgacctttcccataaccagcttttggcttcatttttctctactgcttgttttctatttcattgattttctcttttctatttctatttttttccatttccttactcctatttatttggggttactttgctcttctaacatcttaagatccaagcttcattcattaattttagacttcattttctagtactggcggtccctgacttacgatggttcaatttacagttttttgactttacaatagttttatcgagatgcagtcccatcataagtcaaggagtgtctggacttaacattggtttgacttctgattttttgctttgtgatgggtttattgggatattacgtacattttcaacttaaaatattttcaacttacaatgggtttatcaggatgtaaccccatggtaagtcaaggagcatctgtataaatttaaagcaacatatttcccttaagcactgctttacatgtatttcatatatttgaatactttatctcttcattgccattcagttttgagatattttccagtttcccttgtgaattctgttcacttatggattacttaaaagtatgttgtttcatttccagatacttggctttttctcctaggtatattataatactattattattgatttttaattaaatttgttatttgagaacatattctgtatgttttcaataccttcacattaatcaagggttgttgtttgtggcctatgttggtgaacaaaccatgtacacttgagaagaatgtgtatctagttgttgggtgtaatgctctacaaatggcagtgaggttgaggttcctcatagtgttcagattatctgtgtcttgtttgtttgttttttagtcctaccagtgtctgagagagaggcgttaaacattctcctatgattgtggaattgttcatactgcactttaatttgatcaagttttgctttgtgtattttgaagctttgtcaggtgcataggtgtttatgattgttgtgtctttctgacacaacaacctttttatcattataaaagattcccatttgatctctggtgatgttctttgtcttgaagtctgtttaatcacttcattctcctcatgttattcactacatgatacatcatttttcaaccatttactttcaacttacctggatctttaaaactgataggtgtcttttgtaagtagcatagtgttggggcttgcttttttttttaaaatccagtcagaagtccctgccttgtaagtgtaatgtttagtccattaacatttaatgtaattattgatatggtttaagtctactattttattatttgcttgctttttatcccatgttttgtttcctgctttcttttgaattgtttgaatgtttttttgaattctgtctattggccttttattattttaatcatacctcttttaatgattgtttagaggttgctttaggaaatatcatgtacagctttaacttttcatagtctacttgaggttagtattgtattatctcatgtaaaatatagaaaacttgcaaccatgtaggtccatttgtccacccacccttgcagccagcatgtcttatgttatagccgtcatgtgaatttcatacatctaaatacattagaaactccataagactgttacaatttttgtattaatccattgtgggtattgtaaagaaagaggaaaaaagtagtcatttagttttacccaaatatgtaccatttctgatactcttcatttgttactgaagattggttttccctccattatcattttccttcagcctaaagaactttctttagcacttcttatagctcaggtcgactgtgttgtcatttttttatttttagttttgaaacagagtctcactctgttgcccaggctgaagtgcagtggtgtgatcttggcttactgcaacctcaacctcctgggctcaagcagttctcccacctcatcctcccaagttgctgggaccacaggcatgtacctccacacccagctattgttttattttttgtagagatgggatttccatatgttggccaggctggtctcaaactcctaggctcaagcaatcctcctgcctcagcccctccaaagtgctgggatcacaggcttgagtcacttcacccagctattattcttttcttttctttttttttttccaacctccgcctcccaagttcaagcgatttctggttaatttttgtatttttaatgcagatggagtttcaccatgttggccaggctggtcttgacctcctgaactgaactcaagtgatctgcccgcctcgtcctcccaaagtgatagaattacaggcatgagccactgtgccaggcctgttgtcattcttgaaggacattgtgtttgatgtaggttgttggggttttgtttgtttgtttagtgtgtttttccactgccttccagcctccattgtccttaatgagaagagtttttgtttgtttgtttgtttgtttttttgagacagagtttgctctgttgcccaggctggagtgcagtggcgtgatctcagctcactgcaagctccgcctcccgggttcacgccattctcctgcctcagcctctcgagtagttgggactacaggcgcccgccactatgcccagctaatttcttgtatttttagtagagacggggtttgaccatgttagccaggatggtctcgatcttctgacctcgtgatctgcctgccttggcctcccaaagtgctgggattacaggcgtgagccaccgtgcccggtggagaggagtatttcttcaggtcattgttatcctgtatgtaataggtggtttttctctggctactttcaagattctctctttatctttggttttcagtagtttttgaagtttctgggtgtagttttcttggtgtttatactgtttaggctttgctcagcttcttgaatctgtaaattatgcttttcaacaaatttgataagttttcattgccggttcagtggctcattcctataatcccaggactttgggaggctgaggtgggcggatcacttgaggccaggagttcgagaccagcctggccaacatggtgaaaccccgtctctactaatacaaaaattagccaggcgtggtggtgcacacttgtaatcccagctacttgggaggctgaggcaggagaatcgcttgaacctgggagtcagaggttgcagtgagctgagattgcaccactgcgctccagcctgggtgacagagtgagactcccatctcaaaacaacaaaacaaatttggtaagctttcagctgtcagttctcctaatttgttttttctgcccaattttctctcccctctctttctgggattccagttacatggatatgagaccctttgttattgtcccacaggttcctgaggctctatttatttatttatttttcattcttttttctcctttttcttcagattgagtaatttctactgctctgttttcaacttcacttactctttcttttattcttggttatttagctaacctaatgaagtggggtttttttttgtttgtttgagacagagtctcgctctttcgcccaggctggagtgcagtggcatgatctcagctcactgcaacctccacctcctgggttcaagccattcttctgccttagcctcctgagtagctgggattacaggcatgcaccaccaagcctggcttatttatttttcaaacggagtttcactcttgttgcccaggctgcagtgcaatggcataatctcggctcactgcaacctctgcctcctgggttcaagtgattcttctgcctcggcctcccaagtagctgggattacaggcatccaccaccacgcccatctaattttttgtatttttagtagaaatgggttttaccatattgaccaggctggtctcaaactcctgacctcaggtgatccacttgccttggcccccacagtgctgggattacaggcatgagctactgtgccttgcccgcctggccaatttttgtatttttagtagagacagggttttgccatgttgtccaggctggtcttgaactcctgatcttgggtgatccactgaccccggtgatgaagtttttattgtagatacactttttcagttccggaactttcatttgtttctttcgtatattttctatttctcttctaaggtcacctgtgttttcactcattttaagtgtattttccttttcctcattcagcacagttataatcaccgttttacgttgtccctgtctcagagttccaccatctgggttattttgagattggctacactgattgtcttttccggtgagaggtggtcacatttttccagttctttatatgtttagaaatgtatctgatacatggtgagcgttctgtgtagagactgtagtctgttttctccaaagagcaggaatggatttgtttcagcaggcagttaacttggtgccactcacactgcagacactcaccagcagatggcagaagctccaatcccagctcagttcttgtggcctcagctacaggctgcctcgagtccccccaggcttgcgtgtgcagaggccagcctgagacttgggggagagtggatcatgaagttcagggcttgcatctttgcatctctgcccctccatcccgattccccttcctttcccctgggagtggttgtctctgggctccatcctctggtggtcagattctaccagaatcttaggcaccctcactgtgccttcctgctgtagctggcggaatggaaactcaacctcctgctatgttcttctgccacattcaaattctcctccaaagtcttcttcctgtcttgttcacttcccagccttcaggccactgctttttgtatttgtaattttggggatattccgtccaggttgataggtgctatctgcaggagggttgatctgttgggattttactctgcctgggttgagttttaatcattccactttccctctggctcagcactggatgttgtacatcgacgtcaggaaggtctggttgaatgaatgggtgatggaaccaacgaactgctttttactctttcctctctcctttcatttagctcgacccctttgaatccagtgatcccttttcatcctccagtgtctcctcaaaaggatcaggtgagacccatgacttatttttcttcctgactattccttgggcagtagcagagctcccccgcagttaacactttcactcccaaagccagcgtggcctctgtgtttgtgtcatcagtcagtggcacccagatcctggcctgagcccattaggccaaaacaagcacccgctgctgctccccttcctgggcacgcgctggcatctttccagaaaggaattttggcagtaggaattcagtaatagcaccagtgatattaactactgtttactcactcctccttataaatctttggtttgtatctttgggttttttccctaaaagaaatccagaatttgaccccaggtactggcctatgttgtgggttctgtgtttgaaggaacctcatctcacagtgtagaactcgcagatgcacgctcgagcctttatgcaatgggagcatctgtggacaccccctttcttttgggaacaggccccgcttggtcctgcagcttgcgtggggcgggtagcagtgtttggtatcataggcgagtgtatccagtactctaggcaaatcccttccaggttagaggagaaaacacagcaaaaacctctatccaaagacaccaccctgtataaatcatgtgggtggcaggtcgccctggagttgctcctcgcctcctgacccattgagacccagtgggacccaggggccacgcctctgtggcaacttgtcactcttctgatgaccgtgaatgatgctggccctcccagagtggtcgtcacagtgagaaaccgtcttgccatgccagagtgggcaggggggccttgctgagaggccttcatgcagacacacgtgtctaatgaataaatgcagccttcctgagtctcctggttcaggggccatctagcatttcccctccaccccagaaggcatgttctcttaaagacctgtaactctgactttgttggtgccgattgcagatccctttggaaccttagatcccttcggaagtgggtccttcaatagtgctgaaggctttgccgacttcagccagatgtccaaggtaaagcccctccacggagcccccgcgcctctgctagtgtctttgtgcctcttgtcatggtgtgggctgccaggcgtaattgttcatgtcacgtatgtatctccccggcacctttccaacacaaggtcaggtctggaaagcatccatggctgtgatccaatgcactgcagtcccgtggggtgagccctgacccttcccagtggcataggtgccctgggctcccctggctcccactggtgtctgacgaccatcaggtctcagacggtgaagtcattgccatggccgagtagaaacttgagaaggcgttgggcacaggcgtctcgagagggccatgggcagcaggcctgcaggtgcgaggcgtccagggaaagtgggccagcgagtgttcagagtcgcccatgtgacagaactctcaaggggtgttgaaaagtgagggccggcctccttgaataaatgcagacagatccacaggtgaggagtgaactgttgaaggaggacagcagcgaggctggttaccagactggacccgttggtgtccggccctcaccacacggtgacctgaactcactgtggctctggtcccagacagctgtagggcttctccagacgctggcagtgtggttggagctcatctttaaggtagcatagagaattcaacagggaacatccagaatggacaagtcaaaaaacaacaatagaagccccttacgactgaggtgccttccggaagaaactgctggaaagttggaaatgggggctgtggtgagtgggaaggacagggctgcggcaccattgtgcttccttgtgagttgtatgtttccctgtttgagtgaggagcatttttctttggcaggaatgaaggaaagcagatgaggtgtgtcccgtccctgacacctgcgtccactctgtcccttctcggcagcccccaggcaggggcagatgggctctgtcttcggggggctgcaggggcctgctttcctcacgagttccacctgcagaggcccaggcattatccacgctgcgggaagaggcagtagccacaagcagaacacagcccccctcctggagcccatggcccaggtggtaaggggtggccggtgtggggggtcccctggagcagctgggcccagtccctgtgagcgctgctgtcagcctgaaggtggtgaggggagggagccccgggagtacctggaagacgcgtgccccaggcatgaggccccctcggggccccaccggccccatgcccaggtgccccaggtgccagtgtgactgggcagtctcccttggctgccccgtgttcactcagctggtggagcagatgagtctctgagcatcttggggttggcagcggtcgcaacttgtgatcacagaacacagattccgagaagcacttgagattctgttcaggttttcaaagacgcgtgtgtgcgtgccctggcggcgcagcagatcccacttctgaccgaggcagggtgtgtgtttacacagatgagcctgggcagagggagcccagaggccctggcatggcgcccccctccttccagcacacggagaaggcctccatccctcatatgccacgctgtgacacggtttgggactggcagaagatttagggcccagtgcacaggctcctgggcaggcgggaaaccatctcccgaaagcagaaaacgttggccacacggtggcagcagtccctcaggcgtcctggtcgtttctggttgtcgcaagtggactcctcttcctttgggaggctggatctgtcttcctcctctcactgtgagcagagggagggagagctagcagagcctgagctagggccgggatctaatgaccgccctctgcctgtccttgggccctgaaaccaggggctcttcacacacatgcagctgtgatttcagagccggtctcacttcctattggcggtgccgggccaggacagagttggacagagctgtggaaaatgggtctccaatactatcttgttttgattccagcgttccatcagctgccttcatgacacttgtacagccgcattctgagctcaaccctgaccttgcagctctgtttttcctttttggttacctatctgtttttcaagaacaacattgtggatataaataaaatgctaagggaaatgaaagtggcaagaaggtgtttttttaaaaaacaaaaaaaaaccatcatcaacttttccccatctgagcagagcagggaggcccttttgtaagtccctgaattgaagcaccttacctctgcgtggctttgctgaggagagtcacagcccacagcctgattctagaagtttcctttgggaggctcttcgggcctgcactcttagttgaggccccaccctcacctgaagagatttttctagacagtatcaagcctatgtgacataagctcactttaaaaacagattccccaaagtatgtttccagggagcatttgagaataaaaacaagagtccaacttatttcaccctcttctgccctgaaaaaaaaaaaaagccatctgtgaaatactgggttagtcgtcagcccatttttagcaacttctcaattgtttaaagctgtgcattgatatttagggctgctgtttacaaattcagtcttctgttttgaaccagttcttcaactggtgaactcaaacgtgtttctcttagagctggttttcatagtagctttttctgtcttccttttattttaagcacacttcactcttgccgagcccagagagcccctgacagctttactgaaacctttctaaaaatagagattttccttgaagccgctgcccgagtaggaaagagttgagtccccaaggaggcttcttgggaaacttgaagtcatgaaaattgggattcggaaatgacgcgggcattctggagctaggagtgatctgattcactgcggaggcagtgccaggcgtttattgaaagcctgtcgcctcgcgagttgccaattggcctcgtgggtttaaacacacatgggaggcgccaagccggcttggcccgaggtgtccccggtcagcctggagggttaggcggctctgatttgagtgtgtcaccaggtcttacaactttggacgtccaggctgagtgtggttttattgcccgggtcctattgcgcgacacagagggtagaaaggctcactgcagccactggaaccgaggccccactccgagtctggagatgtggcccagaagccagcacatgcccagggaggacaaggcccagccggtcacaccacttcccatctagacctgcttggctccccatcccaggccgcgggggactcgcacgggccctaggcccagggacatgttccatgaatcgcagaagcacccacagacgggccagtgtttttcccccattctttcccaaacagccgaccctaaacggcccattttaaagctaagctgcaggccgacactgcccctcatgtctcggacaggcctggggacaactggggcagcagatgggggcactcccagattccaatcgcagcttcgtacttggtgtgatcattgtcgtgtggtccatgtgccaactttatctagtgccagtgagtggactgatgcctgtcacatggcacctcatttccttcttgccggagccttccgagctctgtcactcttgccattttacagatgaagaaaccaaggcacagggtgttgagtaggtggcagggttggggttccagcctgggcaggacagtctgcccaggacgaggccctggacccaccactggggtggccctcggcagctgagggcagcgtctggtggccccagcctgggaggcagacgatgtggcagccctggatccgccgtggacctgctgtgtgatgtgggcaggctgcgcctcctttgtgtgcctcagtttccttgtgtgtaaggcagaggtgctgacagtgggaccccctgccaggtcactgggcctattattaggtgagaagatcagcacagagcgagtgtctcctgcctgggcagcttcagagggcggcgtgaagcccagggaagggatctggtggggtcatctgtgcaggagcctttggggccccttcccctccctgggggcacctgccactgcccttatcggggggacctggaatgggtaggctgcctcttagaggggccacctccctgttctgtctctgatgtggctctgactgggccgagcaacctcgactctaggactacacaaggtccgaggcagccatatctctgtgacgggacgcaaatagcccagatcgatgcatctctgtaactagatgctagaggcctagatgactgcatctctataactagctgccagagacacaggtggccacgtctctgactagactccagaggcctaaacggccatgtctgtgcaactaaattgtagagacctagagagtcgcatctgtgtgactagatgccagagcctcagacgaccgcatcggtgtgactggaagctagagcctcaaatagctgtgtcagtgtgactggatgtgtcagtgtgactgtgtcagtgtgactagagccttagatggctgcgtctgtgtgactagaccctggagccttagatggccacgtcggtgtgactggacgctagagccttagatggctgcgtgtgtgtgagtagaccctggaaccttagagggccatgtctgtgtgactagacactagagccttagacggctgcattggtatgagtaaacgctagaagcctagacggctgcatctgcatgactggacactaaaatcttagacggctgtgtctgtgtgactagacgctagagccttaaatgaccacgtctgtgtgattagacgccagagccttaggtggccgtgtctgtgtggctagatgctggagccttagatggctgcattgctgtaactagacactggagccttagatggccgctttggtgtgactagatgctggagccttacacggccacgtctgtgtgactagatgctggagccttagatggctgcgtctgtgcgactagatgccggagccttagacggccgcatctgtgtaaccagatgccagagcctttggcagccgcatctgtgtgactagacactggagctttagctggctgcatcagtgtgactagatgctggagctttagacagctgcattggtgtgactggaagctagagcctcagacagccgcgtctatgtgactagacactggagtcttagatggccgtgtctgtgtgactaggtgctggagccttagatggctgcattggtgtggctagtctacagtcttagacagccacttttgtgtgactagatgctggagcctcagatggccacatctgtgtgactagatactggagccttagacctctgcactggtgtgactggacactgtagccttagacggccacgtctgtgtgactagacgctggagccttagatggttgcattggtgtgactaaacgctggagccttagatggccttgtctgtgtgactagacactgaaggcctagatggccgtgtcagtgtgactagacgctggagccttagtcagctgcatcggtgtgactagatgctggaggcagaggcagccatacctctaagactgtctgctggacgtggtggtagaccttttcccccacatctgcaatctgttgcattcagattctcgagggaaaccctgggagtgtgcctttgtactcttgacctgttctctgtctctaggccttccctgctggggagaaagttaaagacccccggcccctccctccacctctgccccactctgatctttctcttctatgctcttggaggaacacatgatcttttttaattttttttattttttgagatggagtctcgctctgttgcccaggagtgctgctgtggcgggatctcagctcactgcaagctccgcctcccaggttcacgccattctcctgcctcagcctcccgagtagttgggactacaggcgcccgccaccacgaccggctaattttttgtatttttagtagagatggggtttttcaccgtattagctgggctggtcttgatctcctaacctcgtgatctgcccgcctcggcctcccaaagtgctgggattacaggcgtgagccagtgcgcccggccaggaacacatgatcatttttacccctatttctgcccattccttttgtttcctgtcgcagtgttatctctttgtcctataatttcctagttattttgcatttttgtaacaatgtgtttcctctgttagtaaaaatgtagttattttctattttattacagacttaattattttctgttttagtaagagtggttactcatccttcttctgcccatagaaagtgattttctccctcctgggacaccccagccccttccctcagacgcctgagatatgctggcccttctgtggctgatggagaccctggctcccctgtgcctcaccggcgctccaagtgagggacaagcatccccccaggtggcggcgcttagtatctgctcatcacaggcctggaggcagcaggtgccggggagaggactgtgcttgccctccaggtgggagaggcctggaagcgtgtctctgtggctcagtgagcagtgcaggcgtgggtggcaggaagcagccccagggagagccctgggagagctctgggggacggcagtggggtccagccaggctctgagcaaggagaggggttcctggtggacgaggtgggccgagttccccagcaggagacctgagtgttgcaggacttggaaacaggaggctgagtcagcggctggggggtcagtgggttctggggactaaggaggcattgtgaggggaggggtgacttcagaggtgagcctgaaaaatcaggcagctggggcagcgatgaagtccctgcatgccttaatgagagcttggagcttccctataggaagtgcctacctacctacctacctgcaagacgtcgccacatatctgcctccctgtctaccacccacccgcctccctgtctctacctgcccatccatccatccatccacccacccgccattcattcgtccattaatccacatatatgtctatccattcatccaactaccattccatccatctgcccacccaccatccattcatctatccaattgttataactatctctgactgtctctctctttaagctggaggatatggtccgatttgggtttgagacagcaggtgtggggtggaggatgtggatgggtgtgatggaggctgaccgagggtccgggccagaggtggtcagagcccagtggaggtggcgtgggcatgctgaccagtgcgggtggccgggcatgtgaggatgcacttccacctgaggtgctgcatgtgcagcccagaggcatggaggaagaaagtctggtgccagctgacccagcacctggagctgtccatcactaactgaaggcagtgaccacaccggccagctcagtggggaggcggcacaccagggcatgtgccaagcaccacagccagcatacaggtgagggtggggcgtgtctctgaagtgtaagcaggaggcccaagggaccctatgtgccaagtcctggagtcaggaaagacccagtgtgcctcgtgtgactggggatgcccttggtgctagaagcccgtggaggtatgggactgctctctgccaccctatgttgggcagctcatcacccacaggccagagggcccctgctgttgagggtggaggaaagcatggggcttgaaagagaccccacgtccaagcagggccatgttgtgcagtccagagggtaggaggccttgccagggcccttggagcatgagcgtctgttcagtggacatccgtcacctttgttttaacaactatttttgcctctctttcatgtcctctcttacagcccccaccttctggccctttcacctcctccttgggaggggcaggattctcagatgacccctttaaaagtaaacaggacactcctgctctgcctccgaagaaacctgctcctccacggcctaaaccgcccagcggtcagtaagctttcttctctcgcagccaccgcctaccggtgccggatggcgggggaccagggcctccctgctcaccagcccagagtagcagcagatgccgtgggaccctgtgtggggagcaagagggtccccccggcccagctgcccaggtccacgcaagtgccgtatgtgcgtggtgtgtgcctcctgcctgcccgccctcgccccgtcctgtgggcccctgggcttctggctctgtattggagtgcacaaagccttggccttagagctccccttgtggctgggggcgcttcgtgcggcctccgcctgagcatgtcagtgccaccccgacgccctggctatacttcaggagccactcatggccggcagccctgtggccactctggccccttctcttccgtccttctccctgtccgtgctcagggagggcctgttgggggtgagggtggcaggagtcgctgcttggtccagtcccttcccagctgcttcaggactgagagtggagggagcgggagattgtccttggtggcatctgatgtgaggaggcaggatggctcggggctcccctctgccccagcttgcccaggcatctcaacgcacagctctgaggaggggacttcctacaggccctgcccctcttccccatggccagtgctgccaatgtctcctagccttggccctcgagggtcccctgaggattctgaagccctttaactcacacgtgggatttctctcgtatgacagagttaggccggcggccagttggccagactctcaaacagaaagctattgcttcaagtggcagaaggagtcactgcagctccctgatccatttatctacccggtcattgcctgttccatctgtgccccggtctgggacgcctcctattctctaacctccaggcagactgttccccacactgtccctgaattgtgggcagccacaggagacccacgcactcccaggatcatgccttctgttacctgtcttccctagatagggcatgcccccgagccctttccatcagctccagcgagggaagtggtgctcaccctcctgcctacacgtgcccctcccctggaatctgccactggcctcactttgcagcccctgtgtcatcgcaggtcctggaatggacctagcaggctccgcatgcccccagctcactagttacgagtgaccctcggtcctgcacctcggccacctgtcagtagaggtgaacataggggaagttatttttagaacaccgcctctctcctcctgtcccctgggctggccatggccttctctcaggaggatggggacccagcccgcagtgcccaggttggctttcttgtggatgagtcaggagaaaaagtatgaccaagtatgggctgtgtggatttagagcagattttctgtgaactgttgagcagatacagatgcgtaaagagatcatttctgtaagccacacatcaaagacatttaccatcaggaggaaaaacaaaacaacaaagggactcccttccatctgcaagaggccacctgtgccttacacagaggcagtggctcttcagggatccttgttggcttcctgatggaacggcagtgggcctcttcactctgcctaaaagatgggagcagaagcacacacacacacacacacacacacacatatatgcataatcacaatgcatgcacacagctggcacacatgcatgtgcacattcccacgtgcggccatgtatttttatgcatgtatgtgcacgtacacgtgtatgctcttgcatgcacatgtgtaccctgtgtacacacatcctccacgcctgcagacacatgcatgcatgcacctgtttgcacatgaacacacatgcatacaggtgagcatgcattcacatacatactgcatcacatgagtattctcgcatgtgcctgcatgtacgcatatgcaggcacacacgcactctcccatgcacccctccgtgcacactctccatgcttatatgcatctgtggacatgtgtgcatattctcttgtcagtacacacatgcatgcatagagatgagcagcatgcactcacatactgcattgtgcatgcctgcacacacacatgctctcatagataacagctgggcatgcacaccctccatgcttatatatgtgcatgcattcattgagacatgcacatattcacatgtgaacatatacatgaatacaggtgagcattacacagatattgcataatgcatgcatgcaaacgtgcacacacatatgcgtgcgtgtgtgctcatacacacccgggcatgcacactctgtgcttacatacgtgtacacacatttacacacatgtgcacgtattctcatatgggtgcacacacttgccgagcagtgccgtatttgctgggccctgaggaggagccatcccactcaacagctcacaggtgcaaagcttcattttcagtgtttcatggaaaccgccacccccgcctccccacgtacctaaacccggcgctgggtctgcttttgaactttccctcagttatcacctcccatcgtgtctccctctgcaagcctacccaccccaccttggcttctgctgttagtgtactgtgggcttcgaaagcagaaaagaatgcttgttaaaagtagaacgtttgataacgggagtttgggtgacttccttgggcctggcttcagggttcaggctttttagggagctgttgcacaatttgagacccagggggtcctgggctcctttactcgtggcacaggccactgcatctttgttctgctgtggttgatggttgctgtgccactcggtgctctgcagaaatatattaacattgatgggcccttaggaagtgcttgaacagttcttatctcactaggtcccagcaagacccgtgagggagacaggccaggccatgcccatttcctggaagaggaaaggcggggagggaggtcatgggggctccccaaggtcacacagcaaggtggcagcagggccaggtctacacccagtgacctgcctcctgccccaagacaggagtaacgagaaccaagccatgagcttcagaacattctctaaaacagccaatgcacgcgcagcattttaagtccggagcaactgcagatctgtgtggaggcctaaatatttctcatttgattcttttacccagaagcaatggctgaacagaaaaattctgcattgtactcgctgctgggtggtaggtacagaccgtgtggtggttgccgtttgagcttgcagcattatttgtgctgtgattccgtactaacctctaacagtccaaacactgagttgacccagtggttgacctttggtgagtcacatgttggggagaagtgtttggctctttggggaattgcaaaggaagatgcttgccctacccttgctctctggtcaagggaatcagagccgggctctgtacaattcccttcccggttcctggccacacggcacagacccacgtgcagcccaggaggcctctggttatgggcaagagcggtcagcagatgagtgtcgggtgaagtcgtgctcagaaagttcgccaggaagacacaaggcagatctcttgttttcttggcttctttaagacagaagatagtgaagctaatctgtgaatttttttttttttttttaagcataaagtccaacgttttcaaactgctggactttatgttttcttaaaacaaacaaacaaaccaaaaaaagcctttctgcctttcttgctaccccaggctttttctgctcagggagaccacacggccagcacacagtgacggccgccttcccctggccaccccagggcttcccagatgctggggctttgcgcgagatgcgtgggtcccagcgtggctgagtgaggaggaaggtgaaatgcgaccccctgtgagcctggcggtcgagccttgagctggtggagatagacagactgacaaaaagtctgaaggacccataggctgtccagtgggcagtcttaaacatgcacacagcgttgacacctgcactcatggaaatcacaatgaaggaacaagcttttctgtcatctctccgcctggcacatggaacatgtctgatgtcccatgctcccatccagggtttgtccatcccagggcacccagaggtttctagaaccctgctaggcctctgtgccaggaaatggctgatgtgtgaggccaggacaggagaactgaggccgcttccttctgtcctctgggcagccaattctgctagaatccaggggactgcttgatcaggctggtttctggacattggaggaaagggaggccccgggtgggtcacttaacctccctgagcctcagttttcctgcctgaccatgggacccactcaggcctagcaggtgggtgtgtgggtgaagcgccttgcacggtgacgtgctgtatgtggtctgtagcccccatccccaccctgcggcacagggaccgggacgcaggcttctgccatatgggcaccttttccaggaaagacaggctgggcagctgaggtggctgcacacattctgggagtcattaattgggcccttttctccctgtgaggtcacagtttagtggaaatcttttccgttaaaaaaagcgtgcagggagttgaacttcaaagagggctccagcgtcctctgtgggtcatcgctcatacaggaccaaatgtgagtttgggtctgagtcacgtgtggctttggtgccatctcttgtgttctagaggctgcagttttcaaattccgtgggagctgcttgtcttattttgtttaaaggtcaattgaggtgaaattgacatttggtgtggctggcatgcagtgtgggtgcacgggcagacaggtgttgacctggacagtcacaggtggacccctccacctgggaacctgcagaggttcctcgagggagagttccggtcacagcgtacagctgagtagcccacagttggccatctgccctcaaggccacatactcagttctgtctccatctaagccagaaagtgcactctggggaccaccaagggccatctcctggggcatgcatggagctttggtgtgggcactaagttcttcttgcctggaggtcttttcaagaaaggtgtatcaaggtattaaataaccagcaggtgtctgttttgggcagaagaaactggtttctttcaggcagatgcagcacagacccggcaggctgccgaaacctgtcagttagagttaggttaaagttagccgtggcacacacctcccccaggtaaacaatggtatattttctgcaacggaccggagatcaagatcagtcagagctcaccgctgaagagtttctaggtaaaagttgttgatttgcaaagagagaaacagattttttttttaagtgcaggaaacggctgtgtgggtgtcagtgattgggcctcagccctgctgcgatagtgggatcctgcgaccggccccacccttgccacttcctgccagcgcggccctgcgttgcggttcctgcctgcagcgcccggtgacaccagccagcgcagttctaccgctaaccagccagtcacctttaacctctccccaatttaatgattattttattactgctaatgaccttttcacctcctaaacaaagccgcataggtgatggtgatgagcatgtcttttcgccccctccccacagttgcactaacgaacagcttttacctaagtttaaccagcggctgtcctgtttgatttgagcagctctctcaacaaaagaagaagacaaaagtcattcttccccttgcaaacaagcccctcccgtacctgtgtgtggcatccacccagggtggccgtgagttcttgacctccctgccgggggtgccacacaggatgcagccaccgaggaagccctgaggtcctaagtgctgccagctctcccacttctctgaaatgccaggccaacatcgaaaccagggctcagtgacctctccccatcatgtgcccatgtgggtcccaaaaccttttgttgattgcacaagatccactttaaaaatggcatctccatttgaaccctgcggttagcacctcagccttgaacttaactacttcaatttcgttcccacgatgatctcagagagataatccggtgggtacatgtgaaattctacaatgggacaagtggttccaccatctcaaggggcctggaaaattctggcacttgcctgccagccaggatggggagggggtcccaaggagcctaaaacggccaaccaggtggagtccctctttcctgcccacgccccccatcccccagcactgctgtgttcaaggaagcttcagagcttccgtctgagccctctggaaggtctgtcttagggctgggtgggacctgctgacggtgccaaggaacggtcccactctgagagggaggaatgtcagccttgtatgtttaaactgactgcaggcagattgccgtttggagcactttctgttctgtaaagaccactgagtttgaaaatagaagcatttgccttcctgggcacactgtacccagaggcggatccagggagtgtcgtgtgactcgattatcatctggtgttcagtggggtgcaaatgctgaggcctggggggctgcagggtggggtgcaggcctagagtggctgggctcccaccccagcatctgagtataggtgtgaacagacgggagccatcgccctggggacatcgggtgtacctgcctccaggacacctcaaccccttgcttggcacctgagggaggtgagggctggggcagacgcctcagaagggggctctgggtgcagctctgggcaccgcctccctgcttttctggcggggtgaacatggcccctcatctttcatctctcctattcaaagccctgagtcagcgcgccccttgcctgccactgctaactgcaaaatatcacatgcactcgggcaatggggaatctggccataaagagagcaaaagtgtcccccaccatgggagctcctggtgggctctgcgcctcacttgctcccctcccaggggctcttttgggtcctttcatgcacgacccctaaccagctttcagactcgctgcacggcgttctcagggatcttgttacatgtgggcaaggcgccttcctaccctttgcagaggtggcgtctgcgacattggcacactccgtagggaggaacaaagctgggcccccttgccctgtcagggctccccgtgcctggctcatgcatagatagcatctctccctggaaatccccccagaggatggggctgacacccaggggtgttcacgcagggtatgtcaaaggtgcccgccagagaacaaatgcgaattttcaaagaagccagaattgtgacacctgccagtctgtattatttttgtcatgaagactggcttgtgatttgtaaattcatttccaaatcacataccccaccctacacacacacacacacacacacacacacacacttttttttcttccagggctggtgcagcccttgcctggcaggttttatgtaaatgtcatgggagccttttgtggtgacctctagaaaattgttatttctcacttcaaatgatatttgccttttgaggaccccaaggcacagcaccttttccccactttcttcttttaatggcaagatgaggccacagccattgggttcaacagccccctgcccacctcacacacctcacagggcaggaaaacacagcggccagcagtggctcgtagtaaatatttgttcagcttttctcaacagttcagaaccaaacctcatcctgttcccttcaatgcatgaagcagattttctcaaaattcggtaaatatttttagtggaaaatctcaacgctgcgatcgcagggacctcagattcttatctcccggggctgtgctgcttgacacagctttgatctaaggcagagtgcgcgcggggctggtgcctgcaggactcccagcctgcaggtcccttacgtggtcccgtgtgtcacattgtaaaaaacaaactcccctcatgtgtcttagatgggagccagaggaagacgttgacgtgtgttggggaaaagcactctttcaagacaagtccccgagcagtgatgaattttagaacctatactgttttctttctcccctctccccgcagctaagctttttttctggcaggatggggagggtggaataagacatgtcagtggccttggatgagctctgctggagtggtgccccgcccgggccactgctctcctaggcagcgtgactctcagaaacctggcagttgtatgggcatctgtgttgtgtaggatgaatgacagttgtggttgtgtgggatcacctgttgtgtagggtgaatgacagttgcataggtgtctgtgttgtgtagggtgaatgatggttttgtgggatcacctgttgtgtagggtgaatgacagttaggtgggtgtctgtgttatgtagggtgaatgatggttttgtgagatcgcctgttgtgtagggtgaatgacaggtgggtgcctgtgttgtgtagggtgaatgatggttgtgtgggcaccacctgttgtgtggaatgaataacagttgtgtgggtgtgcatgttgtgcaggatgaacgagagatgtgtgggatcacctgttgtgtagggtgaatgacagttgtgtgggtgtctgtgttctgcaggatgaatgacaattgtgtgggcatcctctgttgtgtaggatgaatgggagttgtgtgagtgtccatattgtgcaggatgaatgacagttgtgtagccatctcctgttgtgtaggatcaatgatgcttgtgcatgtgtgtcccctgttgtgtaggatcaatgatggttgtatgtgtgcgtccactgttgtgtaggatcagtgatgcttgtgtgtgtgtgtcccattgtgtaggatcaatgatggttgtgtatgtgtgtccacagttgtgtaggatgagtgagagttgtgtgatcgttctgtgttgtataggataatagcgaaggtgggcagcttccctgaccacaaacccttgttttgtatttttttgttttctttttgtttttgtatgtatctctcatctgcagaactgcattttccaagtacagcactgaactgaactgtataaacagaacctagccaggatcaaacacacacacacacacacacactctctctctctctcactctcatgtttattactaatatttttattaatcggattgattgagaccatacctcacctgaaccttttatgctcctcctaagcaaaaaatttaaaccaagagagtttcctttccaaggtttttatagcattcaccgtttttatggtttgcaattgtatatttctattcaattttttgtttgtttgttgttttttgggtttttttttttttttttttgctttgcacccagctcttgaggatgcttttaagcggagggcttcctgcaaagcaagatagaaaagtcagaaccttgaaaaactttgctgaccaagaacgctagtgcagcagagccagccccatcacagccccgatcccgggtgctaggggcgtgcgcagcctcgagaagaagcttgagaaataggagaattaaagaaatttctatcagggtggagccggccaccaagtttttttttttttttttttttttttttttaacagcacatactgtggtaaaccatttggttcatattgtttttgctaaagtcagtcctgtgtgtggtttcggtacaccgcttgggtaactgttgaaactgctgtggtttgaaaataagttctattttgtgttttcttcagtcttgtatcccttgccccctgttaatgaagtctccctgcggtaggcagtcagcacacccaagagggtctttaatttcatttgtctttattcactgccgtctgctgtggtccccggtagttcccgctgcaaatatctaggattgatggcatcgaaccaggtgccaggatgatgcctggcacctggtttgatgccatcattcccagatgtttctatacccacttttttgggttttgttttcatgatttccatccccttttctgaaatgcgcgtcagtaaagctctctccttactcatgttttctggagccataaaaaagtataaaaccctggcgtgggtgcgcgtggcagcttttgcttcagggcctggaggcagattaaagttactttgtcacgtttgagataagctatacctcacaaaatcggaaaaaacgattaaggagttagcagaagtggttacataaaagcaggaactagacctagaaggtttgaaaaatacagccgctaaaaataaatcgctgagcaaaagtgggaagtttgggctgagggccgtggccctacagtgatgccgggggctttctttgctcaaagcgtctggtcattagcaaggtcgagagctggaccgggcactcggctgacctcacacgtgtcaggtccaaaatctcctctcttaccaaagcacaaacactaacaactgagaaaaaaaccgttgttgttgttgatgttccttctgaaaacaagaggccagcagttgatgtgccctggtttcatattaccatagtcatgatttctaaataacaacggtttcggcaacagagcaaaaccaggcacaggcagttcttggtgtgaacgaagcttttcatctctctgaacatctctttgcgcatcagaaacctcagcttgaaatggtagcaggcagaattcttaaccgctcctcccaaaaaccaatttcttttttttaaaccccccaaaccaagggaggaagatcttcattgaaaagaagaagaaaagcagctcaaaaatgactgatttatttgaaccttctgtaccgtggcagtcgctcttgggggcctggctggggcgtcctccctttacacctccctccacattcttgcaaatctgcctcaggtgatcactccctgcaggaacggcttcgagaaatcaagcagtgtccaccctggacttgctgcccgtcccagggggctacaccgtgtcctgggactttgagcttctcccctggaaacacttaactgtttcctctgctagaatcttgctatttgatccatatcacataggtattcgaggaaaaatcaaatacccaagcatgcacagtaacattgctgtttcctgcaaaccaggaagggcagatgcctttattcccttctcgctccccagggtgttgctccaaagggccccaggtccctggagacccgtggaatctgtaacaggtggcacctggttcaccaggacctcctgaagcccactgtgtgccgagccctgggctggagggcaccagggacatggggcagtattggctggcatttgtggtatgctgggcccgcttttcacagagctgaccctcagccgtgccagaggccagtgccacgggaagcagagtggtgagggaccctgggggagggggggctttcccgtggagggagaagctgggcagaagcaggcaggggctcgagggactggctgaggtcactgtccctatcccctgcaaacccacaggctggggtgcaggacactgtcacactgtcccccagggtgcccctgccggtggctttggtggctccctgctcacacttgctctatctcagcctaaacagcagacatggattgtcccgcagttctagaggctcaaagtccaagatcaaggcgccagtggggttggtttcttctgagacctctccttggcctggtgcatcttcacattgctgttctgtgtgtagatctgtgtcctaagttctttcagtgaagacagtcattgatcctttgacttcgttttaactcagttacccctttaaatatgctatcttcaagtatggttatattctaaggcacaggggttaggacttgaacgtatgaacaattgttggggggacacagccctttgtttggattaagaaacaggctgaggggggtggccgccatgccccacaccgtcttccagggccactcccagccccagggcttggctgcagagctgaacacaggcatgatggggaaggggctgccatttcttccctgagaaggccactgcctgtgatggcattccagttgggagtgccttccaggcagagggacaaggcatagccaggaaagaagccctgggtttgggggttcctggggaaggaggtgccacctggacaagactggggtgtcatccccaagcgggagaagccctcaagcagtctgggcagggtgctggggcccacctgtgttgaggccactttgctgggtgggtttggctcacagggaagggagccgagctggtgggcggccgatagggagatgaggcttctagggacgggagggtggaggtgaggggccctcgcccaccctccatcctgctcaggagccctagggagccccttctgctccagtggacagcctggggctcacaggaggctgggcaggcctcacttgacccccgcccgccagagctgcctgcccgtcccttaggagagggaacggggcaactccgggagacctggcagcgaggccttggcttaccattggctcatgcctgggaccaggagtggccctgcatgggaggccgtctcaaggtgggggtgtgaggcagttcctcaaggccagcggaaccagcccggggtctgcgggctgggccagatcaccctgctctctgcagccccggggaggtcggggtaggaggaggccgcagtagagctgaaggtgggagggacatctggggatagaaaaagggagacacctagaaagctcgggtgtggggactgccctgagagggcaggcgctgtcggaaggagaggggccacattcctgtcctgcccgcgtgggctgggcactgcccctctagggaagggtctccagcatggcttgcccacaagttttggcaaagataggccccttccagattgcagggccccctctgctaactgggccttgggtctgacagtgaattgatttgaggccacaggaggagactgataccaggcctcgacctcccctctttctcatccatgtgagtcctaatagagcccaggacagctcgccctccaaccctgaggaggagcctcttagatggactcacacagacaaggagtctggaaggatctcccgcagctggtggccagaggtcagctaaggatgcaacggcgaccccggtggaaccctgtgggacgggcagaggcggacaggcaggccgcaagggtgggctgcaggggagtttgtctccgagtccttctgtgcaaaccgtgggaaggaagactgtttttccttgaatatgcaaaaagaaagcagcagtccttatgctggcccagaactgccggttgagagaaaagtgaatttccatttccagaagtagggctacaggcaagggggggctacgggccaggttctcactggcctatgctgggcacggcggtgcaggacactgagtgggaggagactcctggaccccaggaatgtcaccttgtttggcgccctccttctcatttccacttcacagataaggaaacggaggccagctgggaggaggcactttcccttgccgaggcccagagctaaaggtggcagatgggggctgtagccccggagcccacaaggacacctggggcctcaaaaatgaggcctgggatggctgatctgctgggggaacagagggaaaggctttagatctgggcatggagagggaccgaggctggcctgtgtgggctcgttctaccggatgaggaaggcaggtgtcccaggctcaggtggtgggcggggcaggtgtggctgggagccagggtgctctctggaggtgcagccagagatccaaggtcaaccctggagggacaggcagttcctggttttttctaaacattagcttcgaaacttccagagttaacacgccggaatcgtgttgcatattattgagcttccagtctggggtgctgcgtggaccacgttgaatgcccagggactccgttgggcagatagaggggtgtcaggagcatggagtcagcccggctggcctgcaaactgcagatgctggaaggcccgtcaggtgggacctcccgtcaccaagcagatcttaacaggcctctgcttcttggtggaatgttctggtacattggcaggatgcactgggaaaagctaccatcctcaggccatgtcccccacacagtgtcattttcctccatttctgaacacttctctctcacctccctgtcaagatataccttgctgggaccgggcatcctggagttccctgcttggcagaagcccagaaaggcccagataaacgctgccccttggagccaccaacaccagagggacagaagtgggggctaaaaaagaacttaaggccaggtgcagtggctcatgcctgtaatcccagcactttgggaggctgaggcgggcagatgacttgagggcaggagtttgaggctagcctgggcaacatggcaaaatcccatctctactaaaaatacaaaaattagccacgcatggtggctcatgcctgtaggaggctgaggtgggaggatcgcttgagccctggaggccaaggccgcaataagccatgattgcaccactgcatttcagcccaggtgacagagcaagactctgtctctgaaaaaaaaaaaaaaaaaaaaaaaaaaaagaacttaaacctcagcatggcagagctgtgtgcagacccttataactaacacaccgaataaccataccacgttgtgaaactaattcctccttttcatttgcaagtaactctcccctctgcctttttttttttttactgttagaagcttgcagtgtatttttctgctcagccatgattttttaaattagtatgttaataaatgtgttgccatgctaaaatgaatctgtttgaaacgtacctgcatgcaaactattctaggacaactcaagttttagctgctctgtgtgcgttgtgtatgggagtcatctgaagtgtttttcctgtgttgttcacaacccgttaagcccctgggataaagctgattaaaactgggattccccagggtacccccgtccagcctgttagccaagttacaagcttttctcagagaagcgccccgggcttgtgcccaccagcattctgctctgtccgggtgagtaactcatatttctttctttctccttttttttttctcctaaactttccaggtaaaagtacacctgtaagccagcttggttccgcagactttcccgaggcccccgatccattccagccactcggggctgacagcggcgacccgttccaaagtaaaaaggggtttggggacccgtttagtggaaaagacccatttgtcccctcctctgcagctaaaccttctaaggcctctgcctcgggctttgcagacttcacctctgtaagttgagtcctccgcctccgggccaccccactcccttccgcttgcagcttccctgggatttttgtctccttttaaaggcaaacctcccagcttctttagcctcttggtacctcacactctctgtccctcgcgttatttattctacactgccacttctgtaagaaaaacagtttctcaataaaaaaaaaaagagccgcagtttggatgctctatcataagggcacgttttcttccagcagggaggcgggacctatctgtccttcacggtagattcattgtattatttctgacgcaccgaggctgttgtgttcactggtttttggaagccaagatgtcaaacacttccgaagtatgaaaagaagattgcgaaagttacattagggttctgctgtccccaaaaagccctttgtgcacaagttctcacagtcccgccccatgcattttgtgccacaagtgcaaattgaaggacttcaggcagatcgcgccagggaagagcaatttgaagttttttttttttaaagcttttaaatttcagttaccagctccaatgaaaaaagaaatccagtctagaacagccactctgaaagccaaaacaaaaagagctccaaaaaactgttgagcaaagttaagtgccttttcggaagcaaatctcgggatttcgaaagcctggctttgtttttctctgtgtgaaaaaatattccagattgtaacatgccgtcgcttcaaggagtttttagcagcttccttgatacatgaaaatcttgttctctgaaagcttcaggtgttgtcttcccagaattggtttcactatgtgtgatgccctcgctttcttcctttgggcttgttagttccttcatcattaggtgtgagatgtgttatttatagatgcttcgactcctgggatggctctttgaacacagccctgccatgtcaatgcacagaaagcacccgatttgtttctgagccgtcttgataatctctaccgtgcacagctatcctatggcttatttgtcaatttatttattttagtgacagggtctcgctgtgttgcccagcctggtctgcattggcgcgatcagagctcacttgtaacctcgaattcctgggctcaagcgatcctcctgtcttggcctcctgagtagctgggacgacaggcgtgcaacaccacgcaaggctaatgtttaattttttttttttgtagaggtagggtcttgctgtgttgcctgggctggtctggaactcctggcctcaagcgatcctcccaccttgaagtactggggttacacgtgactggcccatgtggcttatttaaatcgcccaagaccctgacctgtttctggctcttggtgacctataaatattttacaacggcagtgagtttgattttgttgaccctagatgcgcactgggggtctatacaaaatggtgacattgttaataaaagccagaaacaaaacctgctttatctagagtttcttgaatagcccttcatttattttctggtggaaaaatattaaacgctgatttaaaaaaaacagaactcttcacacatgactcaggtactctgtcttgggtagggaagagttaggtaagtggggtgaacggcagcttgaagaaatgactgttctctttctgaaattcataattctatttcctgtgaccccaacccgcaaagggctcgttttttcgaaaagcataaaaaaaaaaaaaacacccaaggtttcaaggtatcatttggcttagcatttctggtagttccagaacaattgttaacttcagttttaaaatagcgccagccattttatcaccctcatctcctggtgggaaagcaaattccacccaggcctggatgcagccctgttgttttctgttttttttttttttttccctaagtttttggtttttacatatttggagatgagtctcgctctgttgcccaggctagaatgcagtggtgcagtcacagcttcactgcagccttgacctcctgggctcaagcaatcgtcccacctcagcctcccacgtagctgggacctcaggcgcgcaccaccacatctggctaattttaaaatgttctgatagagacaaggtctcactttactacccagtctggtctttgaactctgggctcaaatgatccttctgcctcaggctcccaaagtgttgggattacaggcatgagcccctgtgcccggcctgttttctgtttaaaatcacttttcccactgcaaataccccagtttttttccagaggaaatgatcagatagtgtacttcagccactctgaagggatgggttgagtgaagacaggacccttaattgtttttgtttgtccccttgggtcgtatcattgtctaaaatcatccataaccagctctcctctggggactcaagatgacgtctctccatgttcacggcattcgggggctcagccgatcagctggtggtttctgggttcactggatcttgactatttgtgctaacttagaagagggcacagctgcttcctctggtttgaatgattccacttccctgagcaaatgccaagagggctgtctgactgcccggcagattggcagcgtgactctttcagcgtggacgttctgagactgctgttcagggcatgtttttacctgtgcaggagcagcccagtccatgctggcagtcaggggggcccaggtcacccgcacctcacttgtggaggtggtgccccggcggtgcctctccagaaccctctaatttacaaaccccaaatttccatcaatgggttatttgcgtgtgtggctgttcccgggaaacctcttccctctctggtatttctttaaaagcaggcctttctgtctcaggcaaatgtgtgtattaggaagtggcatttctaggttagcggaacggttcttttggaagttcgcattaagagtagtgcaaataccagatcagctaggccgtgcttcgaattattgaaggagttggatacaatttcattgtcggtaaatgaatgaatgggaagtggctaggcatgtcctgcacatggtggggtggaagtgccatcagacaccttggagcgccagtgaggacaggtgccgggcgcctcccggggccatcccatcgcccagcgtgccgagctgtctaaactgcggatttccaagaggctgctgaaatgaaccacttatttgcttctgaaaatgaaccccatcctgagtgggcaggcctcggctagggtggtgtcatgcccctacggtgtctcggttccatggtaatgccagagggaagcagaaatcagagccagtgtgtttcccagccactattggttttgcatcggccacagacatccagattctggcccgtgtgacccacccagatacgagaactagaaggtggccccgtccagggctaagacagcagacacagagggagctgcggagtcccctttcaggagagctctcccaggcctcacagcccagcgtgcctcctaagtgcatacagacctcaccaatgcaagtctccacagtggattcgtgagctggccttgaaccggtcgactctgaaggcaccaggaactttcctgctgacacctttcatttggaaacacagacccgtcaagggaaggcgcttcagtgacactgtgacacgggggctcagtggggccaaaggcggccagagggctgtggttcagacccagcaggccggttacttggtcgttccaggctttgatttggatccaggcgaacattactgtcagctcccacccaccctgtcctcaaggctggtggagggtgaggtccccgtcagctgcactgtctccctcccactgttgtcagcagcaccatggaataatttccacctgcacttgttggtttttccttgtttttctccccatgaggtgttggaaaattccccaaactggggcgggggggatgcttatctgtgcccctggcagtgacacaatggcggggagggagtccgacctggagactcatcagacccccaagtgtttagctgggcagtgcctctttaagaagtcaagactcagcccttcctcccagggacatcttttcttgatactgacactccgcctgtcccccatctgggtcctgaggccagctagagggaggcctccagggccccgcatccccctcactgccacatctgcctcccaaccaggttccttgcatttatctgctcctgcaccttgcccagtccccccagccctgccatctggccctcctctctcctgcttcccgctcatgccaccatcaagccgtgaaatatccagacgctgccaatctgatcacccaactcgctcgcccaaggagcctccacggggaaatcccagctccttcctggggcccacgagcccctcctcagtctggcttatcccaccccacgcttcatcctggctaccccaaggtcgggcactgagcctcacacccagaacctcgcagggacgcatcctccctgtcagtttcacctagtatcctgctccccacaggcctgggggggaaaaagtctagagtgtgagccaccccttccctggcctcagtgtccccagctgtcagagggatgagatgacagcgggcccacccccaggttgtcacgcagacctagtgctgcgtgtggtggagaggccgtgagtgttcctgtgtgcttctttcccccaccttcctgggttagtctgcagggccctcctcgagagcctgggtccttgggtcctggatcgttctgggattgtttgtatatttctgctcccaagggtgcctggggaagagccactgcgcatgttatctttggtgttactccagtgttgagcagagagctggtcagaggcagtgcatcgcagagagacattaataagggaatcctttgaatccctaagcagcagcagctttcctgagggggccgatgatgccagtgacctctcagggaagtctgggacattgggacccaccctgggggaggagcttgtgggatgtggcttttcttttcatgactaaagtactttgagttgtttgaaatcacctatctcagcatcaagatggttttctcccttttttaagtttttattttaactgaacattttagaaaaacaccccacggataaaaacttgactaaatggcagtgtaagtgccacaccttttgtcagtgttctgggagaaattgaccctcagagccgggtgcggtggctcacgcctgtaatcccagcactttgggaggctgaggcgggtggatcacaaggtcaggagttcaagaccagcctgaccaacatggtgaaaccccgtctctacgaaacatacaaaaattagctgggcatggtagcgcatgcctgtaatcccagctactcagggggctgaggcaagagaatcccttgaacctgggaggtgaatgttgcaatgagccgagatcgcgccattgcactccagcctggcgacagagcgagactccatctcaaaaaaaaaaaaagaaaaagaaaaagaaaatgaccctcagagggtctcagagctctctggagcatggctggaggtagaaataccacattcccagagtgcagaattgtctgcgccgtggggctttagagccatgcacgctggaagttccccatctttgcacctcttggccaccagcgtcaagggcccatcctcacttctctgcgtggggcggggtggctggtttctttgaggcccagaggtcatggttaaggtcacactcaatcacatgcatcccgtccactctgctttccagatggggggcctgagacaggctcgcacgcccactgggcccagccaagacatgcttatcccctgcacatcggaccctccgctgggcggtgggcaggaccctgacccctcccacgcattccctgcctccctccagcttgcaggtcccagccccagggccacatcacccactctccgtttttcctttgcagtttggcaatgaggagcagcagctggcgtgggccaagcgggagagcgagaaggcggaacaggagaggctggcgcggctgcggcggcaggagcaggaggacctggaactggccatcgcgctcagcaaggctgacatgcctgccgcctaggcgagggccgtgtgtaggcgggacagggcacgggcgggttccagagagggggcagtgcagatgtctatatatacacacacacaccgtcgccaccgtactccaaggaccgggactcgggggcttgttcagggtgagcagactcggctgcaagacctggaaaggtcacatctcctggggaagcccttacagaggccttggccaccacttctgcaggtccgtctctccactgtgccatcccccccggggctgactgcctcccgctcttcctctggggacgaacacacagcggtcagtcgaggagaggaagcacccagggcttccccgcctcctccctactcatagctgcagacatccccacccgccctcccacgcatcagtcagacactcccccagtggtgtatgcactcgttgtataaaatgaagtttgaatgattaatataaaatattttaatacaaaacaa

SEQ ID NO: 413 - DNA, 132999 bp, Homo sapiens
  source 1..132999: mol_type = genomic DNA; note = NC_000012.12:c42589755-42456757 PRICKLE1 [organism=Homo sapiens] [GeneID=144165] [chromosome=12]
agcccgagcgcactccgcctgcagcccagctgccagcgccgtctcccgcggccgccgccgcccgacagcgcgcccggaacatgccagcctcgcgcagcctgcgctgacttccccgagacgcgccgcggtcggcacggagactttctgggctctggatggttcgtgcgctgctcaccctcgcccacccctgacgccgcggaccgcagctcctcagccccgcagccccgcagcccagcagccccgcagcggcgccgaggacagtgcagccgagttgcgtctccctcgcgcgaggtgagtggcagcctggatcccggcggattccgcagagggggctgcggcgcggtggtggggggcgagcgccgcaggggtagggccgggcaccttcgctggcaccgccggagtctgtgacacccagactgggtcggtgtcgcagaagatcagggagaaggtcataatcggtttgttgggctgtgtagacagggaaagcagatattggctgcagcatcgccagggctccgcagaggctctccgcatggctcctgtttgctgcatcacaaccaactcttcccttggttttctccggcgtggaaacaggttctgtagcccgagggtcgaggcgatgcggggcgccgggaggcgagggtgcgttggcgtgttcccgccgcttaggatcgcctgtcacctactggcgtccggagggagggtaccgattctctcctctagcgctggggaaaggggctggtggctttttggcagaggcgaatcaactcccaccactctccccaaccccctgccccgcgatggtgtttgctgaatgtagcacagatatagggaaaaaatgggagcgtcttcctctcttgaggtagaaaaagttgaagaaactaggcatgttaatagttattaggagcgggactcaggatgcagcagaaagctgttaaattttcattaccctctaagaaaaacaaacggcatcgccagtgactattggcagtgctgtgttattcttgggactttgggaaaattgttcacagattgtcttcaggaggctgaagaacgaggttgggggttgggagagagggaggacggctgcatcacgcttagttccagcttgcctaaggagggttcaggatcacaagccgaacgcgtttggttgctgatttttaaaagggtatcagcggcagaactgagaccatgaacaaggcaaacacaccacgggaaccagcctaaaggaaaaaaaaaaagcaccaacaactacaaccaaaaaaacatgtaaaaatctgcctctcctgcagagttaacatgcatttgtgctatcaaatggatgcatgtatatgtgtcttttaggataagttttatgaatgacaaatcactgaaatggtatcttgtatctgttcatgcatacagtgttgtctactgcctcgtcttaatcagtactttggaaggctgtgcctgcagttgatgttatataattgatgtggttcaccatcagacattttttaatgtactttaggagtagagggaacttccatctgtcttttcagacaggcccaaggtgtagactggtgagggttgctaatgtttgccgtagtccggctccagatgtgtgagctcagctgttgcctgtcacttaggtgacaactggccctttcccactaagcctttgctgtctccattatcctcagtgaagtgtcagtgttcagccgccttctattatcaggagtggactctagccccttgggagccggcagccttgtttgaccgtccccaacattatgtctgttttcagactctagaaaggaaaaaaaaaacaaaaaaaaatcccatgacagcaagatagatacattttgaattgagcatcaacttaatccaaagattctgctttaatcaagacagttctgtaaggatgacgcagtatttgtcaaggcttttctctggaacaatatttactcccaccaggggattttaaacttaaacagcagccattcatcttgctgtctggtggagcctggttcagtttgcctccaatgtggtcctagccttggtggctaggcttggcctgggacaggaatctgtcattgtagcccagctggagcctgaagaaagcaaaatacagcacctgctggtaccagagggtttctaaatgccatcaactggcgagtcaggaaacacagaaggagatattttaccagctcttccagaaatgtttatacaaaggatttagaggttaacaatgcatgtgctctacatattaaaaccgaaaggtgctacaaataaatggatgttacccacagttaagggtttgcacacttgctgatgaacttgaaaatctccaagtttaataagtcatggctaatgtagtatgattcattcttataaataagcctcaaaaggaaggaaggaaggaaaagagggagggatggagagagggagggaaaaaggaaggaaaaactggatagtttatagagatagacatattgatgcaactgaatgggcttagtaaattaatttttccatctttaatttggtactaattggcgagttatcaccgagtgagcctgttggttcataggttttaaaaagaaaaatgatatattttactaaagtgacagattcaatcagttctgccagtaacaccagtgaagcttaaaaagcttattatgtttttataatcaaggtccatggaagcactatttgtccatggtgtgtggtggtgtaataagtcagcttgagtcccccagataaaatctaatattagctagggagaaataaagatctcctatagggttaatagctgaactcttaactttagagtcagatgtaggtaagtctagttgttcctaatattctctcttttgataattctgaaaagaccaaaaaagttaaattttgcagtttctttgattaaggcttttaaaaagtaagctgaattataagttttaaaagttgcatcataatttctctaaaatctcttataattacttgaaagcaaaatacaaagaattaagtattatgagtgattgtctataatactcatgaaatggaacaagaatctttacaaagtattttccagtaattaagtaactctcttaatggcctatacctatattttgggctctctaatatcatgggaaacaattttcagtaaagattatcattacttatattctacttactgcagttaatttcctggttaaaatagtttataaagagcaaatttttccttttaaagaaagacaggaaagctacatgtagtggtgcttggctctatagccccagctactggggaggatcgcttgagcccaggagttcaagttcagcccagccaacattgttagaccccatctctggggaaaaaaaaaaaaaaaggtaattttaaaaaatcaaagtgattctcatctgtgaatagaaatgttaaaagtatcatttgactaggatagactcttcccccttggaaaaaatagctgtctctctcatctccatgttatgtaaaataataccaactgtttaacccttattagtgagagaatattaagattgcctaaatctatgtatgattattccacaataaagagaaggagttaggaaagtgaaaggattgtgtttctgggttgcttggttggtcgattggtgttttaagggaccattacttctttttcttctggtcacagaagaaaggattattggattgcacaataatatctttagaaggttggtgtgagcaagcaagttgagagagggaagtacagtaatctgggcaccaagtcctgcattgttgcagttcctcgaaacctcatgcagcctatggagccagcgctccacagcacgttccaaggaccaagatggcattgaggaatctggagcagccccaagcctctgacttccccatctctggacacacagaaatgtagcgcttcatctgccccagtaactggtaatcacatccccttgtttatggtcatgctgaactgaagtggaggttaattacctacgtgttgatgaatgaacattttggagcagtgaaaaaagcctggcctaaaattgtatggggaatctgagtaagctgctatttccccccacttcccctctctcctgaagcagggatggcgaaccagacaggctttacaggttggagcacgctgatgtcatgacacttctggcacagagatatgatagaataatcagatcacttttctgtatgccagaatgacacaatttttccaagaaccattcctgagccactggtccactggcattgactatttccagttgtggggggtggggagggtgatcaaacctctcagaatgtaataattcttcctgtgtctcagttttatgcacttgtttagactaaactctaaatgcattttggttatttttgaagggacctctccaggaacaagaatgattgcccagcctgaaccgattagacctttccagcttcattctcctataaagagagattttacatataaaataaaagtaaaaatgtcagccaggcagaagccaatgtaaacattttaaaatgtaagctgcaaactagcaagcagctatcatttgcctttacttaactttcttctcccctaagtttggtcctaagtgagcctaaaagtcaactgaccaattcaacagcagttgcatttttctcactggtagatttggggtaaactcttgggagagatgcctttcatttctagtggattacacttcagaaaaaaaaaaaaaagttagggctgtgttatttcagttgttctggtactgaagtcatggactcctttctaagagttttgtcccagctgctgatttatagcacccaccagcttctgctttgcgtgtgcttctctctgtgtccttttctcattgggtctccggaagaaagatctgtcaataatgcaatgaaaatattgctgtgagatgcagacccgtaagtagactcctccatgccgagcactcttgctcagctgcccttcttttatctgaggcagagatccctgggcttgcaattatggtctttgactttggtaacaattctgtttgaaatgtttccaattacacacaatattggcggcatgtagcagctgcatgccaaaaagcatttcgaagtgtgttccaagaatcaggctgtgattgcttttaatttaaataaaggctatttggtttcctgtgatgttttttataaccacctttccccccatttttgttgcctttaaaaaaaaaagaagtctaatataaagtagccaccacttaatgtgctataatattggccctagttttctaggatagccattttctttgagcaagcacaacaaactttttaataaaggaattttaaagaaacatttatagcagtttggattaccccaaagaagtaaaggggaaaaggttatcttagagcatattgtaagtagctaatgttttcaagtttgcctgtctccctctttagggacatagcaatatagttatctttttaggttattggacatcatttggtacacttttttttcccagattcctctatttttctttttgtggctctatgaagaggtgttataaaagaacattaaaaaggtagagagatctcaataagaatattcttaaaatgggggatagaggggaatcagcacataatttcacgattttattggaagtaaactctccaaatctgcctcctctgtgggcttgaaatctctgaacactgaaccctttttagaaaccttttaaaactggtggtttaaatcttttaatagctactagatatatttgacttattagatctgaaaataagaaaatatacactctcaggacttggagtaaatggacaggtaatagaactggggagttctgtttccaggacaattttggcccacctgaaacataacacctagagctagagggtatccaagaggtgaggtgctaagatggtcctaatgaaggtgttttcacataggctctttcaatcctggcagaaacatcctatagaatatagtgcttctttgggttgaacagtagttgacttgcataaatgccaacatctcttctggcatctttggaaatcttccatcatgtaataaatattactgtataacccaaatttgtaaatgccatgtttcatgtagcccctgtagagacagctgaaattagcctatgctgctagggatgattgagatcctggaggttaggtgactgcctaaatccaaagtactaccagtaactaatgctattggaggcctttgatgaaatataggagaaggtgtgaggttaaacttagcatagtactgtactgcgaagaatagcccaccaaaagatgcttagagttttcccttaaatcccctttatccttggaaattgtctttcagttaagcaaaccttcttggaggaaatttgctcaactagaggtaaaatgaggtttatgttattttaccagctgaacaccctagcttgccagacacatccaccttacccaggcccattgctatagagacaaaacccacagtaactatggttgaaatagaaagtctattaaaacctttttctatgttggccagctcctctgccccagttaaaatgctgccttctgtgtacacacacacacacacacacacacacacacgtttcaatctaataatagtaaactgctttaagccatgtatagtttcaccaagggcatttgtaattctttggtttcttttatttcactgataagcaaatatggcaattttcggaagaaacacataacttgttaactacaattgatacttccaactatcctatttacgtgcatgaataatctaagttcctaatttgggatctgaaaaggggctagaattcaggggtgtccaaccttttggcttccctgggccacattggaagaagaattgtcttgggccacacatgaaacatactaacactaacgatggctggtgagctaaataaaaaaaagaaatcacacacacacacaaatctcataatgttttaagaaagtttacaaatctgtgttggaccacattcaaagccatcctgggttgcatgtggcccacggtccgtgggtcggacaagcttgtgctatgtagtgtggtatgttgttttgctttgaaatatctctttcaaatcatttagaggatgttcgattgtacacaagaagactgcttagtgctctaatgttgaaatatgtgttataatgtatgtcaaaaagagattacattttacattcttctgtgactatgaaattaatatgtatgttcagtgcttgaagtatatgcatgttacataatttttagaaagagataaagttaggtctgaagcgcattagagaatcacagatgtttcttgtaagagaatacatatgcttcataggaattttgaactgctttctgatgctaagctttgttcactgcaaggatcatatgaataatttcattgagttgccccagttcttacttacacaagccttgagaaaggagctgaagtgataaataacttgcccccctcacctagttctgaattgctttagccttttatgtttcatgaatgtgaagggagggaataaaatatacagagaagatgtttgtgtttaactaacttaatcatacaagttccctttgtgggccttctataagcttaaacagcttggcaggctaatagccaaaaacgtgtcctcaagtactgccaaaagtgttaaaagcagaccaggctttctccatattgaggtactgggaacatattttttttaaccttctgaattttgggaataaatcagaaaaatcactctttttttttccctccccttccttacccacagaaaccaaaattattattcattgcagtgctgaaatgagaaactgataggaattatgatttttgtgtgagagcgttttaaactagcctgatttggctgtttaggcaggaagcaaccaggttatgatagtgtatcatgggtctttttttgttactgtttatgctgcctgtggacactggcttctttgctttagttccataactttttttttttttttgagatggagtctccttctgtcacccaggctggagtgcagtggcatgatcttggctcactgcaacctccgcctcctgggttcaagagattctcctgtctcagcctcccaagtagctgggattacaggcatatgccaccacgcctggctaatttttgtatttttagtggagacggggtttcaccatgtgttgaccaggctggtcttgaactcctgacctcaagtgatccacctgtctcgccctcccaaagtactgggattacaggtgtgagccacctcacctggcttagttccataacctttaatgaaatactttgtcaatttatcctgttttttctcaagcagagaccccaaaatagacagtagtggagggatgtgctataatagtacagaaaaagccagtttttttttaacagttttttggattaaaaaccaaaaaactcagactagtacaataactgtgtgatttttgagccagtttctcagcctctctgggcttcagtttcttcatatataaaatgagggaattagactagatcagtgtatattaatcaaaggattgaatcacacacatctaaatacaaatacacagattttaatgcagtaggttttcagtgcagtcttgcacttttagcttgaacaagctcctcagatgattccaatgtacaactgctgctgagccattaaattaggtgatgtctaaggtgtccttctcattccaaaatttgtttctaatcctactagaccaaattatctgcctgcctgcttttctttccttttcctttccctcccttccttactctctctctccctttctgcctccttcttccttccgtccttccgtccttccttccgtccttccttcctttctcttttgttcattcattcactcttaatgactgcttttattccttaaaagtagtcattgatattttgctgtcaaaatattatagatgtcatttcaacctggaaatgaagatctatgttctgtgcctgtgagtagatgctaatcacaaggagccatgtttgttcaccattgcatacctcatgcctaccacagtgcctggcgcatagtagaaacttgacaaatacagggagtccaaaaactcaagaaacttaaaaatatatatactgttatgttttcaaataatatgctcagtgtatattttgtcaacttgcaaacacctctcgcacaaagtatctcccaatttaaaacaatgagcataattgtttatctgaaaaacaacataataaatacattattttccttcagtttccagactttaggcatactccatggtgcatttattgtatttttctccaggttaacaactgatctcattgctttaaatttggaattacttcaactggaaacatatctggaggttgacagaaaaagatgttgagcatattattcaaaagtataattaatatactgttgaaaaataaattgatcctatgtttcctcactttttgagcatccttatttgttgaatgaatgaattccagttttctatgtcagtttaagaaatataatctggtcaaatcactgtaaaggtttttaaatgtatctggggccaggtgtggtgactcacacctgtaatcccagcactttgggaggccgaggcaggcagatcacttgaggccaagagttcgagaccagcctggccaacatggtgaaaccctgcctctactaaaaaaaaacaaaaaattagctggacgtggtggcgggtgcctgtaatcccaactacccaggaggctgaagcaggagaatctcttgaacccaggaggtggaggttgcagtgagccaagattgcgccattgcactccagcctgggtggtaagagcaaaacctatctcaaaaaaaaaaataatataaactccatctcaaaaaaataataataataaagaagacatatgatacctactttacttgatttgttgttgtttgttgccattttgggggaggttttattattgttttatttggtttttaattaaaagaagaactttaaaactcactattctgaaacctggctaactatccaatttcctttgaacttttacacgtggccagtggcaaaatcagctagctttagcaccttcttcctaccatatgccctctgccaaatcaaatcatcagggtctcagaatggaaaattctacctgaattatctacctgggttgtttgcacatataactggaaaactctctttaattattatgtgaagaaatactgtgaagcattttaggaaaaatacttaactgtagctaaacaggtcaaggattacttgaaataaattgagagctggttcagagtattgtataaagccttaatatttgcagatttgactttcctgaagttttacagcagatctccttgtttgtactggactttaaacgaatgttaaaaaaaagacatgtgaaatcacagctcactctgtcccttcaggtctctgctcaaaagtcatctgatgtcagatagccttccctggtcaccctgtaaaaaatagcagcatccctgctttttcccagtcaccatctagcactccccaatcctcttaagctgctgtaccttttttcatagcactgttagatatttattgtgatagctacctgttccctgaagatacctctgtactgttttgtctactgccattttaatgttgtatataaaataaagataaggtcaggagcagtggctgaagcctataatcccagcactttgggaggccgaagtgggcagatcacctgaggtcaggagttcgacaccagcctggctaacatagtgaaaccccgtttctactaaaaatacaaaaaattagcctggcgtggttgtgcacgcctgtaatcccagctactcgcaaggctgaggcaggagaatcacttgaacctggaggctgaggttgcagtgagccaagatcgtgccattgcactccatcttggtcaacaagagtgaaactcagtctcaaaataaataaataaataaataaataaataaataaaatgaaataaacacaaatagtagccagtattctgtttttatctgacctaaaaattttttagaaaggagatagagatattttatttggagcatttttgtgggtttttccccccagctgaagtggagtttctcagctgtttacccttttatctaaataaagccagagaaacatggtagaatagaaggaaagatgcgtatcaaataaccctccttccttttccacactcccaagtgatcaaggaaatgtaatcatctagcaaagggatgctatattaatagaagattgaatatgtgcaacaaggaagctatgtgacttccttcttcataatacacccatgccactctgtaaccttaaaaaaaaaatagaggtagaatcttcagagaggcttgtgatgttgccatgtatgttaaaacatggatgacagactgtctttcactcaaacaatctcctgatttaaattccaggggtgaaaagctaatcctctaagtgatttcaaccagcttgctaggaaacctagttgcttgaaattattattttaatgtctcgagttccagagctaaattggcagtgagtctgttttcctattaagaagttgagccaacttatttatccagaaattaccatgtttcaacttgggggttctttattatgataagactaatacctccaaagtacacaaaacactttcatattcatctcattttatcttccttgcatctttatgtgcaggtctgaccaaggttatcccaatttactgatgaggaagctaccttttagttcgagatgcagcttcctaaggagctttggtttgccagttcctaaataaaggaatgtttgcagttaaatttttagaaagaaagaagaaaagaacaatagaaagggaaagtaagcaagcacttgtagcttacccaaaattgtttgatgatattttattgtttcataaatattgctgtgcttatgtgtgttctatattaaatgcttttacataattattgcatctcctactaacttgcatgggatcttagatgagtcacataattttctggccttcgtacccactctgtgcctcagtttcctcagttgtaaagtgaggagaggctgatgattttttaagctcaaaatttacttgactctaaaaatgtggaggccataacttcagggggatagataataaataacaaatgtgagctggtagtgttattattagtctcatcattctcaccacccaaatcccaaattagaatttttttaacagtctatttcaaaagtattcatatgagccaggtgcaacttatagccttatttattattcagtgtggccagttaaaattcaacaatagctatgttttaaaggcctgagggcctaacagaatatacacttcccctgatcaaaagtctggtttatagtttaccttagagttcaatgtgacagctaaaaaaaaaaaatgcagtgatattacagagcaaattattaattgaatgttgttacaatagtggcatacttatgtttatgctaaaaattacaaatgtgattattatgtttatacatgggaaatgtggacaatttttaaagtagtactcaaattagcatgttcacttgttgacacacagtgattaaaactgtgtttaaaatgtgcgtgcccattgaccaaactggatttaattttgggaggcttagagagggtttgctggaaaataaaaataacataacattcattttagttgcattcctaatattttcaataaccctaataactttcttatcttccaaactccccagataaatgctggtgtaactatgcagtatgtagtgaaactcttcctataattaatctttgataacacatgttggcatatgtcaccatacctactggcctagatgttccttttagtagcattgtaattaattaaatcactcacttttcagcaaatccttaggacctcaggtcttgttcacattctaattaggctgcacccaaagttataagcagccaccgggaagcattactatctgtattatatctgagattaagtttttgaattgttcagatgaacacagcagtgagccatgatgtgtctcccagaagattcataagtgactatgaagtactgtaccaataggaagaactaataaatttgacattaataatcgccagtttgaatctgggtcacttcagccatgactcaaagatcaaacgctatcagatggtaatgactgtgtgaaaattctgcaggaaggcatttcatttcttaatgacacctttgtgggccttctcagcagactgttagagggtggaacagaaataaagtcgaatatgccccttggtctggaggctagcgctccagggtatggttgacacacttttgcagagatgctttaggagcagttcacagtgttttctgttgttctctctccttaaatggatctacagaacctttcatcttttgcctcttttcctaaccatttattcacttcaaagtgatgggggctgttttgcatattctctgccttcttttctcttctctgaaaagtaaggagaaattgcacttacaaatgcatgttaaccatttaatgttaagctttcccatttttatttcaatttggtggcatggttttcctttcaacacacctttactgagtgcctgtggtttgacaggcattatggtaggttctgggaatacaaacattacataggagtggttcagtttttcaagagtgcagtgttttgtaagggaggaaggcatgtaagcacttactggcaatatgttgttgtaaaggcaggaatagagaaatgtgctggatatagcagtagcacagaggcaaagcctgaagttatttgttctatgtggactattaagggaggcttcaaagaggaagagattattgagctaggtcttaatgactaaataggagtttggccaagtcattatcagaatagcagaatgggctagtttaggcagaaggaaaagtatatacaaaggcaggaaacattagacaagcgttatgcttagtgaattgcaagttttttatttttttttttatttttttttgagatggagtttcgctctgtcacccaggctggagtacaatggcactatctcggctcactgcaacctccacctcccaggtttaagctattctcctgcctcagcctcctgagtagctggaattacaggtgcccaccaccattcctggctaatttttgtatttttagtagagatgggttttaccatgttagttaggctggtctcgaactcctgacctcaggtgatctgcctgcctcggcctcccaaagtgctgggattacaggcgtgagccactgtgcctggcccaaattgcacgtctttctatttggctataagattaactgtactcttagggactgattgccacctttgtaaatcagtttaaatcagaaataacatatgaattatgacaacttttattgtaatcctgtcttttctgtggctggccttaaggttctaagtaacagctctctgtgttccttcataaatatggcatttacctggccaacctaccaggtgtttacacttgtgtcttttcattgttatgttgttacaatctgaacttatttactctttagtttcactgccaggtttgaatttcagcctcaagtgtttagacaacattatgtaatgaatattatgcttttatgacatttgctttagtactgtaagagctttccatgaaagctaatggttgaaaaaaaaaaaagaagcctgaatgtcaccaagtggcctccagatgtgttttattgtgttggtatctctgttttgttttcataaaacttttttttaatcttaaaaaaaaaaaaaagctttaccaagcagaaatagcagacaatagtctcataggagatgaactattttcttcatttcctgattgttatgttttgaactcctgcttaaaaaaaacagcaacaacaaaacttatgattcagttgaagaaaacctccacaacggtataaatactgtacttttaaaagcaaatcatgtttattcgtttgttttttgaaggtaaactcacttcttaggttgaaatgttctgccttcttaggttggaagggtctgttttaatatgtgatttttcaatatggtgatattaaaattgtgatttaacatctttgagaatttctgccatctagttgttcactgagcaatcagaatgttttcaggcagtctggtgtgtgataaatattttgtagcatatgtggctgaacatgccaatttcaaagcgctttacaagctttaattaattttcacaataaccagacacaatttgctttgttgatggaaagtccacagacagtggggttcagagtgttgcccatatttgtatagcaaagtggttttcaaacttttttttgttgctgaatgcttttctcaaacacaagattatctggaagcttagcatggaaagtaggattgcttttgttgggaggtggaaaggagtttgtcataaggcagctatatttataaacacacacaagatacctagttaaatttgaatttcaggtaaataatgaataagcttttagtatatgtgtgtctgaaatattgcacgtccccaagaaattattggttgtctatctgaaatttaggttttactgggcatcctgtatttaacctgacaaccctaagccagtgaccataaccccatccctcagctcccttttctccttccagccaggtggggttcctggttccttgaacacagcttgaaaaccacagacaggagaagtctacacaaatgctgagaaagaaataatagtacatttttcttctcagtcctaaatttagacaatattaccacttccttggctatgttagagaacttcatgatgatgcatacactgccacacataataattttaaagaattattgctcagcctggtgcggtggctcatgccttttaatcctaccattttgggaggccaaggcgggtggatcacttgagcccaggagtttgagaccagcctgggcaagatggcaaaatcccacctctgcaaaaaatacaaaaactagctgagtgtggcagcattggaggattgattgagcctgggagatggaggccgtagtgaagtgaaatcttgccactgcactccagcctgggcaacagagtgagaccctgtcccaaaataataataataataataatacaaaaagaatcatactttccttttcctttcttttatcttagaataaaatactttctctgccaatctttgggaataatgtttaagtcgcctctttgtagaagctaaaaccttaactcctgtgagttaaagagaactgatggtataatccgaattgcagttggccacatagagtcaataaagagaagaataaataggagtttgtgagtatgcctctaaagcagcccagcgcagaattgtctcatgtggacttctccttgtctgttggtctatttggcaagcacatcttgtagtggtcctggcttgatggcaatgcccattgaagtaattctgttattttgctctaatattttaaagcagccctcagatattgctctcgtttctcaagtcaactactccacagagcattttatttatttagccgttaaatgttttagtgtaagtgagtacagtctgattagcgatcagaaaccgctaagtttgtttaggctgaaacactcctccagtgcccaaggaactcactggattaactgatttaaaaaaaaattttttaaacatacaagaaactgaggaccgtagcctggatctaaggaaatctatgtgctttgggttcgatgctctgcatgggtgacctactaactctatgtaagattttgtatttgcaaaatgttagtagtgatttacttcctggtggttagaataggaatgggtatgattttattaaaattttttttcctttgagacagagtcttgctctgttgcccagactggaatgcagtggtgctgtcatggctcacttgcggcctcgacttcctgggctcaagtaggcctcctacctcagcctaccaagtagctgggactacaggggcatgccaccatgccttgctgattttatatatatatatttgtagagatgaggtctcactttattgcccaggctggtcacaaactcctagactcaaatgacccttctaccccagccttccaaagagctagaattacaagcttgagccttgattttatttttttatgccattctcaggtttttcaaaatgtgggctataagcacgttattttaaaaacaagtatttttaatttatttatttatttatttatttatttatttatttaagacagagttttgctcttgtcacccaggctggagtgcaatggcacaatctcggctcactgcaacctccaactcctgggttcaagtgattctcctgcctcagcctcccaagtagctgggattacaggtgcccgcccccatgcccagctaattttttgtatttttcagtagagatggggtttcaccatgttggccaggctggtctcgaactcctggcctcaagtaatccgcccgcctcggcctcccaaagtgctgggattacaagcataagccaccgcgcccggcctagagatatattttaaacaatgttcctgtgcttaaatgttccaaagtagagatgaagatcatctgggatattaataatttttttaaatctgcaaatgtttatatatctttcaaggttaattgtattgtgaaatctgcccaaattgtttacacttaaaatttctctctcattcattcatttgttcattcaacaaatacttactgaagaaatataatatagacatagtcctttatatcacaagaaaggggctgatgggtaaaaggaaaagaaaaggaaagtgaaagatgtaacccacagtctttgtccttcaagacttcactatgtagtggggcaggactggggcatgtactcatacaggtacctctgaaatggggagaaaagatgattggcctctatagcaaatgagctctttgatgcacagtgatagtaaatgactttcatgaggctgtatgttaatatcagtaccaaaacacccaggacacctgaattcctcttaggggttcatactcctgcatcataaaaacaagcgtaagctcccgtccatcaggtgggtctgaaaagtcatcacaatccctgctgctttccaagcccaaggcctgggaccagggagttcatctgcttcctcagacaagaccaaccccaaaactgcctgcagactgaggctaggatccacccctcaccagctttaaacacagcctgggtttgtgctggatggtgtcacccttctgtaggctggtttcaattattttggtttttagcttctttttgtattctcttggaggagacaaagcctgtaattttattcctgtaatacctcttcataaaaccagtttactgatctttttttttactctgaaactcataccaaatctatgatatacagcagtccaaaatatttgcgtttttttcttttataatattaacacatgaaaaaagttaccattcattatgtttacctcctttcacagttcaaatagggtaaattttagtctctgtttctcagtggctggataaaggcagaatttgacaggcaatttgaggggatttgtgtaataaagcctagaaaactaaacgttttgtatgtgttaagacaacctttgggtcaaagttaaattcacacaaactattgcatagtaaattaaactgagttattgttgacattaatatgtaaatgcttgtaaaaataatctagcagatatacaatatagttactttaaaataaggctaaatattctattctttattttgattggatattttaaaggttatataataatttaataattttcaagaacttactgaatacagaatttttatgtatttatttatttagagacagagttttgctctgctgcccaggctggagtgcagtggtacaatctcggctcactgcaacctccgcctcccgggttcaagtgattctcctgcctcagcctcccaagtagctgggattacaggcacccactaccatgcctggctaatttttgtatttttagtagagacaggatttcatcatgttggccaggctggtctcgaactcccgacgtctggtgatccacccgcttcggcctcccaaagtgctgggattacaggcatgagcccactgtgcccagcccaggaatttttacttttaagaggcacatttgaatttggaaatccactgaagtggatatgaaagaactttcctaaaggattttttttacttatgaataaactaggtgttttctagaaagagaaatatgggtgccattcaaaattgcctaatcataattctgtgagctgttgaaatcaaacaaatgccttgatcagttgagctgccagatggaattttatctaaaaccagttcagctgctttcatacttcaggactcctgtgaattttatcacaaaattacttcatactccatttggaaggtagttacttaagcatggagtatgacaattgtttaacagtgcacagtgaaacttaaataatttttgactcaaggaagggagctatatctaattgaaacatctagggtaattcaggtaggcggtcataaccgctcaggtgtcatgcactattccaattcagattggctaatgagcctataaggctttgccttgcttttcttgaaagtttacttgtccattagcacagtgccacctaacatcacgctgggacattgatttcgaattgattcacaaagaagtgccgggggtcacttagtgactatctagtcaatagcaggtgtcctctgcagatctttcatttcagagtctgtgctgtttagctgatgacacaatctttcagctttaccatcccgagcagaatttcccaatgccacaatgctcatcttaaacatgaagactggtgaagtgatatgttgccattattgatgcatctgttccagagattatgtcaccacaaaggagttaattggtcttgttttgagggtcatgtttaattgcataggtcagcaaaggaagataaatgactacttctttaagtctgtgcctcactttttctctaagacagctgaaacagtacaatcgatttccttatcgccacagctggcaccataagaatgacatacaagctgaaaaagattactggtatataaaaacctgagttaatgagtccagatagttaaatatagaatatgcttaaaccgacttgctcacagaaatcttcccacatccaacaggaagaaaggaggcactagatggcagtcttcaacaaacttgaaatgacatttcctcttaaaagaaatgcattacttaaaagcagtcatgtctgttctgaatgaatttaggcttgagctctgcatcataaaaattgcaactctacgggcattatgtactttaatgtcacattatcgaattttgtttttaaatgtaaaatgattccatatatactttaaaggtccattgctaaattaattactgagttattttaatacctgttttaactttacattttaagatgccatcagagagcttgtttcaggatgtaacagctagggaaaaatgatggtatatccattaagtgaaaaattatgcagctgtcaaaaaataaagatgtagagataaagtagtatgaaaggatattcaggacatatttaagtggaaaaggcagattatagactagtatgtatggtgtgatcattcttttatggaaaatagtatgccttcactgtgtattggtatgtcagtgttgctctctgagagatgggactatggattatggatttttttttgtttctgcttatcatttttctatcaaaaaacatatttcagtagacaccagggactacaaaagatgggagggtagaagagggttgaagaatgagaaattacctattgagtacaatgttcactgttcaggtgatggctacactaaaagactagacttcgccatcatgcaatatatgcctgtaagaaatctgcacctgtaccccctaaatctataaaaacaaattcaattaaaagatatatttcttctgaattatgatagtttttaagatgtacataatagaataaaattgccttgctgatctgagatgaactttttgaaaatactgcttacagtcatttcattttattcatcaagcgtatttgccaccttaccctatgtgctttctcatgttgctcagttagtatttacaccatgagatttttgttatttaaaataatgcgggctgggcatggtggctcacgcccatactcccaatactttgggaagccaagtgggagggtcacttgagctcaggagtttgagactagcctaggcaacatggtaaaacccagtctctacaagaaaatacaaaaattagccaggtgtggtggcatgcacctgtggtcccagctacttgggaggctgaggtgggaggatgacttaagcctgaaaggcagaggctgcagtgagctgagatcaggccactgtgctccagcctgggcaatagagccagaccccatctcaaaaaatacatatgtaaaataaaataatgcaaaaagtgttccctatttttcaaagcatagtgaaaatgaggctatatatattagcaaattctaggcagatctcaaggatgatttatatgttaatttactttctttagtttcatatccaggtaggtacttactggaccagattccattcacaatgaacatttatgaaacaccaaagatgtgcaaatcatacattattgagaattacaaatattggattgtgaaggagatgaaggttttcaagggttatttttccctatgagctattcttcatctgtgtgtatgtacatgtgtttagagaggaatgtggaatgtgtatccccacctaaagaagataacgcttatacctctttttttttttttttttttgagatgaagtggcacgatcttggctcactgcaacctctgcctcccgggttcaagctattctcctgcctcagcctctcgagtagctaggattacagacaaccaccaccgcgcccagttaattttgtatttttagtagagacggggtttcaccatgttggccaggctggtcttgaactcctgaactcaggtgatccatctgcctcagcctcccagagtgttgggattactggcgtgagccaccgcacctggccaataatgcttatacttcttatcttctctcttggacattgatatctttgctcctatactacagatagagaagaatgtcatttggggaaaaaattgaagtatttttagaaattaataacaacacaccaaaagtttacttccatttgagaaatactccagaaataatctggcaagactgaaaatttctatagcagactgtactgtagtagtcttcataaaacaagttcacaaagtacagttcattcataaagagtcagtgtagacttttggggaatattagagatcattgaaaagagtatcctgctcttaatagaatacctggcacagaatatgtattcagtaaatatttgttcaataatagatggtatccatcgaggagctttgatccatcaatagaccatccggattgaaaacctctgtatacttggcgtaaggagctttagacaagggtacaatggctcaatctgctggacattttgttaaggtatgttgatcccccatgagcccagtttagttccattgtgaataattatttaaaatagtaatattaaataatcatctctttgcccctcatatgttttattttctgcaccctgaactttgaggtccttgaggaaaacaactgcagtattaagagtttctattttagaaccaagcatatgatagtggctcaaaaactttttctttgatgagcagattaaatgtttctcaattgaaaagccaagtttaggacaccagaccctgatgactgtattaaccccagtgagagtcactgtccacttctttatctctggtgcctggcttgaaatagcacaaaatgtttgatgaatggaaggagggtggaagggagagagaaagagagaaatttaattaaagattcagagtttaagaatgattttacacacattctcatttaatcctaataacaaacctgtaggtcaattgtctcattttataaatgaagaaacaggttccaaatggttgagagaatccctgtggtcacacagttattgaacattagcagccagcagagaatgcagatgttcttacgcaggtctggtccactctaccagcttgcttgaggcccacatttggagtactctctgtctcacagccacttccccctccaatttctgtttgccatcatccatcctcaaaccctctccaccgtgtgtatccttctaggttagtagcttcagcaaccaccgagttattcaacctagaaaactggatgttatccttaactcctgttctcattttcacattcattcaaccacaggtcccatctaatttgcctcctggacatttctggaaccagcttcccccttccctccattctttcgtcccattcaataacccacctaaatccaggcttctggcctcttccacaaagcagagtgatccgtccaaaatgaggatctcatgataccacacctttgatccaaatgtgcttctactaagagccctccacagcccgctctgcactccttcacaaacctcctgccagtctctccctggcctttgaccatctcgccacacagactggcttccattgtcccacatatcttgcagggtacaatcacatgtttcctgtccctcctctgatccccggttccttgttctggctcattttaggagaatatagtactcaccaaatcagacttcaaagcaggagacttgaaacaaagccctcgcagctcccagagggcagtgtggctcttccttcagtcccttagcccagtctgtcctcagcactctcctgtctcaccagcctctgggatcctgactgaggtcggggctggtttaaaaagagaaaaagaaggtagggaaactggatgtgcatgaaaagcaattagcaaaaataaaaagcagatctaatcaagtacacataacaaatgaataaacccgcaggattggccaagctctgtatgactgctttggttgttgtggggagtgaacccatagaaacagttccctttttatttaccttttccctgtccctgtgccttttaaggatcccattgttgatttcatgctgctttatttagtgctagttcatcatagcctttaccacctttgaaaaagtaccaatttggggcaggggattgggataggacagttgcatcccacatcccctattctgttctccttttccccaaaacacatctctcttgagagaagtactttcttaagtttcttggttcttaatgggaccccagatccttccttccttccagccactgctgtcacccatccatccaactcacctgggctgactagactttgaggaacccctgttttaaaacttccagagctgatggccgccccacttcccctctcctcttctcaggctctaccccagatgtgctgtgctggccggggttcccccagtactgggagagctgctgctcccagaactctgggaatttccacaggcaacttagatttctgtgaatctgggaacacaattaagctactaatatttgttaattgtccttgattacacagactcagatacttaggaataatgtttttaaacatgtgatatctatgttaactctttttaggaatctttgtttactttcagtttgctaatactagtgttcctgccctgacgtatttaaataaatgcaaattaaatgcaagttaatcccttttgcaataattgagttactgttctttattaccggtggtgttgagctctacatctggatacaccacagtaagcatatccttttgcttttgtttacattctactaggacttaggaatccaaataattctgagattgaccccaaaaaataataataactacattcttttagaactaagtcttccaaagatatttagtcaaatacctcagtgaaatttgagaaatgttggtattcctagaatttaaaatatgacctcaagaaagatttcttttcttttttttctttttttgaagagtttcactcttgtcgcccaggctgaagtgcagtggcaccatctcagctcaccgcaacctctgccttccgggttcaagcgattctcctgcctcagcctcctgagtagctgggattacaggtgcccgccaccacgcctgaccaattttttgtatttttagtagagacagagtttcaccatgttgagttggctgatctcgaactcgtgacctcaggtgatccgcctgcctcagcctcccaaagtgctggtattacaggcgtgagccaccacgcccggccaagaaagatttcaatagtgttttggaaagagacctttttcttttttcttttctttttttttttttttttttagacagagtctccctctgttgccaagctggagtgcagtggcgtgatcttggctcactgcaacctccacctcccgggttcacgattctcctgcctcagcctcccaagtagctgggactacaggtgcacaccaccacaccagctaatttttttgtacttttagtagagacggggtttcaccatgttggccaggatgttctcaatctcttgaccttgtgatctgcccacctcggcctcccaaagtgctggggttacaagcgtgaaccactgcacttggctggaaagagacatttttcatagtgggagaaggatggcataagtttttttgatgatatttcactttagaaattacattctggtttgtgcccattatcccaacataatcattaactgtacccattgtactcgaaaaatgtcctgttttgcatgacaaatcgtatactctccctgtctgtactctatttaaatattaaacaattgatcaggatttttctttgtcttgcagatacatgccaccaaaaaagattctttttttttttttttttttttttttgagacagagtcttgctctgtcacccaggctggagtgcagtggcacgatctcggctcactgcaagctccgcctcccaggttcacaccattctcctgcctcagcctcctgagtagctgggactacaggtgcccatcaccacgcctggctaattttttgtatttttttttagtagagacggggtttcactgtgttagccaggatggtctcgatctcctgatctcgtggtctgcccgcctcggcctctcaaagtgctgtgattacaggcatgacccaccacgcccggccaaaagattttttttttaaaaactccaatattgtgcaacattcatatacccatgataattaaacatttaaaaaatactccagtatgtatgtagtttgagaaaaaataaattaatattcttctttctcgtcctgctggaattttgcttgccacaggcaagtttttgtttgtggcagtcagttagctctttatccagaaccataaaattgtcctgttcaaaaaaaattttttttttttgagacagagtcttgctctgttgggcaggctggagtacattggcatgatctcggttcactgcaacctccgtctcccggactctagcaattctcctgcctcagcctcctgtgtagctgagattacaggcacccgccaccacacccagctaatttttgtatttttagtagagacagggtttcaccatgtgggccaggctggtctcgaactcctgacctcaggcccgcctcggcctcccaaagtgctgagattacaggtgtgagccaccgcacccggccccctgatcacaatttaaatttttaaattaaatctgccaaaacttgaatgtaagctatgtctttattactgcccagtgtttctgggcagtaataaactgtcttagcagtacagtttcttccactgttatacaatttttttcttttccttctgtgatttaggatattgaagccactcttcagataatattcacatctcttcctcacaatacatagttgatgtttaaattttctttgtgcatctgtctgcaggtcttttgccttgctttggttcttccttgtctacttattattgaatcttcacatcttcagtttttttcttacagttaatcatttctcatttcttccatttttagttttaattttttcttatttttaaggtctcttccagagatgctgtgttttggtattttcagtagtactttatcagctgctttcaatacatctgcaacttttcttaccttcctttagttctaatatgtaaataatatattttaactctgcctttttaaaaatgtttattaatatttttacatcctcgaattgagtttcattatctttttcacaatctctagtcaggtttccttccctgtcctaatcattccttttgtactattaccatgttagcatatatactttaattttctactgcacaaacaataagatatctttgccttttgactgatttgaaaatgggtgggagccaggcacagtggcttacacctgtaatcccagcactttgggagaccaaggcgagcggatcacctgaagtcaggagtttgagaccagcctggccaacatggaaaccctatctctactaaaaatacaaaacttacctgggtgcagtggcacgtgcctctaatcccagctactcggggagctgagacaggagaatagcctgaacccaggaggcggagatttcagtgagccgagatcgtgccactgcactccagcctgggcaacagagcaaaactctgtctggaaaaaaaaaaaaaaaaaaaaaaagaaaagaaaaagaaaattagtggaacatcatattttcgcttattttctttggagtagccgtaagatgggagctcaatgactggcaaattgtcagtgtgatttttaattgggaatatgccttgccagccttagacatgacttttcatagttaactgtacacaaatatttcatggttactgtgtgtaagcattgagtcattttcattaaaaattgacatctaaaatggaaaataaaatacatttcattgtctactctgaaaaagtctctggtgaggatttgtaacagacatattaacctgtaattaaaaactattttgagccttaaaaaatctaatctttaaatttgaacagaattagtttatacattcttggacagaataaacctttctacagtaaataacacatttgaaaacacatattcatagaagataaatgccatcagtaagcaattctataactgttacaaaacttacaagttgaatggagtagaaaaaatagtatttaagagaaaaacttgggtggagtaatcagaaagtttggtagaagaaagaaggtcagaaaagtgatgtggagtggttagaaaggtctattagtgaaaaatgccattgtctacttgctacttttctattgtgttatttttaaaaatagatctttcgcttgcaacacacacaacaaagggaaaagagaataaaggttattactaaatataagtcccttgttggctcagtctccaccatcttgctgtagcagatgacagtttattattagtggtagacatttgaagggtgttggtttgttgaagtctaacctctaagtcacttccctaacatgatttttctaatatcttcaaaagtttctgaggcttatctctttttaatcttgtctggaattgtgacaaatgcctcaaggaagagggaaggatataacctgtcctcagagatttatagcatttcaggcatcacaaatcctgtaagacatttttgttctttttgaggataggactctattaataatttttatgttattaaccaaagttaacagcatgattacattataagaattcccaatagagcatgtgttttttgttttgtgtgtgtgtgtgtgtgtgtgtgtgtgtgtgtgtgtgtgtgtgtgtgtgagaagatgggcttttgacctgccaagcttaagggatgattttttttctagaattagatgcacatccacccttgtctaaccttagttgtgaatagtaagagccatatgtgagatagggttggggatactggtttcagccatggcaaagcacaaaagtaaatacctgcctagtccagaataaaatatagaaataataaatgctagcttttaatggaaaactgggtcacatattctctttctgtttccaccctgtctaacaaatagtcccagataatagaaatggtataagtttgaatactcatgtcagataatgtaaatacccaaataattaaaggaggctgggtgtggtggctcacacctgtaatcccagcactttgggaagccgaggcgggtggatcacctgaggtcaggagttcgagaccagcctgaacaatatggtgaaactccatctctactaaaaatacaaaaattagccaggcatggtgggacttcaaatctcagctactcaggaggctgagacaggagaaattgcttgaacctgagagatggaggttgcagtgagccaagatctcaccactgcactccagcctgggcgacagagcgagactctgcctcaaaaataataataataataataataataataataataataataataataattaaaggagatttcccaattatctgtgatatctaaattttaatactttaccttaagtttgaagagctggttcctgttcttttccttccagtgtacagagagctattggttagcacattaattttgtgaaataatgtttagggaacatgataggattgtttcatttgcctataatttgtgtatcatataaaaaacccttcagcacaggctccaaacttcacacctggaatgtaagttcccccattgtgagaacttgataaagacatgtttaatcaatcaaatcagggagcatcaataccagagccaaggggtaggtcagttgcctgtatttaagagagaccagaccaggtgcagtggctcacacctgtaatcccaatgctttgggaagacaaggcaagaggtttgcttgagcccaggagttccagatcaggctgggcaatataatgaggcccccatctctaccccccccaaaaaaaaaaaatatatatatatatatatacacacacacacacacacataaacacacacatatatatatacatttgtgttttttaaaaatttgctgggcatggtggcacgtgcctgtagtaacaggtacttgagaggctgaggtgggaggatcgcttgagcccaaaagtctgatgctatagtgatctatgatcgcaccactgcactccagcctgggcaacagagcaagaccctgtctctgagaaagttttttaaaaacttaaaaagagaaactaggatatttctgttagcatggcaagtcttgagtgggctttactttggtacatgttaattaggaaggtgcagttaagcatcttgacatcaaaatagctcttctgaatttaaggtctctgacagttcaaatggcttatataggttaatgttttctaaaagccaccaggaaacagtttgaaatgagatatgatagtagggacaaggaagaaaaagtgatttctttgtaggaattctgatgcatgtctagcccttcacaagaggcctgagctcattgtcctttgattttctttttagaagtagaagggctcctttttcgaactccttagtaatccaacttcctaattttctacagaaatctacactgtatattgcagcctgaaagctaggacttgttgcaaatgaaaaatttatacaatcatgcgatttggttcacctggttaaatattagctgttctttttttaatctctgcctgtttgctatttgattgactaagaaaaattaactaattccatatacttgctctttgaacagtgtcatttactttctcattgtagtgctcatttgctgagttttatacaatatcaaccatgcttttcagctctagctcctctgcagaaaaacaaagttctttaaaagaaaataaggtcattaaagccaagaaatagcactttattactttctctagaagacttttaaaagaaagtgttgctttgtagtttagtagctcaaagacagcgagcttgtggtccggtgttcactcacggctggcatccactggcccatggtaaagccagctgggggacccaggcaagcagggtcctgttggagaccttcactgcattttccacaacagcatcggaattttcctaaggcagtttcacatctggaattttaaagaaagtttgcccttccataaaatggtagtaaatcttaggaaacattgtgccttttttgttgttgttttaattaacctggcatttctctaccaaaccattaacaaatgattggttgttgcctcccttttacacccttcatggtaataatggacaaagaggaggtttattaaattcattttgtgtgttacttttgaattacggtagcacgaatatttcacagaaaatcttttatatttcttatatgagaatatgtatacattgatctaaggtgtaagtattacattttatttatgtaaaatagcaccagcttgttataaaggtacatagtatgagtggttaaacaatattgaaacacatttctagtaggtggcttttgtgtagacatgcctttatccagttttaaagacaactagataaagactgacttactcggaagcctgatttggaggctgtcatcactccgatgtgccaattactaagcacgtgaagtgtctctctaaaagccaattttaatgactctagcctgctattagaatagtctaatcaaattctgaaagcaacagtctcttattttaaaatgtcaaagctgttcactttttgattgaaaagattgtgatgattctggaatgagtagcttagtgtgtgtttgaggagccttttacacagagagagagaaaaactctgcatggttacataaaacagtcatgaaacctaaaatttgatttgccagttttataaaaacaagatgactcccacagaaacctcagaattgtaatcactcaagtcttccatgcattgtgcatgatggataacatagggatagatccaggccttttctaactcctaaagcaacttttaaatgaacaaacatggacatcttttaaaaatagagcattttcagaaaggaagagaggagttctgtttgttactttgattactgattccccccaccccaaattttcagggaagcatatgttggggagggacgatgcaaactagagattatctgctgctcttgtacacaaattgagctacttgagctggcaagttatttagaatgtgaaatgcgttttcccaaacgatgtaaccagatagggttagcttgcttccttcatttggcccttctttcatctatttaacagacacttaagtgagttgcttctccgtccaggcactgtccccaagccagtccacaaaagcttaaaggataatgcctatgtattgaataaactgactttattttaaaagccttcaaccattattttagctaggtgcatatcttcctgtcattgagtagcactcaatgtaccagtcactccatgtaccagtcaccactctggtagaaagtaaaggccttgagccaggcaaggtggtagtcccagccacttgagaggctgcggtaggaggatcacttgagcccaggagtgctagaccagggcaagatggtaagaacctgcctctttaaaaaaaaaaaaacagaaattttgttttaacaaaataaaggttcattccttggtctttgtcctaaactaagccataaactctgaaggcagggcagtgtcttattctagtctgggtgcctggcacattgtaggtgctcagaaataattgttgagcaaagcataaaaactactggtgaagaacattcaattttgcaaaacccatatctttgcattatccattttaatccttctttgcaccccatcaggcatgtacatatattggaaagtcaagaagttgggtattggctatgtaaacttcttgactaattataaacttgactatataaacttcttgactaattataaaactcatttgttcagtcacttaataaagattcattaaggtccctacttcgtactggatcctatttctgaataaggatctagatccaagagcacaggcctggagctcaagagcctgtgtttgacccctggccatgacgcttagatagtagctgcatgatctccagcaaatcagtgaagctcctctataaagtgaggataataatccctcccttacagggtgggattctatgattaaatgaattgtataaaatacttaggccatgtatagatattattgtggtgatggtcatggtggtggttgttattagaaagaacaaagatgatcatgtcttgtgatggaatggggcaaaggggaggagccaggtcttccagggtcttgctggcctcacaaacatttgaggcgtcatccttgggcctgggaaacattgaaaccctttatgcagggagagggttgtaatgaagtctgtagctttttgcttctctcaaggccagagacgctcattcagcaaattcaacaatcaattgcttaaggcaacctagtaagtggccacttgcacataatcaataggactttatgcctgaattacagaaaataatatggattgtatttagcaactgagtgaggtggtaaatgtttgcttaccttcaaagtggaattaagagatacataatgttacagacctaacctcaggctacttgtaaagaaaatcaaatttggtgattaaatagtgaaaggcataattctttttactctctgggcccttagaataatagaaggtttatatgcacttgggttaggagtgaggttattgctaatgctgaacaaccaagtggtatataaagaaaatgctatgcagaaataatggccattctagaaggattctagggggatgcttttttaacagctattttttactgttacctttattaattgttaaaatatttagaatgtattataccttacaaatacccatttgttctatctcaaaattttgtgttaagctataaaaagccataatgagaacattttcaactctgagctctgtgtcatttgaaactcaacaaaacattgaaataatgatctttgtgttcccttataagaaaaagctaattatgggtatgtaatactcaggtaaatatatgttgtgaaaggttttaaattttaaaggtgggaataagaaaagcaatgaaaagaaacattgctaaactgattttatactcttacataaagattattgtttttcgcatctataaccacaataatactatttaaccccaaaatagttgggccaagtctattccattttcctctgtagtctaacagaaattactgctttttgctttgttttgtttttgagatggagtttcgctcttgtcacccagactggagtgcaatggcgtgatctcgactcactacaacctctgcctcccaggatcaagtgattctcctgtctcagcctcccaagtaactgggattacaggcgtgcaccaccatacctggctaattttttgtatttttagtggagacagggtttcaccatgttgcccagtctggtctcgagctcctgacctcaggtgatccaccctcctcggcctcccaaagcgctaggattacagggatgagccactgcgcccggcctgagaatttatgtattttaaaggagtttgaagaattttgatagctacccacccaaagcaacacttaaatgaaccatcccatctaagtgtccatattgcactacctagtgaggtactcgtgtaagaaaaaaaaaaaaaataagttctagtccattttgttttatttaaactagaggaattttcatcttgttgcccagtaccttagggaaagagttggtgaagagaacgtgagcctcggttttagtgggaaagttctgtgttttataaccttcaccacgaagagaattgggctttgctggcattagcaaattcactcctttattctcttgggtttggttaaaagtccttttttaaacttgaaacttcctttttttctagcaagaatttgcctcacctcttgtgatgcttttcttcctcacaggtttccagttcgccctttgagtaacttgtaaactgcaaacgagtctaaaagggaaatacaaaagtcatctcccacctttggaagacatcagtgtctattccatctccttttaaaaagataacgagggaaatcaatggccatagttttcttggaaatagaatttttctccaactaccattttggtcatttgtatacggctttgctgaattctaagttttcaatgtaaaattatgggttattttactttttcctttttttagtcatttgtattttctatttcctttacaataagaatgaggaacactatgtaatgagcacataacatatcaagacttacatgcgttctttcttttaatcttcacaacaataaacaaaatgaattgttttaagaccctgtatagtatcagcttatttaatgtcaccacagcttgatgggtgttttggtctcctgttttgtttttttgttgttgttggtttgtttgtttcgttttgttttgagacagagtctcactcttgtcgcccaggctggagtgcaatggtgggatctcagtccactgcaacctctgcctcccgggttcaagcaattctcctgcctcagcctccccagtagctgggattacaggcgccagccaccatgccccactaatttttacatgttttagtagagatggggtttcgctgtgttggccaggctggtctctaacttctgacctcaggtgatccgcccgtctcagcctcccaaagtgctgggattacaggcgtgaacccctgcgcccggcatttgtctccagtttttaaaggagagaactgaggcagatgttcagtgatttgctgcaggtcacctggtgtaagcagcagaaccagacttgaaccccagcagtgcgaccctacaagccattgtcttaacttgctagagtaccactccctccatcacattcagagtgcctgctattatctgtattttacagatgaggaaactgaagcttagagaggttaagtaacttgcccaaggtgacgttaccctgggcaatgatggaataggagggacactcagaccccccccgccccacccaccccctgattctagagccaatttgcctttcagtaacacaacacaatggacttattgtttggagaaaaacagtttttttttttttgagacggagtctcgctctgttgcccaggctggagtgcagtggcgtgatctcggctcactgcaagctctgcctccccggttcacgccattctcctgcctcagcctcccaagtagctgggactacaggtgcccgctaccacgcccggctaattttttgtatttttagtagagacagggtttcaccgtgttagccaggatggtctctatctcctaacctcaggtgatccgcccgcctcggtctcccagagtgctgggattacaggcgtgagccaccaagcccggccgagaaaaaaaaaaaatttaagaacctggggatgacacataaatattcatattctaagacaggggtccccacccccaggccaaagaccagtaccagtccttgtcctgttaggaaccgggccgcacagcaggaggtgagccgccggccagcgagcaatacagcctgagctccacctcctgtcagatcagctgcagcattagattctcagaggagctcaaactctattgtgaaccgcgcaggagagggatctaacctccctagattgcgcgcttcttatgaggatctattgcctgatgaaaacatccactcccactccacctccgtgtcttccatgaaacgggtccctggtgccaaaaagattggggacggccattctaagagaccacttccctatttgtcagaaatgtgattgtgtttactccaatttaaaacagggtctttacatacgttcctaatacaagtgctgcttgctactactactcacagcgctctgtgcccaactcttaacttcctccctcaagtccctctggaaagaagagaggagatgccttccttctgacgatgggacccccattggtgattcctgagactttattgctaattctctgactttggctgtaatgacaataagaataaaaaagcaaatagaacccacctttgtggagcacttgctctgttcggggctctggactaagtgcttttcatacattgtcttacttagtttcctgttattaatattccctccattttacagaaataggaaatagtgtagagtgacattaaggaactttcttggcctggcacgggagctcacacctgtaatcccagcactttgggaggccaaggtgggaggattgcttgagcccgggagttcaagaccagcctaggcaacatggcaaaaccctgtctctactaaaaaatataaaaattagccgggcgtggtggcatgcacctgtggtcccagctacttgggaggctgaggtgggaggttcacttgagcccaggaggcagaggttgtagtgagccgaggttgcataactgcactccagcctagacaacagagtgagagcctgtctccaaaaaaaaaaaaaaaaaaaaaaaagtaactttcttgaatgtgtacaggttgtgaatggctaatggagatttcagtcagtatttgtcatacttgacaaaatccaccttcttagcttccatgccatactgtaggttaaggactgtagtagttttaaacatcatagaaatatagtggggctttttgttttttggttgaggtggtgtggatcagctgcttcccaccaactggcttttaaaaattcaaaatccttattaagttgcttcataactatatggtgtctgcttatgaaattaactggactctagcattggacccattgaaaatcagacagccaaccttttggaagagaggatgtccaaataaacgtctcctcttcccttgggccacacacagggagaagaaaccagcttcaagcaattggccctaatgtgtgtgtttctctttcctccactctcctccttctttatttatttgccatcatacagagatggcacccttattctttacaggtggatcaatatttacagccattcagtggggactttgttggctcttcctgttctgcaggctgctgtgtaacaaaagctgcctgtttttctgggaccctccacatctgctagcagaactgcagttagtattactgggagctttgactgatgaccagttcaaagtcagtttgtttggagtgcttacaacaatcttcctgtttgctaggaagtaaaataactctgctacacacaggtatcagacccagaaggcagatatgtggttcacagtagacatttatttctccatctttattttttctcatgatcacctcaacattctgatgtgtgatcacaaccatctgtacaattatagttatttaagctaccgtaagtttaaaattgaaggttgcataggtgcatattaacaagggtggtgctgataaatttttaaaaagagttagctgatcacaatggcattttaaaattaatgaatgcaattggctttaattattaaaaaaatacatagtctagcaggcttcctcaataaggcttttttgtgctgactgtggcacatttttcctcaaataattgcagagctcagctttatcattaagcagatggtttctattaattcccaaggaaagtaaatgattgcaattaaccaaacactcaaaagttgaggattttagagttcagccctagtacttcaggcaggaatctgtgtgtcaccctgttagtcaaggtatgccaaaaaggagaaactctcttgacaattttataatgtctcctcctttatagatgggctttgaaagtaacttcgagcgttctcaaagctaagttactgctaaatctctgttgacttgctggttctaagtttttatggtgttttctgttgatttgttgttttgtagtaggaagaggattggaaatattctagataaatctgagtagcagttgaaaacagttcaaaaactctgtaaattcaggtagtactataggggttatgtcttttccacaaatgccactgtgtttctttgccctataatacgacatttgggagactattttgttggcagtttcaaagaaaggataaactgatagagaatacccttatgcaagtcaccctttctcttccagtaaataaactaatgtttccagtgaatttcttcaaacttcttggttttaaccaaatgatattgcttcttcttttcctcattttaaagttcagtcatttactcaacagattttttctttctttcttttaagataaggtctcgctctgttgcccaggctggagtgcagtggcgcgatcatggctcactgcagcctcgacctcctggactcaagcgattctcccaccttggcctcctgagtagctgggaccacaggcatgtgccactatactcaacagatttttgtttgggtgagctgctgtgtgccaggttggaggacagaaggagaaaaatattttgtccctgatttcaaggggcttgcaatgtgggtgcaaagtctgaccttgtgaacaatagcaatactgtgaggtacatggacagtggagcatttcagcatgtgcaaaggtgtcaaacaagaatcagagcagagatgctacttgagcttgggctagaaggatgagtggaagtttcccaagttgttagtatagtaaagagggaagagtgtgtgcaagacagggaggcccccaaagcaggttaagctcaaggacctcttaggtaattagatgttgccagaatgcaaatttcaagggaagcatgttggaagctcaagtcagactgataggctggggccagataatgatgccctttggagctttgctaagaagttcagattttatcctgtagatgatactctatgtggcagcagtgtggtgtatggatagattagaggaggtggaaacggactggagagataagtgagccatctattacacaagctagggaagagagggaagggtctatggggacttgtaggtttgggtttaggcaattgttgggaggaggcttgtgcattctagagatagggaatgtgtggtgcctttgagtcatcgaggtggagatgtcagtgagaggtaggggtgggttccatgatcccggaccctaaaggaaagatgtggctttgagtcatagtaaaccctaacctgagaactctgcacatgactcctgaaactatgtcaagataagtttaacaacaggtatttccacctttgttttcttgtttctttaactttttatgttgtagtcatgcgaattccttaggatgtggattcagctatggccagtttgatgtgtgttcttacccctaaccaagcttcagcagtttgataacatacacatctgggaaatgaggaacgctgggcgggtagcaaattgttcattaatattgcccctaatggtttttttcctagctttctatggagagaggtgatctttatctaggtttttttttttttttttttttttttggagacagggtctcactctgttgcccaagctggagtgcagtggcccgatctcagctcactgcaacctctgcctcccaggttcaagcgattctcctgcctcaacctcccaaatagctgggaatataggcacaagctatcacacagctaatttttgtatttttagtagagacagggtttcaccacgttggccaggctggtctcaaactcctggcctcaactgatccacctgcctcggcctcccagagtgctgggattataggcatgagccaccgcgcccggcctcacccttcttcttaaaccaagtgatggaatcttctgagactcatatttgcatccttgtcatcagtttcaattggaggtgagggatggacaggatagcacattctctccatctgaaataatgacctccatgctactcacctcctctccaaatcccacctcaaagactcaacacaaatcccacctcctcttcttttgactgtaccttctgaaagtgagcctagctttgctcttcggaactcctgtagtgtttattattttgcaccctttatttaccatttagcatttgctacttgtgaagttagttattccagtgtgcatagatgccttcaacccccttctagatgggtgtcttctcaggagtaccctatgaccctctttgggttccccgctttttgtcttctatattgacttatgcttacgaagcacataataaatatatatgtgttaatatgttcgagaaattttaaaatataggatggttttttctactgcatatacaggttgagcatccctaattcaaaaatccaaaatctgaaatgctccaaaatctgaaactttttgagcacaccaacatgacaccacaaatagaaaattccacacctcaagtaactggttgacctcaagtgactggttgcagttaaaactttgtttcagctgagcgcagtggctcactcctgtaatcctagtgctttcagaggctgaggcaggagaatctcgtaagcccaggaatttgaggccagtgtgagcaacatagtgagaccacatctctattaaaaaacacaaaacaaacaaacaaaatttaaaaactttgtctcatgcatacaattatttaaaatattgtagaaaattactttcaggctatgtgtataagttgtatatgaaacataattaaatttcatgttgagacttgggttccatgttcgtgatatctcattacatatatgcaaatatcctaaaattcaaaaaatcaaaaatccaaaacacttcttctcccaagtacttcagataaaggatacttaacctgtactatgaatgtgtaaccttgattttcctctcgtaaattaacattatcagttataaacatagctgcctttattatgtatataacattgttaatccgagaaccttggaagtgggtttatccagctcctagcttttaatctgaattgacctaatgataatagatcatattatttgagcatagtatacgttatcccattcagtctttaaaaatagtatcaagaattaggtgtattttttcccattttacagataggaaaactgggccttagagaagataagtgacctgtccagaaacacacagccttgaagagacaaagctgggacaggaccctgctgggttcagctccaactccaagtcctgcggtttatccatggcatggtgctgctggcctttgtacatctgttatattacataatctgcccaagggcctcatgaataccttttgctagcctcatttacagataaataaactgaaattcaaaagttttagatggcataccagggttattaattaggtctgtctgtctcccaaacctttgttctttccaccatacatcacttcctcctagtagtagttgctaggaagatgcctcagtaaaggtttgaagtagcttattactaagacccttccaattctaagtttctatgttataggaggaagatttatcagggaaataacttttcagggatagaaattattccagctacagaaggtaacttcacacctcctgttgattgttcctatattagtgagaatgcatgaatacttggaacttgcagctaattcaaaacaaaacaagcaaaaacttggggtatattttgtcagaactgttaacaagtaataagaatggctggttcaagtttctttcttttcttttcttgcaaaatagttgaaatgaaagtgaaaggcccaaggacagacaacaagaaaacacatataaaggtttcgaaaaagccacaaaactgcataattcagccagtaaatttaagagttttatagccagcttaagaaattatcaagtgctaaatggaagattcactattttattttgttttgtttgagatggagtctcgctgtgtcacccaggctggagtacagtggcatgatctcggctcactgcaaccaccacctctgaggttcgagcaatcctcccacctcattctcccgagtagctgggattacaggcacatgccaccacacctggctaatttttgtatttttagtaaaaacagggtttcgccatgttggccaggctgatctcaaactcctgacctcaagtgatcctcccacctcagcctcccaaaatgagattcactactttaaaagatctcaagtgaagaataatatttaattctttactcagtttgcctcaaatatccctgaaagctggatagcatagagagtcagcattaagtcaggtgaaaagttccttccattgtgtgaatctgttttcacttaatttttgtttatgtccactattctcattttgtctcaatataacataattttgtctgtgattgattaccagtccttttcaaatttatgtgtactgtgatttaattaactttacccttaagcaatgtgttttgagacatattaatgaggtgggagtcttttcagagtattcataacttatacatccttctttcattttttggcttggcatcaggctttgaaattctacaaggcaaaggtctgaattctgagcctacctgactccagggaagatctcctatatattttctggcatgtttgttcgtcagtgtttatgaaagattgcttttttacatctaaattcttttctctattgctgattaagaaattacttgaaaaaaatcttttgactatagatttttttttactaagtcattcaaataactttcaagaatctccctccttccatatatatatatatatggatatatttttccttccatatatatattttttttttttcttttttgagacggagtcttgctctgtcacccaggctggagtgcaatggcgcaatctcggctcactgcaacctttgcctaccgagttcaagcgattctcctgcctcagcctcctcagtagctgggattacaggcacatgccaccatgcccagctaatttattttatttttagtagagatagagtttcaccattttggccaggctggtctcaaactcctgacttcaagtgatctgcctgccttggcctcccaaagtgttgggattacaggcgtgagccaccgcacccagtcccaaaatattttagtgtgttcagttttaatgttttccaagaacatactaaaacaagatacaaataaacaatttaatgcatgagactttgggaaattatgtatttctcttccattctgcccagtacattcttacaatgagaaactgcagaatgcagcatggctttgtgcatttggatatgtgtgtcattcattgaatgacattcaacaagtttttttcagtgcctactaactatgtgctaggtgctgttaaaattcagtgtgaggccagacatggtggctcacacctgtaatcccagcactttgaggggaagaagctgagtagatcacttgagctcaggagttctagactaccctgggcaacatggcgaaaccccatctctacaaaaaataaaaaaattagctgggcatggtgatgcgcacctgtagtcccagctactcaggaggctgaagcaggaggatcactcgagcccaggaggttgaggctgtagtgagccatgatcataccactgcaccatgatcttgccactgcactccagcctgggtgacagagcaagacctcatctcaaaaaaaaaaaaaaattcagcgtggtagtcctaggagctcttttccacttctcctgcaaagcaaggagaaggaaagcagctaatcctcatatgtgataacaggaggtcagaccagactcaagttgtaaaatcaactgtggtagtctctacatattattttgaaatgtagaggtaaatctcagaagaaatagcacaaagagacaaaagtgattgccttcagcagccaggtaactaccatttctgttgtaagactttttagccctcactattttgctcttaaaaacaagtacttatatattactttgataagataaaaaataaaaatttttaagagcataactagttctatcagagggttagcattatctttagagtttttggtagagagggaacttcctgatggaactctcctgtcctgcaaagggtaatgttcactaacttttacttggcttatctttaggggcctgaagttaggtccataaatgttaacattatgggagatgggaagatgggagtaggggagattttgcctcagcagattcccagcccaaatcctgaaagttgcagaggattttaattgttagtgatgatagatgacaaatacaacaaaaattagctggaaaagtgggaagattgttgaggaatagtgcattgacagactacaaaaaaaattacatctactatataattagctatactttacatatactgataaagaaaaatacataccttcctaatggaaaaatctggtgctgaccaacataatcaagtgatcactcgtaaatttgtaaatagtgaggcagcctagtatgtttcttgatgggcagcaatgttgacccttgaacaacacaggtttgaacagtgcaggtccatttatatgtggattttcttccacctctgccacccctgagatagtaaggccagccccttcttctcttccttcttctcaacctacttgacataagatgacatggatgaagacctttatgattatccacttccacttaatgaatagtaaatgtattttcttttccttatgattttcttaacattttttctctagcttactttattgtaaaaatacagtatataatacttatacaaaatatgtgttaatcaactacgttatcagtgaggcttctggtcaacagcaggctattattatttaaattttgaggagttggccgggtgcggtggctcacgcctgtaatcccagcactttgggaggctgaggcaggcagataacgaggtcaggagatcgagaccatcctggctaacacggtgaaaccccacctctactaaaaatacaaaaattagctgggcatgggggtgggtacctgtagtcccagctactcaggaggctgagggaggagaatggcgtgaacccaggaagtggagcttgcagtgagccaagatcgcgccactgcactccagactgggcgacagagcgagactccatctcaaaagaaaaaaacaagttttgaggagtcaaaagttccatgtagagctggatgcggtggcacatacccatagtcccagccttgcgggagaatgaggcaggaggatcacttgagctcaggagttcgagtgcagcctgggcaacatagtgagaccccatctcaaaaaaaaaaaaaagagttatacatgaatttgtggctgctcaggaagtcagcgcccctaacacctacattgttcaagtgtcaactgtacacagtgtcaccagtgaaatcttcttttcaagaacatttagcctgaatcttagcaagccttacacagtttataggaaataaaggggtgtcttcattcatttgaactgctgtaacaaagcaccttgggctggctggcttataaacaacagaaatgtatttctcacagggctgaagactgggaagcctgagatcagggcactggcaaatttggtatttggtgaaggcttgctttctggttcataaatgatgcctgtcgcagtgtccttatatggtggaaagagcaaggcagctctctgaggcctctcccataaggacaatgaatcctgtttgtgagagctctgccttcatgacctatcacctcccaatcgcccacctcctagaaccatcacactggtaattaggtttcaccatatgaatttgggggttagaggacgcaaacattcagaccatagcaaggggctagcagaatatgttagaagttaacgtaaacaaccaaatcttgaatgtgggcccttctgtaagacaactgtcctgcaaaatgcaaaatacaaccttattggatcctggttaggagaaagaaatagcttctattaaaacattttttaatacaacaaaggcaaaacaaattattattattatttttgagacagagtcttgctctgttgcccagactggagtgcaatggcatgatctcggctcactgcaacctccgcctcctgggttcaaacgattcttctgcctcagcctcccaagtagctgggattataggcatgcaccaccacactcagccaagttttgtatttttagtagagacggagtttcaccatattggtcagggtggtcttgaactcctgaccttaggtgatccacccatcttggcctcccaaaatgctgggattacaggcatgagtcaccgtgcctggccgcaaaataaatttttaaaacaaattgagaatattgaatatagattaaatatgtaataacattatgaaaaaaaatcatataaaagccctagttttatcttactttctttgacagcataaaaaaaaaaccaaagaccacacaagccatatcttggtgacatcttacaccatcatatcaaaattcttggcatttctgcccccttagctgtcttctcacaccctgttcgtagagtgatgagggagtagcttctagctctgctccttactaggctgctgaaatttcctgggcaagccatcttcctctcatagcttcattttcttggtaagataaaacaattatactagccccctgaggactatgttcggagtgagttctagtatgacttcataaacttgaaaggactacacaaatgagatgttgcaagcccgtttctcttcctggctctgtgcttcctgaaccctatggctagaggggagcatggatccccttcttgacttgctctgtcataaacatgatcttaaacgtgaacatgctcactattctaccttcaaggaaaggtcagcctaatgtagggaacaagcacttctgatcctttctcacctgactgtgctgatacacaagctctttggctagtgacagtcacctggccagccttggaggatgttactgggactgctgtctcttgactttgatgaggaaaacagttctgtgctcaaaaaaggaagagtgggggtccaggcatggtgactcatgcctgtaatcccagcactttgggaggctgaggcaggagaatcatttgagcccaggagtttgagaccagcctgggcaacatagtgagaccccatctctacaaaaaatgtaaaaattagctgggcgtggcagtgtgcacctgtcctgactacttgggaggctgaagtgggaggattgcttgagcccaggaggtcgaggctgcagtgagccatgatggcaccactgcactccagcctgggcaacagagcaagaccctgtctcaaaaaaaagaaaaaaaaaagagaagagtagagttggcatgatttttgcataggaaacaacaaccaaaccagataattgaggacaaaaacaatcttctttgtgatctgagtaattttttccttatatagtataaattatgcatataatcgccaacttctgttttgttctgagctatctggacctcatttcagcaaccgatgcctaaaagttttcctctggaaaagtgcatcttatgttaccaactgtatttgtatattaatatatttcttgaaattgtacttcagttctttgaattatttatctctgaatgggggctatagagcaattccaagtgagcagctaacatacttgtttaaatgaaaaaaaaaccaaatacctctctattctacccataaatagatatgttgtataatttgaggaaagatttctaaatacaaccacaaagtgagaggatcttaaggagtaaggaggcttgatggaggtagaagaaaatattttggctgggcgcagtggctcacaactgtaatcccagcactttgggaggctgaggtgggcagatcacctgaggtcaggagtttgagaccagcctgaccaacatagtgaaaccctatctctactaaaaatacaaaattagccagcgtggtggtgcatacctgtattctcagctacttgggaggctgaggcaggagaatcgcttgaacccgggaggcggaggttacagcgagccaaggtcacactattgtactccagcctgggcaacaagagcaaaactccatctcaaaaactatatatatatatgtatttcatgaccaccaagctatgataaatatctttcagatataataaaaaataattagcattcatttaaagcttactatatgctaaatatttgtttactataagtgccatatggtcagtattgcatttaatgctcctaacaatcctccttgccttcccatttcaccaatgaagaaactgagtcttaaagagataattttcctaagaccaacatgatgaggaggctgagtagagaatttgttttcaggtagcaacttcagacccaaactcttaactgtgacactgcagccatctttctatcagagctgcttatctcctcctgagggaaacattctatcagttatcctctccacagtgaagtgggagtttgaggaatcttagcacaaacttttattggcttatgttatgtagcatgagtaaagctatggatttaactcttgaaacatttccatcttttaatgtgaaaaacaccatcttaaacaaaaccagggaggttcatgatgtacacacaatataatccctgattaacttgactaggtggaatgagtctatgttgtactgatcacagttgattttcttctcacaccgcctagaatgcccactgggagagatatcaagtattctccaggacattagattgtaattaaaggcagtgttccactgtttctttaactttctctgaagtccaaaatcaaaaccagaaccctagcatacttgacatttctttcagtcttgtgcattaataaaacttttttcttgttgctttgtcaggaatacatttaagaaggcacaaaggactctttaaaaaaacttaatgcataaatatgtgacttttcaaaatacaaaaatgactgactttataaacctaactctaaagcttttaattaataactgattacaaatagtgattgctgagatttctagaaaaataggaaattttggatggaaagccatcataagaattgtgctcataacaagacagcagctgtcttattcaaagacattgctctctatttcagggtaaaatagaaggtctcagtaatataagaacacagataaagtttctggttgtattacttttttttttttttttgagacagagtctcgctctgtcacccaggctggagtgcagtggcatgatctcagctcactgcaagctctgcctcccaggttcatgccattctcctgcctcagcctcccgagtagctgggactacaggcgcccacccccacgcccggctaattttttgtattttttagtagagacagggtttcaccgtgttagccaggatggtctcgatctcctgacctcgtgatccacccgcctcggcctcccaaaatgctgggattacaggcgtgagccaccgtgcccagccagattgtattacttttgtgaatattttaatcattttctaacttcaagacagaactttgacgttcaagtttttgtactttcaggatactattcagcattccttcagctatcaaattacattatattttccagctatttcttaaattatttgatgtatgctatattaaaatttaaaattcattttaaatctgctaaacagaattacttcccatgtttttttcttgaagttgagctagcatagctaccactctctaacttttgggaaatctaaggcaataaatggttagataaaagacctaatgtctttaaaaaagaaacaagaaactgtatttatgtgtcacattgcagcaatttgcaacaaactgcatcatatataatgcacttaaagataggaaaacttacttcccttgtatccctacactgtgtggtccctaattagggatgtgaagagcaataatatgtggttctgtgtcttaatgagcttaaaatctaattaggaagacaaaaaagatacacatcaaactattagggcattaaaccatatggtattaactctagtagaagttcagagaagggaaaaagaatgatgagctagaatcttgatactccatgctcgggacatggagtgatcctctgaccggtagcagttctgttgttcagagtttattagtattgtaaaatgtcaacacttccacccccgcacccctaccttctgtatcagaatcagcattttaacagcatctccaggtgaatgctatgcacatttaagtttgagaaatgctgagtcagaacaatacaagcactgtgtttttgaccccagatcactatccaacagaaccttctgcaatgatggagaccatctatttttttttgctgcctagtatgaagctactagctgttgagcaacttgataggtagctagtgaagctgaggaactggattcttatttctaaatctaaatttaaatagccacatggacctaatggctactatattggacaatgaaagagaagaaagagcactggatatatatatttagagacagggtctccctatgttgcccaggttggtctcgaattcctgagctcaatcgatcctgtctcctcaacctcccaaagtgctgggaatacagatgtgagccacacccagccaggagcactagattaagagtcaagagatttaatacttctcccaacagacactctttggatgaccttgggaaagtgtttttaacttccctttgcctcagttttgttatctataggtgataggtttcattgcattatgtcattgttttatttcagtattactgttacacgattgtttggttgaaagaatgcttctttgaacaagtgagtcctgagatggacatgccattttgggagtgtatcttgggcagagtccccaaagcacaggaagggataaaagttgaatttaccaagtagtggttccacaaaggaggagagcgtagtttgctaatcagcacatatgaaatattcagaaaatgtcttgttttccactaaatctccaaggcttcaatcactgtctggtacacagtaaacactcattaaatatttgttgaatgattgaatcaaagtgatggttaaatattcagtaaaacagagttggtattcaagcctgtttgatatggtcaatattactgcgttttgtttggtttgggtttttgttccctggcagatttgtttaagaatagtctcagatgaccaggcatggtggctcatgcctataataccagcactttgggagacagaggcaggatggtcgcttgagcccaggagttcgagaccagcctgggcaacatggcaagaccctgtctctccaaaaaaaatttttttttaaattagctgagcatggtggtgcacacctgtggtcccagctactccagaggctgaggcagaaggatcacttgagctcaggaggttgaggctacattgatgaactgtgatgaatcatgaaccatgattatagtactacactccagcctgggtgacagagtaagaccctgtctcaaaaaaaaaaaagtctctacttaggccccaggtaaagcaaaacagataatttattaggcatatttgtgttgagtgaggtgttttaatttagcaacacctaaataggatctttatgttgaaatttttgtaaatgtaagaatcaagaggagccaaaacaactctataggtggattacatgtagttttaccaaagagttaatttaagagcattgctaattataatatgtatacgtaccagtaaccctcccaaagatggataaaatttgccattatatgaacatgaaacttaatgagtcctcatagcaaatggagcaaaaactatgcacaccaagtgaagaaaagctcttcaagatgaaagggtggacaagagggatgggaagaggtaggagaagacagtgatgggctcaggggctattcaggcatcagatgacccaaagaaagtggcagcatcttgcccaggtgagcagagttcaggaactcagaaatgagaaacttctacacataagttcagggagtcagatgagagagctgttagaactaagcagtgtagcaggaaccaaagaaaaagtccaggtctgaagactgggacacaaaagaatataggaaaccataccccaggagcccttggttagtttcaggacacgggactgtgagttcaggaaggcagctaatgtccaactccgctgaagagggagctggatggagaattgatctgaggaaacaggaattggttggaaggagaaatcagctggaggatctaggggtggtgaaaaccaggaaaagctcccagacctaacattagtttgcatcaccaagaggcatttttaatgttggccctgttttgtggtgtccctccttacattctatccccagtttcctggattaatttctttctttagcatcttcatttctggaaatagacaaaagtccccttggagtccctcagttccagtgtctaagtctttctgcccataattgctactactacagatgctgatcttttcatcttttccattctctttatcttttggcttttgcacatttgagcgtttcatcacactgttcagtgggtgatatttctgtgcagaccagagaaccaagacttttcttttactcgggtgttgctttgaatgtactgtgttagtttgtgggtaaattatgatgtgagtgtaccagcctgtgcttccttcctttgccctctagagtagctgatgaactccaagggggaaagggactatctcttgttcattatcatattcctacacctagcacagatcgtcatatacattaaacaaccaataactatttattgactcctggctgtttatatctatatttattttcttttatttcttttctttctttcttgttaaatagacaggttctcactctgttgcccaggctggagtgcagtggcacaatcatagcttactgcagcctcaaactattgggctcaagcaatcctcctgcctcgacctccccaatagctgggactagagggtgtgtaaccatatccagcttgcacctgcatttcagagttctgcttcctactctgttggctgcctgcccctaaggaagagcaaactcattctaaccactgggattctcaaacaattttctcaatggtcataaaatttaggatctttctgaccacctttctgctattttggctaacactggcctttgttgaccctcatatcagtttcctctatactgactctgatccacaccaggtctgttctgtttgaaaaatccaactcaaaatagcttctctgagaaaaggaaatgtgttggttcattcagttgaaaagtccaggactaaatcttgtgctagcgtggtggaatctatatgttttgtgattcctaaggactgtcatctcttcttcttcagcatgtctttctcttgtgctggcttcattgtcaggcaatattgtccaagatggagcaggtgtgcacaccagcagctgtaagtttgtatcttcctcaataattcaggaaagttccagaattgagctgatgtgccatcagtcatataccatatctgaaccagttactggccatgggtatggaatgttccagttggctaggtttacagggtcatgtgtcccaccctaaacccgagggtgggttctgccccaccaaaactgtcacaaactgagagtggatgagagatggtgtcccagagaaaaattatttttattagagaaaaggaaaataaatgtcaggaagtcaaaaaccatacatatctactgcagcacactatacatattttctttgtccttactccatggctttagacaagaatgatttgtattttgttcataggtaggtttatctttctaggaaaataaatctgtttctttggggttttttttagtatcccctttcaaaaaactgttccttttcccaccattgtgggggtaatgaacatctgggtgtaacacttggaagtagagactctgccaaagagaggaagagtcctgactccagagtcagcagatccctgctctgcccttttcaaggcatgctgccttagacaaattattaacctcttgcttaatatctatctcaaagggctactgtagagaattaacccattcttatgtgtaaagttcttagcatgtgtctagctcatcaaaagtgcttaatgcattttacctattgcttctgttgttaatgataataataatagccacagctcacacactgttgctggcccctgtgctggatgcccaaggctgaaatagctctggcatcctcccactcccttatcatagtccagccaacactggcctgcccttttggaattcacccgagtccccatccaccctggaccagtacccgcacctctgcaggaagatgcttattcccattcttcctggcgggctctcatctctaagggctcatcttcagtggagattgtccattgtcaatggagaggactttcctgaccccttctgcatccggatctgctcttttctttctttctttcttcatcttttcctttattgccctgaccaccatctgtaattatctacatgtttttgagtgcttctattactgaccgtaagccctactttatacaataagtaggagttttgatcattatttctcaataaaataaatctaggtcaaatatttcctgggcctacttgacagtaataggaacctttttgaggatacaatgaggaatgtcagaatagctagacagtgcagagctagtgatgggggaatattgagagaaaatgttgaaaaggaaattgggctagttttgtcgttaggggcgtttttgtgtgggaggggagttgtgagggcacaagatgaagagtgtcagaagaacaaggcctctgctgtgtgaagtgagtgccatgcgtgtgacattcctttctgttttgttttacttttcagagtaaatttagtctatatttagcatctttgccaatttatgtattttctctctctctctctttattttttgtggggtatggcagtacaaggaggtgttggtcacgttgcctatttattatacaattcccccaagcactttggcaactttataaataatgaccatttatgactgttgtctagacttaacaaatggttatttaacaggcaatgaaataattttcccacagttcttatactatatttacacacaccacttttaaggagcaaatgttagggcttgtgctcaaaatgtaagtcttgttcacagcagtgaattattctctatggacaatgaaattagtactcactggtatgaaacgcagaacaaagacaagtacagtaatttttcagggataaggttcttggagttgaatgtttaagtcatcataaatctaatcagtgctgattggaaaatattaaataacataacgattcattaacttcacaataatatagatttattgtcaaacgggtaaaaaatacagaaaaaaaaaaaagaagaaaaaaaaatctatccccagaataacatggtaaacattttggtatatacccttctaggtttttttctcttattcatggatttttaaagcatacaattagaaatatactgtacttatgtcatgatctatttttaaattttaatatctcattaatgattttctagatctaagccttatctatagctacactatttaatactgtaaccactagcaacatgggctgttgagcactagaattgtggctagtctgaattgagatgtgctgtaagtgcaaaaaacacaccagattccaaacacaatttttttttttttttttgagacggagtctcactctcgcccaggctggagtgcagtgacacgatctcggctcactgcaagctccgcctcccgggttcacaccattctcctgcctcagcctcccgagtagctgggactacaggcgcccgccacagcgtgcggctaattttttgtatttttagtagagacggggtttcaccgtgttagccaggatggtctcgatctcctgacctcgtgatccgcccgcctcagcctcccaaagtgctgggattacaggcgtgagccaccgcgcccggccggaacaagaaacacatttttaaaaagtaaaatatctcattactaatttttatattgattacatgttgaaatatttcaaataagttgagctaaataaaatatattaacgaaattaatttcactcgttactttttactttttctaatgtgcttactagaaaatttaaagttacaaatgtcagtcatattctatttctgttagacaacactggtctatagttttatagctgcataattttctattatgtgagtaaaattatttgaccggttcttaaccaccatcttgttgaatcctcaagatacttcttattttttagtattaaaaattactcattgaccacctgtacatagagatgttttttacatatctctgattgtttccttaggatttactgttagaagtagaattgctaggaaaatgaaaattgttatttctttctttatttattttttgaggcagagtcttgctgtgtgggccaggctggagtgcagtggcacagttatggctcactgcagcctcaacctcccaggctcaagcgatcgtttccacttcagcctttcaagtagctgggactacaggtacatgccaccatgcccggctaatttatttatttatttttttggtagagatgaagtcaccctatgttgcccagactgctcttgaactcctgggttcaagcgatcttcccacttcggcctcctaaagtactgagattacaagcataagttaccatacctgggcaaaaatttttaaatgagaaataatgttataaataaatgaagaaagtaaaaaataatgctctttctcttcattattcaattatctttctctagaaagagagtatcattctgatcattagcagttgttcattttacagtgaatcaaaagcaccatttcagctgtattcaaattaattaatggtagctaccattaagttgtttttgaaaagtcaactctgagttgtcctgttttatgtgaattacgaagtattaaagattggagctcaatgttatcctttctcctgaattaaactacacaccttttagtttattgattgcacacaattatgaaatggaaaagattaacagtaggcatatttttaagcctttctgaattatctttgtaatactacgatggaggaaaggtgtaggcaaaggagttgtgagcctaagagatcatttatcagaggtccagaatatttgatctgttatctgtgtgaatgtataacctaacattttaacactattattgtacaataaaaacaaagccttggccaggcgcggtggctcacgcctgtaatcccagcactttgggaggccgaggcgggtggatcacaaggtcaggagatcgagaccatcctggctaacacggtgaaaccccgactctactaaaatactaaaaaattagctgggcgtggtggcgggcacctgtagtcccagctactcaggaggctgaggcaggagaatggcgtgaacctgggaggcggagcttgcagtgagccgagatcgtgccactgtactccagcctgggagacagagcgagactccgtcaaaaaaaaaaaaaaaaaaaaaaagcccttaacatctttagcaatagggcaataccacatgaacaaggttgtacttttcttataaaattaatctgatggctgggcacggtggcttatgcctgtaatcccagcattttgggaggccgaagcaggtaggtcacctgatgccagaagttcgagaccagcctggccaacatggtgaaacagggtttcaccatgttttacaggtgccgggcacctgtaatctcagctacttgggaggctaaggcaggagaattgctggaacccgggaggcagaggttgcagtgagctgagatcatgccattgcactctagcctgggctgacaacagtgagactctgctcaaaaaaaaaaaaaaaaaaaaaaattatttgataaaatacactgactttttgcctaaaatggccaagagagcctctgtaaaaccttcctttgtgtctttcttagaatttttgcattttgtacttttctctaatgtctttgggattcatagaaaaaatgttgggaacctttaggagttgctgaactctcatatcccctgagtagtattaaagaaaatgctgattcaagaaatcgagcttacgtttgatgaggcaatatagtgttattgaggatttagtggactgaacagtgacttgaatataatttagggggaatgttttatggcatttctagagtataaaatgaagagtttccagttcaccattagtgtttcatatgaaataaaaaattacattgtctgccagtggaagaagaagaaataaaaatctataatttaatccaacttgaaaattcttccttataggccgggcgcagtggcttatgcctgtaatcccagcaccttgagaggccgaggcaggcggatcacttgaggtcaggagttcaagaccaacctggccaacatggtgaaaccccgtctgtactaaaaatacaaaaattagccaggaatggtggcatgtgcctgtaatcccagctactcgggaggctgaggtgggagaattgcttgaacctggggtggaggttgcagtggccaagatagtgccactgcactccagcctggatgacagagtgagacgccaccaaaaaaaaaaaaaggaaggaaggaagaaaggaaggaaggaaaagagaaaagaaaattcttcctttttcctttttttttgataaggtctcactctgttgtccaggctggaatatagtgagtggagcaatcttggctcattgcttcttgggttcaagcaattctcgtgcctcagcctcctgaatagctgggattataggcatgcgcaaccatacctggctaattttttgtatttttagtagagatggcgttttaccacgttggccaggctggtctcaaactcctggtctcaagtgatctgcctgccttggcctcccaaagtgctgggattacaggcatgagccactgcaccggccttcttaacttttgatctaaagaatttgaaaaatcaaccctgccctcactaagcaaaactgtaagcaggattgtctgtaagaatcacatttctatcctttggcattttaaacaagagaactaatattttattttgtataaacaatagcaaagcataagctaacttgactcttctgtctcccaagaaagtagacaaacagctgccattctggcagttagaagtactaaaatttattttaaaggctattcatttatatttcttttaccctgtctacataattaatagcttagtttaattctattttaaacttttgccatctgcaggattgctatacagtggtgacatcaagtcccataggaacatgtttgagtaattaagactacagaaaaggcttccagaacaacattttgattacaaataaaattcaaaataaaatatctagttttgaaggactaggtatttttcctaattaaaaaacaactgaaagcctgtcatttacttagtataattttgtaagtgtttccatgtgtaatgccacagagctaaaagtctaagtctgatacatccattcataaaaaaataaaaaataaaaacagtagagggacaggggccattttcaagggagccttcccttagccggtggtggcttagaggcaaagagtcatcttttggtttccatatgaagaattatttgaggtgctacaaggattattttctaactagtatgatagagaagctgtgtagtctgttttaaaaattaaatggtacagttcatttacatgtttgttgtctagcttacacatacatgttatatatgtgattatttttctttatttcattcagtcagtggatattttttgagcattgactgtgaggatatccagtggagtctcacaaactggcatattctgaacatttctaattacatcaacttctgcctgattgacagaatatgaaaaattctgatggttcacatgtttaatacaaacatttaactcctttataacttattgaacttacctatttaataagctaatatttttaaagcaataatgttttattatgaaatgacatttaaaggcagatgtaaacctatgctgtaatttttaggttgtttttattaaaatgaagacttcttgcaaatgttgtttttctcaaaattaagagctctccttaaacacgattttatttatatatttatttttgcttcagtaagacttccataaaaagttagtttttcgggctgggctcagtggctcaagcctattatcccagcactttgcaaggccgaggtgggaggatcacttgagcccaggagttcgagagcagtctgggcaacatgatgaaacctcatgtctacaaaacagttagccaggtatggtggtgcacaactgtagtctcagttactttggaggctgaggtgggagggccagttgagcccgggaggcagaggttgcagtgaactgtgatcttgccactgccctccaaccttgctgacagagcaatactctgtctcaaataagtaagttaaatacataaagaagataaagaaggttagctttaccatgtaaattttatgatgtttgcattttattttatttatttgccttatggctaaaagatagtatataaaactttggagatatatatatatatatatatatatatatatatatatatatatatatatatatatattataaagagtatatataaactccagttggtagcccctatttaatagattacttatcattacatacggatctcagatagctgcccattcttcccaatatcagtgcttcttgatcatgtcttatttaaagaattttttttcttttaattcctaacattttactctccattttataaatgaagaaatcagggcacagagggatttagaagatgcatgtaattctgagacccagcccaccactttgttcacttcctgcttaacaaattgaatggacaagcatttgttaagtaccctctctgtgccaggcatatgccatgtcttgatgggctcccagtaaagtctgagtaattggccttgtcatgaaatgggacttctagcagtgcttcatctcattgcctgctaagtggatttttgagttgcatcttgacttccatgctggaaggagaaaaggaagcagttttcctatagaatacacacctttaggctgggcggggatggtagctcatgcctgtaatcccagcactttgagaggccaaggcaggcacatcacttgaggttaggagttcaaggccagcctggccaacatggcaaaaccccttctctactaaaaatacaaaaattagccaggtatggtggagcgcacctgtagtcccagctactcaggaggctgagacaggagaatcacttgaacctgggaggcagagattgcagtgagccgagattgtgccactgcactccatccggggctacagagtgagactccgtcccaaaaaaaaaaaaaaaaaaaaaagaggaaaaaaaaaaagaaagcacactcttaaattgtacccttttccactgacaccatctgacttcttcacttctcctttatcaactgctctagtcatatgaatgtgtggcgatagtgctggtccacagtgtgacattgggcacatcaccttggacaagccccactcaccgtcacccctatatcattcaagcagcatacatagtctcttgattccatctggtaattctcccttgaatctaagcccttgtttcatcctattgccatgctagagacatcatcatcatcatcgtcgtcatcattattttacatttttctaactgatctttctgcctcagcctctttcagcactcctctaagcattttttttttttttttggcttagaggagtgtttttaagggggaacagtggccatggtcactgttccaaaaggcaattctgctcatgacctgactgtgctaaaatgtgtaccacttctcatcagtgttcacatgcaaggccctctgcaaactggtcccagtcggctcctccaggactctctatccaatttccccatgtgcactctcagccacacagaacctctcaccactctcaaggcagaaaagctgctgggtacatcttccccactcctaagtgacacttccatcacttttttgcactgtgtattactattcactttccagctccagatcagatgtcctctgtgaagtttctcttaattcccccaaacaaacctcaacctctgcccccgccaactcctcagcattttcttcaaacctcattcatacctccattctgtaacttattgcatcagcatacaagcatacagttgtccctctcccctaccaggttgtaaagcttttcaaatacagcatttaaaaaaaaaagaaaaaagatttttgttactctaaggtctagaaaagtgccaagaaatacccatgaatcgtgaatgcacctctggcctgagtttttgcctacacattctaccggctgagcttaatccacttcagaggtttcattaagatacagccactttagcttcacaatgaatacattagcattttgtaatcctagagcactctgctccatgtttccaaacacgtaagatcccttaattctgttttcaacagaagacagctcaaatgccctatattaccttcttggaaagaggcattcatctcctctttgtcttttgcaatggattttggtccattgatcataatgacatatgacatctatttcaacacttagtatgtggcaaacatggtgctttgtatgtattatcacttttactgcctacatcaacaacattatgatgtaggtggttctgttccctcagttttggagaacaggaaatggaggcacagaaagatgacataactagtctgaggatgtagggaaaaaaaaaaaaaagcaaacaaagctgcttttgctattctctcactcacaacaatcaatacagaagacttctgggacctctggtcaccaggaagtgtgtggaaatttctccctgccaacaaccagtcaatcagttctgcagtggccaccagctgcagaattgtcctcgaattcaattcaattctgacactcctgctacctggagagaacagcagatcccataggttaagggctcaggcccacaggacttctttccccactttcaaggccagtagcaagccccaagttgttttacctgtgcttctgactgaccagctctatattggggttccctcgaccctctccttgggtttgactaatttgttagtactggctcgcagaactcaggaaaagactgacttacttttatcagtacatttgtataaaggatatcacaaaggatcaagatgaagagatgcacagggcaaggcacctgcaaaggagaatggagcttcgatgctctactgcccttcaggaacctccatgtgttcagctatcgggaaactctctgaacccagtccttttgagcttttatcattatgtaggtatgattgattaaatttactaagttggtgaaaccccttccccagtggctggggagtgtggctcaaagttctaactctctgatcctgccttggtctttccagtgaccagcctagaagctgaagctacccagcggctgccagctagcagtcatctcattagcatacaaaaaagactatcatgttggaatcatgtgaaatcacgttggacattccaaggattttaggagttgtgtgccaggaaacctggacaaagaccaactatacatttcacgatgtcagaacgagtaagtggcaaagctggcaccaaggctggatgactccagaattcgtgtccttaaccactatgcctcactatcttccaaaaaaacaaatattctaaagacaatcataactgatatacagggatttttaaataaatgtaaatatttaaacagtgatttgccgggtgtggtggcttacacctgtaatcccagcactttgggaggccgaggctggtggttcatgaggtcaggagttcaagaccaacctggccaagatggtgaacccccatctctactaaaaatacaaaaattagccgggtgcggtggcaggcacctgtaatcccagctactcaggaggctggcaggagaatcgcttgaacccagggggtggtggttgcagtgagccaagatcgcgccactgcactccagcctgggtgacagagtgagacttcatctcaaaaataaaataaaataaaaatacagtgattattaccaacaatttttaccctgtggtttaattttggtcctttgattatttcaggtcctttgattatttcaggaaaactttaaatctaccattggattagtaggaaaaatattctgaaaaaacaatcaagattacatagctaaaatgtagatgcttggacttactgtccttttatttttctataatatgcagtgcttcaagacagccttgattgttataatcaaatattgtatacaaaacaacactttgtagagctgctggcttgtacatgtgcttgctgtttcaaattacctgtattgcacaggccattttaatggaaagaaaattagcttaaagataggaagtgccttattagctcagtaaagccatggtctgttcaattaaagtgttaacaaatatttcagaggaaagaatgtttagggtcataaatgaattcaacacagttgttcctaagcacttactatttacctgggaatgtgtactgtgtttggtgctttgaagataaatgttatttacaaaacacctagctaataaaaccttgcttcagaatgctgtgtttgacatcaaagatctttatactgaactttatggttgacaaggtttaatttcatttaagtatgggataggagagtcttactggataagtctgtatatagatataagtgacaggtatccaaatcacctgttctgactgtgtttatagctgcatttccacctgtactgtataatgtgacccagattttttaccctttaatgcacccatatggctcttatttgtaactgtgcatctgttaagccatctgaaatactgagtttgcatgtctgtgaaaattcattgctgctaccagtcttccttctttcctttcttggtcgtttgaagactcaagagaagtagttaatatcagtctattctttcaaaccacaaactttggaaacagatgcactagtgtgaaaaagtttgttgacataactgcaagatggcctctttgtgaaaagaccagttccctatgtcttgttcagaattcaagagttgcccctatgtaaacttggctgcagaaaaattcagaaaatgagcatcttggttaaccttttaatgcttattccaagtttaaaggagattaagaaacaaaaaattggctggacgcggtggcttacgcctgtaatcccagcactttgggaggccaaggcgggcggatcatgaggtcaggagttcgagaccatcctggctaacacagtgaaaccccgtctctactaaaaataaaatacaaaaaaattagcctggcatggtggcaggtgcctgtaatcccagctacttgggagtttgaggcaggagaatggtgtgaacccaggaggcggtggttgcagtgagccgagatcgtgccactgcactccagcctgggcgacagagcgggactccatctcaaaaaaaaaaaaaaaaatatgttagaatcacctttcaactaacatgaactgctttgggacatgggtagtctttataattaaagtgactaaggataaaatgcatggcacaaaacttgctttcttcatgagagtccactaaaaattcctagatccctaaagatcaaatttatgtaatatatccactttaaaaataactgccaattttccgctttaaaaaagattctatttgctaatggaaaaaacaaaactttgtctagccaccaaagtaataaaacttatttgatgcaatggtgcatttctcatagcaaagtgccacataggatactaaggaaaagtacgttaatgtgaccaaggcccacacacagccaatgtacacagatctcattttccaatttttagagtattttaaaactctgtgttaaacttatttaagcaagatacattttcatataaatatatttttatataatttagaaaccagatttgatctggttctcttgcaaatggacaatagtcattcacttctgcatcattctagttgtataagcatggtagaaaatagccctaaaacccctgatttcagacaagcatgatgtgtgcctatagtcccagctactgagtagactgagtgggaggattgcttgagcccaggagtttgagacgagtgtgggtaacgtagatgctgtctcttacaaaaaagttaaggccaggtatggtagctcacacctgtaataccagcactttgggaggctgaggcgggtggatcacctgaggtctggtgttcgagaccagcctggccaacatggtgaaaccccgcctctactaaaaatacaaaaattagttgggcatggtggcatgtgcctataatcccagctactcgggaggttgagacaggagaatcacttgaacccgcgaggtggagcttgcagtgagccgagatcgtgccactgcactctagcctgggcaacaagagcgaaactctgtcaaaaaaaaaaaaaaagaagttaaacacacacacacacacacacacacacacacacacacacacaccaaaaacaaacaaactgatttcacttgaaatatttagataactaaaaccaaaagcaaattaagtcgttctaagaggagtggtttcactcttcactattgctttatgtagacatgttcttcacatgagacattcttaatgctgggagaactgggacagattagaagaaggtggcttgttctcggttttaactggttagttaatttctactgttaatggctttttttttttgagacaaggtctcactctgtcacccaagctggagtgcagtggtgcaatctcagctcactgccacctccacctagcaggcttaagcgatccccccgacctcagcctccagagtagctgggactataggcacatgccaccatgccaggctaatttttgtaatttttgtagagacagggtttcaccaggttgcccaggctggtctgaaactcctaggctcaagtgatcctcccacctcggcctcccaaagtgctgggattacaggtatgagccactgcagtaggtctattaactgcttttaactgtattgtattcgtaaccattttcaaacacagttaaaggtattttcctttatctactaaatatataattagtaaagaaatacaatgtttctcaaaataatgtcttaaagtttttgccactattctttggactttcaattatataatcaatatttacattaataaaatataaattgcctacagagactctaaggtatgtcttcttttattttattttattttttttaagacggggtcttgtgctatcacccaggctggagtgcagtgcagtggcgcaatcttggctcactgcaacctccgcctcccaggttcaagccattctcctgcctcaacctcctgagtagttgggattacaggcgtgcaccagcatgcccaactaatttttgtatttttggtagagatggggtttcaccatgttggccaggctgatctcgtactcctgacctcaagtgatctgcccgcctcagcctcccaaaatactgggattataggcgtgagccaccacgcctggctaaggtatgtctttaacatatttatccctctgtcaatagatgtgagcacagactctcacatcatgacatatctgattaaaatggacacattttgacatttctttaaagcttgcattcagactgtaacatttgcaacacctcactgtattgctagccaaccaaatctaatcaacagtttgacgccctgcctaaattaaagaacattttaaaagttaaaaatttgtttgaagtgtaagtgtatttgggggttaatgtagataacacataaagtgaagcctcaatcaaattaaaacaatataatagactgtttggcaatgagcttgttcacagtaactccccactgtgcaaagctctgtctatgcagcatctcatttaatccccatcgcaactcagtgcagtaaattttgcatttccattgcatagttgaggaaaatgagattaagggagaatgaaatgtcttgccccaaatcacaaagttagtaaatgggagagtcatattctgtctcagggctgtctacctccaaagtccactacctgttaatattattctcatttgcattgaccaccacggtcttacatctttcttttccacattttaggttatgctggaaaagcacagagaaatttagtcgcagtgtgtattagggactcacctgttctccagtggagattacatataactatcccacatccaccacagatctggtggcctggataatttatcatccaaacctggacacttgagagggtgctttttaccagaaaaagaggcacaaactaggattttccagagcagaatggaacatataagattaccccatataaagcagtggtctcagggaaggcatgccttatcagaacttgtatggagggggttgaaataccccatcctgggctaccgttaaaacactcaaagccatcaagtgcaatggctcgcatctgtaggccaaactactctggaggctgaggtgggaggatggcttgaggctaggagttcagggctgtgctgagccatgatcttaccactatactccagcctgggctacagaatgagaccccatctctaacaacaacaacaaatactcaaagtcacaggtcagatttctgctttgctttcaagctacccagcctcagcccaccccttttagccactccttctagaagtgtttcctcacctaccccatcactggtctagaattatgaagagcatttgtgtaagcattcatccacctgtgaattaaccaaaagaataggccattttactaaccatttattaatattcagtctccaagatcagagaaggggtcggagttgatcaaatatgttgaggcacaaaagtctggattatctcctgcatctggtaaagtctaaagctggtgctgaaaattcagtaaagccaggtacggtggctcatgcctataatcccggcactttgggaggccgaggcgcatggatcccctgaggttaggagtttgagaccagcctggccaacatggtgaaaccccatctctactaaaaacacaaaattagccgggcatggtggcacacatctattatcccagctactcgggaggccgaggcaggagaatcacttgaacccaggaggtagaggttgcagtgagcagagattgcgccattgcactccagactgggtgacaagagcaacacaccatctcaaaaaaaaaaaaaaaaaaaaggaaaaaaaggaaaggaaattcagtaaagcaacactgtggagggaacaggtagttccctaaataatgccacctaagaattcttcatgttgaacacatttttcagcattacagatggtaacgattactacttgagggtcatgtgccaagagagaagtaatgtaacccttctttgcaacatttcaggtctgactctcctaaataaaactgagaattaatcaattctcaagccatggtgcatttcatttttacttcctccaataaactggaaagtgtacctgatagtggcattataaccatgttataacatttacacttcttaaatctaattaataagtgtaatttgcagtttatcagaaggctatagggatattattgctagtgttttgagaaatataagctgtattactcctgcaccaatcagtaggtattgccaaataaatttcaaggtcatgtaactgaacattaatattgaacacagtttagttttaaattacaatgggattaaatttcatcttacaacttctatgtagataaattcaataatgttttagttttaaggttggaagacagatgcaagggggacaaacataggaaaattaaggatcattgagctatttttaacactttcaaatttaggttggcagctgttgttagtgtcaggacttaaataactttgctttgttaaaaaataaattcacaacatatgaatttcagcatgttgtgaatttattgtttgtgcttattagggaaagatacttcagttgaaaaaataagaaattctccagggtataaaaaaaccatccttgttagtagacaagtgatcatagtcttatcaagacatccatcctcagccggttgttgtggcttatgcctgtaaccccagcactttggaaggctgaggcagaaggattgcttgagtccaggagttcaagaccagcctgggcaacatgttgaaaccccatctctacaaaaattttaaaaatcagctggggatggtggtgcatgcctgtgtttccagctacgcaggaggctgaggcagtaggatcaccctgggtgacagagtaagacctgtttcaaaaaaaaaaaaaatcctcagaaacttctgatcttcttaatttaaccaacttttacagtaaaaccagtcttcttgctaatgaaatgaaggaattgcattagactgggtcttaaattcttaaattatgttatctttggaattataaacccaggcctgggagagacattctgagaccttttaattcccccttcaaactcgataaatgcatgcctatctagtgtggagaaagaaacccatctattatacagaaaaaaaaatctttcagactaccaaaggaaatacccccacttttcttgttaagtacccagttaattatttaaagacacatttgctttttatcaactgaaattcctctcctctccctttagactagggacctcaagggttgtagggtgtccttaaagccaggaggaggcaataaggctggtacagtatttgaggatggccttaaagaccagcctgtggaaaaactgatctaggaacccctggttaaagatggcagactgggccaggtgcggtggctcaagcctgtaataccagcactttgggaagccaagatgggcggatcacgaggtcaggagatcaagaccatcctggctaacacggtgaaaccccatctctactaaaaatacaaaaaactagctgggcgtggtggcgggcgcctgtagtcccagctactcaggaggctgaggcaggagaatggcatgaacctgggaggcagaggttgcagtgagctgagatcatgccactgcactccaacctgggctacagagcaagactctgtctcaaaaaaaaaaaaaaaaaaaaaaaatggcagactgagtacacacatttagttctgtccccttgcaaaatttcattaaagtgacagtaaaagtatttttaaaaaagaagtaacccacaaagatgaataaaatgggaaagaagaaaataacaaaactttggaatctgaaaacaggataattagcagctaatttaggagactcaaagaggcagatcctaatctggaagtacagattgagaagcaagttgagaagcaatctgagttattccctagaacttccaaaaggctcaagaaggtttatcctttgtcaagggtggaacagaggttctctacactatgaaacacaggcacagttgagggagagggtacctaaacaaaaccaaaagaatcaggtaacagacctcaacttggctgccacatcattcagccaggtatcacccaccccataggcaggagatgggaaaagtattatctgaagaatctggttagccaaaggcaaggggtggggagagggggtgtgggtgcatgcggtgagaacaaagctaagaattctgactttgggggtttcccaaggaaacggcccaacctagatcatcttagtctagatgacagagtcaaaaacctccctttccctgtcctcatcctcccaaacacagacagatggcttccagtagctttttagtatctcactattaaatatgaacaggtagatgaggatgaacagagagagagaaacaaagataataacagttaaaacagatacaaaggagaacacttaaaatatacatatcattgatattgtctgagaaagaagagataccctgtaaacaagaacaggatgctacaaaaaaggaaccttcatggacacaggaactcttggatattaaaaatatgaaagaagaagccaggcacggtggctcacgcctgtaataccagcactttgggaggccgaggcaggcggatcacgaggtcaggagatcgagaccatcctggctaacatgattgaaccccgtctctactaaaaaatacaaaaacttagccaggcgtggtggtgggcacctgtagtcccagctactcgggaggctgaggcaggagaatggcatgaacccgggaggtggggcttgcagtgagccgagattgcaccactgcactccagcctgagcgacagagcgagactctgtctcaaaaaaaaaagtgaaagaagaaatggaaggccatttgctagaagtcttggaagctacagtataggaaattgcctagaaagtaaaaacaccaaagaaatgcaaaatcggagagaaaagatgagaaaatttgaagtccagtccagggatccagtatctaaatagcaggagaaaaatggaagaaagaatgtcatcaaataaataattacagaaaatttcctgaacagaaggacatgaatttctggatttaaaggcttaccaagtactgtgtacagtgtttgaaagtagattcataccaatgtacatcatcaggtaattttagaatactggaacataaaaggtaggttctacagccttttagagaggaagaaaacaagttctcatgtgaaggatgaaaatcataatggcaatactggaagccagaggatagcagagcagaaccctcaaagttctaaagagaaatcagttttagcttagaattcaggagtccaccaaagtatcatttgaggttaagtatagaaaaatatattttcagatatgtaagctttcaacaattttaccttccatgaaaaggtacatgggatagagtgtgggtagaagttaacagataatgccttaggggctgggcacggtggctcacgtctgtaatccccagcactttgggagacgggtggatcacccgaggtcaggagttcgagaccagcctggccaacttggtgaaactccgtctctactaaatacaaaaattagtcgggcgtggtggcagacacctgtaatcccagctacttgggaggctgaggcaggagaatcgcttgaacctgggaggcgaaggttgcagtgagccaggatggcaccattgcactccagcctgggcaataagagcgaaattccatctcaaaaaaaaaaaaaaaatagataatgccttagagccaagtgtggtggctcatgcctatgcctataatcccagcagtttgggaggccaaggtgggcggatcacttgaggacaggagttggaaactagcccgcccaacatgatgcaaacccatctccactgaaaaatagaaaagttagtcaggcgtggtggcttgcacccaggtactcaggaagctaaggcaggaaaattccttgaacctgggaggcggaagttgcagtgccaagatcatgccaccgcactcctacctggggacagagcaagactccatctcaaaaaatatagatagatagatagatagatagatagatagatagatagatagatagatagagcgagccttaaaaaaagttagagtagtaagatcagtatgttatctagagaaatggagataaatactaaaagaatcaactaacagaggggaagcagaaaagggaagaaactgagaactgctgtttctcaaaacaagccttttaggactgtttggtttttaaacgatgtgcttgtataattgtaaaaaaaaattaggtttaaaaaagaaaaaatggaataggtcacgaggggcaaacaaactttcttttcatttttgtttgataataaggatctttcaatctgacaagccctttgacagcatataatggataagtgttcagatttaattttagctcatcagcctttgagtttcccaaggtgtttctgttggtctgcatgcattagtgaaatcattcttttgtagcagtaattaagttatatttagataactatttcttatggggacactgacaagagatccacaggaaaaacaaaaaaaaagatgatgatctttcttcttccactgaagaaccatgagataagagaactagcaggtggaggtttaatcattttctgacacacaagcatacacagaggaaagtatgaaatgcagaaaataaaaggattttaaatcccagaatagaagacatagtttcagttgctgcaactgaaactaattgtttttattagctcattaatgtttcatgatttggggatgtatttgtataccatactgttggactattttattgcaatgatgatgcctcaaaggattttgaaaagcaccaaatgaattttgagatggttatagtcttggggctattgcatgtactaaactgaatagcttcctaatatacaatgagattgtatccatgttttattgtataatatcttttttgttgttgttttttggaggcagagtttcactcttgtcgcccaggctggagtgcaatagtgcaatcttggctcactgtaacctccgcctcctgggttcaagcagttctcctgcctcagcttcccaagtagctgggattacaagcatgcaccaccacgcctggctaattttttgtatttttagtagagacgaggtttcaccatgttggccaggctggtctcaaaaccctggcctcaagtgatctacctgccttggccttccaaagtgctgggattgcaggttatataataggctgcacccagcctattatataataattttttaaaggagacaccaaaactttaaaaagagagagacataggggacagcattgaagatatgtaaatagagggagtagacagtgaattaattaagggcaaagagcagctcttattcatttttttttttccagcccaacagcatcttgctatgttgcccaggctggaatgcagcagctattcacgggcattatcatagcacgctgcagcctagaactcctggattcaagcacttcttctgcctcagcctcctgagtagctgggactacaagagtgcccagctgtattcatttaacaaatattaattgagtacctactatgcaccaggtattggagctacatcagtgaacaaaatggatagagatccttacctatgtagagcttgcattctagtggggtgggaggtgaagaaagggaccaaacaaaatgatgacagcctgggctgcggtggctcacccctgtaatcccagtgctttgggatgccgaggggggcggatcacctgaagtcaggagttcgacaccagcctgaccaacatggtgaaaccccctttctactaaaaatacaaaaattagccaggcatggtggcaggcgcctgtaatgttactcgggaggttgaggcaagagaattgcttgaacccaggaggtgaaggctgcagtgagccaagatggtgccattgcactccagcctaggcaacaagagtgaaactacatataaaaataacaataataataataataataataatgccttagggcaaagtgggctctaaggcattgggatgccatcttggattttcatagcttgagaagagaagtcaatgcctgacttccaaacttcaaaagagaggctgactctctagttagggccaaaatcagccgaacgtggtggcacatgcctgtaatgccagctgcttgggaggctgaggcaagagaatcatttgaacccgggaggcagaggttgcagtgagccgagatcacaccactgcactccagcctgggcaacagagtgagactccatcccccacaaaaaacaaaatgattacatacaatacatactatgtcagatagaaatcagtgctatgaagataaataactcaggaaagagagatgaagaatgtggaatagggagagggcaggggatacagttttaaataaggtagacacataataggcacactaaaatgcttgctgaaattattacttgataaaaacacaatgtccagctgggcacggtgcctcatgcctgtaatccccgcactttgggaggccaaggcgggtggatcgcttttaaggtcagcagttcaagaccagcctgtccaacatggtgaaaccctgtctctacaaaaaatacaaaaaaaattagctgggcatggtgccgcacacctgtagtcccagctactcaggaggctgaggcacaagaattgcttgaacctgggaggcagaggttgcagtgaactaagatcacgccactgcactccatcctgggtgacagagcaagattctgtctccaaaaaaaccaaaacacatatctgtccatatctggaaactttgtctgaaccctatcttttttttttgtaatgggaccatcctttggggcattcaggcacatcactggagctgaagcaaggacaagaacctggaaagaactagggaaggttgcttgaatagcacaaccccagaggggtagaatgatggtgtaaggggagtcagatgcagatcacggcctcacagtcctcacagtccattagtccttagcaaagccaagctctttgcaaaatacaaaagattccctataataatgggagactgtttccttgttttttcaagcattctttgcatcctagaaatgtacagagcacaatatctagctttgagaagtaaagaaaacctttcaagtaaacctttgttccagaagagatcaagctgttccctattcatcccctgcttccagcatctaggtggctgggtttcttggaaataatactctttatacatgtctctaatacacatctccaagcaagggctaggaaaactcaagggtaagccttcaataattttcacagacattggatttccatacccccctctcctgtggaacctgatttgggaaagtaggttttcatttttaattttcagggaagttaaacaaacaaggccaatggatcagagcacccaccacaaggccagaccctcagaggaaattcaataaatactactttctgttaatctcatacctggaggctttctctttgcatcctgcaagccagtatagtcttttattcttatttttatccacatctgcaaaattcatgtggacacctgcagattactctgggttatctgcagacatacttctttctttccctctctctaattacgtgctaaggatgcagcccctgaagctcaacttccatttctccagcagtctcctcacccttgtagaataatgagaccctgtcttttgagagtgcagtgtttaaagtaaatggtgtttaaactgaagtttccctctggttttattggtaaagacagaatccttgactgccctgcaggcacagtgcccttgactcttctggctggttttattgtgggagagctgttggaacctgtgtgtaaacatcacagtgaggggcacacccagggcatcccctgtgctgggcctgcttcttttgaagtgtctggtgattgtaccattgtcatgccagttggaggagtccttttgttttacaatggcaaagctctgaagagccagctgataagacttgggaccctggtgtgaaactgaccctttgaactaggaagaaccttttcagataagcaagccttggcatttttatcacacaactttttattagagcttttaacagagcaggttagtgtccttactaggcacatacataaaggtttttcaagctcttccgtaataacacagacataggacatagcctccatttttacgaagatgcaaaccttccaattgcccatctcaataaagatctttgggaaaatagcatcaattttgggaattcattgatagttattcattaaaaaagattaattataccaggaataaaatacaaatgaaagccaattaaaaacctttaaaaaaaaagttatgctttctcccttaaaaatgctctttgtttgtttgtttttcaaaatttaatcaagacagggtcttgctatgttgcccaggttggtcctcaaactcctggccttaagcagttctcccaccttggcctcccaaagtgctgggattgcccacataagccactgtgcccagactttaaaaattgtcttaatagccgagcacagtggctcacacctgtaatcccagcactttgggaggcagaggcgggtggatcacaagatcaggagatcaagaccatcctggctaacatggtgaaaccccatctctactaaaaatacaaaaaattagccgggcctggtggcgggcgcctgtagtcccagctactcaggaagctgaggcaggagaatggcgtgaacccaggaggcggagcttgcagtgagcagagatggcgccactgcactccagcctgggcgacagagggagactccgtctcaaaaaataaaaaaattgtcttaataatcttttttttttttgagacagagtctcgctctgtcacccaggctggagtgcagtggcatgatcttggctcactgcagtctccaccttgcgggttcaagcaattctcctgcatcagcctcctgagtagctaggattccaagtgtgtgccaacattcctggctaatttttgtattcttagtagagacagggtttcaccatgttggccaggctggtctcgaactcctggcctcatgatccgcctgcctcagccttccaaagtgctgggattacaggtgtgagccacctcgccgggccatgattttgataatcttttggacaaattgacatgagctatttcttagtaaaggccattagtagagcagtaagtagaaaaatatagtaagtggtagtcttatattattattattattgttattaaggacgaggtcttgctatgttgcccaagctggtcattcagtcattcaggtactcaacaaacctttgtccagttccttctatgtgttgctgcactgagcatggtgctctggttctccatcctccaaagtcgtcccacccagcagagaccacagacatcaaacagacaactaaaataaagggtgagcagaataaggcagggaagtgatggtgctgtgggagcatcctttttgatatggaaagacccttggaacttaattctggagtgtgctttaaaggaagaattttattttcctttttcaatagttctttgagagtttccatgttttatattcaattttgctttccaacttttccttcatgttagcctaaatgcgtctctaggcagtttcccaaaatagaattttccatttcagactaaggaactacagatgagatcgagaatttagggtaaatgccttagcacttgcatttgaagtttaatactgtctaaaccccacggagacaaaaagtccttgtgtggctgctcagactgtcaggcccatcaccggctgtggtctcctctgcgagtacagggcccagaagactggcaggctgctgttctcaaaggaaccacatgcaattgtttctacttcatcactctggggtggagcaacaggttctaaaatagcttttgggtttaaactggcccctatatatacaactgacctttattcctagggtttataaactgaaggaatcagagaattataggatttcatagccaaaagaacttagagatcatctgccgctgtgtagatgagaaactgaggtccccagggtaaaggtcttctagccagttagtggtagaagcagaactacagtgacaagccctgttcgtctccattccagaatcagaatagagcgccacaatctccaagcaccctgaaagtgcatccctctccccttcttcctttccactgcttctggtacctgtctgcccacctgtgtctaaagccaggcaattttgaaatactttctatgtgttcaacctaaagcaaatttcttttcatatatatatgtattttttcttttacctctaagaaataaagctatttatgaagcagttccttatcaatgagtcctgttgatgaattttacatttctaatttggtgtatgttatatacccgtgtataaaacagttgagcccagaccaataaatgttatcctgagaactgcagtagggatttacagatttattaccacttgccttctttttttcttaaacagtagctcacttgtgagaattacattgcacataatgttcaggcctacttgaattttaagccaaaaaagtttaaagtaatggtataggatattctaataggaagggatgttgtgctaaggttattgccgatataataaagctcctagtgccttgaagcagtatgagcgtggaggatcctttataaaaaatacttagtctaaggccaacatttcaccccctttcccttttcctgttcccccctccttctcaaagccacattctctattctttccattttccactagagcccttataaaagaattatcttttcatgagttcttaaaaatataaaaatggtatctaaatcgccattgaaatatatgttcactattgcttgtttgtgtagttaacttttataaaaccccaaaaagggcaaattgatggattaatccaaatgagattgacatcgttgcattttatatcctgataaaatcacacaggaacaggagctataatcttatactgtgtatcctccaatatgtgtttatcttattctctggctaatgaggaaaaattaacattgtcaatactgcgattgaagctggagataagcttatgtctagtctatcacatgactgactatagtcatcttctgtttctctgcattaaatcaacacagatgctttggctttataaatgtcagtcaacatcatttaggctctgccgcctgctcagtgcaatgcaaccttcattgactgtatgatggggaatggaggttagttcctccagaagaattcttccttacaataatgtgatcataacagctcaaaaaaaagttcttccatataataaatcagaagactgagcaagtgaaaagctatagaactggtgcaaggagaaaggaataatgttacaacagagaggagcaagagatacaattgtgaacagatggaatcatttgtcagtggtcactttagggcaaataacaagttgtggtgtcccagtgagttagggtatgtttagttcaaaagggttcaaaaccctttccatcttttgtctgtaagagtcattgttttaattgtttttctgctttgtctacacaacttgatctgcttagtattttcagtaactatcccctatcccccaaatgacacgtgatctgcctgctatgtgtcagtccgtgtgccggaacactaatgaacactcagaacgcagggagacagcagctgcccagcagccttcaagtttcaacagccctacccagaaggacagcagttaatttacatccaggggagcagcactcacctcaaaagcttcatgaacatacagcttttgcataagaaatgtgttgaaattgcagaaactatgcataattaaaattaagccttgcatgtcccccaaataatgggtttagatattagatgatgaaatggccttgatttctatatttctcattttgtttttctaacccctcctacaaacattttagagaaaccataatattcaaaggttttgtggctcaaaaccagtaccacaagctatgccaaaagaacatggccaggtgcggtggctcacacctgtaatcccaacactttaggaggtcgaggcgggtagatcacaaggtcagaagttcaagaccagcctggccaagatggtgaaacaccgtctctactaaaaatacaaaaattagccgggcatggtggtgggtacctataatcccagctgctcagggctgaggtagagagttgcttgaacccgggaggcagagattgcagtgagccaagatcgtgccactgcactccagcctgggcgacagagtgagactgtctcaaaaaaaaaaaaaaaaaaaaaaaaaaaagaacactattgagctgggcgcggtggctcacgtctgtaatcccaacactttgggaggccgaggtgggtgggtcacctggggtcaggagttcaagaccacactggccaacatggtgaaacctcatctctattaaaaatgcaaaaattagctgggagtggtggtgggtgcctataatcccagccacttaggaggcagaggcagaagaatcgcttgaacccaggaggcagagttttcagtgaacccagatcacgccattgcactgcagcctaggcaacagagagagactccatctcaaaaaaaaaaaaaaagaaagaaagaaaaaagaacattttttacttatataattaatgaagttaactttcatttgagaaagacatcttagctcagatgggtcaaatccctaaaatcacttccccttcggaacttttcataaaagtcctgagagtcactcagcaacatgggtgcttgatacgcaaccttgaagactttgcgatgtccgggtagaatttcgccttaaccaactaatgaatgaaaacttaaaataactttttgttcttattccacaacgttaccacttttttaggagagctggtaaccaaagtgaatgatgtctgtagaccagtagttcctacacctaggtacaaattgcagttatctatggagactacattaaatgcaaatttctggatcctaattcagagttactgagtcaaaatctgtagggatatgattgaggcttctgtgtagtttaagaggctttccaggtgattcttacattgccagtccactcagcatcaattgctgttggagcacaactaacaaatgcaacctgggccgggctcagtggcttacacctgtaatcccagtattttgggaggctgaggcaggtggataacctgaggtcaggagtttcagaccagcctgaccaatatagtgaaaccctatctctactaaaaatacaaaaattagctggacatggtggtgcgtgcctgtagtcacacctactctggaggctgagacaggagaattgcttgaatccagaaggcagaggttgcagtgagccgagatcacaccactgcactccagcctgggcaacagagtgagactctgtctcaaaacaaaaacaaaaacaaaaaaacaaaggcaacctaattcccatgcatcatatctaatagcaagtgctgttgccttattctacaaatagaatgttttaatccatttaaatgacatttttagaatacctgtggaggacaaaactgttccacctttgctgaattactggcctccagcccaaacactcacacaaatccagatccatctacccacacagatacatggccaaggggtggaccctttgcaatcataatggatcctaaccccagaactgtgaagtagccgtgtttttgttgttttttgttttttgttttttgagatggagtctcactctgttgcccaggctggagtgcagtggcacagtctaggctcactgcaacctccacctcctgggttcaagtgattctcctgcctcagcctccgagtagctgggtctacaggtgcccgccaccacgctcggctaatttttgtatttttagtagagaccgggtttcatcatgttggtcaggctgatctcaaacccctgacctggtgatccacccgccttagcctcccaaagtgctagattacaggcatgagtgaccgtgcccagctaagtgaccatgttttaaccttacagaacaatgagccataaagtcctgtctgtctgcaacgagagaaaaataaagtgttaaaccagaaattagcagagacaggaatggagaaagaatgctgtctaaatgtccgggggttttccatttctgaattatagccattttttgaagctcagctgcattcccgcccttgtgttagcctgagacacctctgtatccttccaatgaattattgcccctcaccattttccccctaagttactttggtttctgttacttacagccacagagcactaactaatacaaatctcattcagcagtttcaacaaaactcattttacatcaacagtagctccctcatacacctactaagcttgggtgctgcaaaaggagagaagcaacacatttgtagagtcagttccagagcaacgctagttccgtgcagatttttctgcccactaaatgtgctttttggaggcaggtattctttgattccccagtcagagtattttccttaaagtcacttgaattataactaagcagtttccctgtactctgcccaccaaatattcctgagtaagaagtttcttttcttggcaccatgcccaggactcacatccaggagtggtgcctctgagccttttctggcctctattttcagaaatctgcaatcaactgctaacatcccctgcttgttacgggtcctcacgttttatgatacagaattttcctcagacctcgctcttcttcatatctcattttcctcccttttttaaaccatccacagagttgatattctggtatcatttagaacttctaaaatccacatatgatttttgtgaggaagtgggtttttgattctgtttttttgccacagacctagaatttaagctaaagttggtctcaaaccacttttccccaagaattccctttgctacttaactaaataaccagaacccgctttttgaattataggcagattcatgatgggaggacactgggaggaatttcgggagattacaggaacctcaggtgtgacctagcattcatccctttattaagtgagttggaaaaggtataaagaaggtgaggaggtaaatcagattcccatagctgagaattaccccaatggctagggatattcatatatgaattatttttgtgcattcacccttctatgactataagactcagaagagaaatcagctttcttaatttttactttagtgctttccttagaacaagtattgaagtcagtggctcttgtttgttttgtgtgtgtatgttacactgaagagctcaaatagaccatctctcatgatcattctgtaaggtctgtgttcttttctcagtagttactttagttaagatttgtattgtgatagtctattttgggaaaattccggggattttagtgtgtcttaatttctttactacccagcactgcaaagaatctatccccttgtgtacaatgagtgtgcgggaagtctggacatgctcatcccaggtgggagtaactaagcccaggactttactagataagtaacaggtgtgaaatgttgtcaaaaggctcttctctttgacagctgaattgagccataaaatttttaaataatttatgcaagtctgcaggagcccagatatagattgttaatccaaggctcagaatgcacaagtgttgatttcacagtgaaatgcttaaaagttaatttttgtattgcgtctcttatctttggcctaggtgaaaatattcagattgccccacaagtccaaattgatttagtaaactattacccatggacttaacatgttctgtttgttcttaagtagaatcagagtttatcgtaatcatatgtttccgtttacattttaaaatattacaagatggccaagaccagggttaagaaacctttaaaacatctttaatttcagcttaactgcaagtttgcatactcttcttggaagctggatttttcctcctcaaaaagagagaagcaaagcaacatgtggtttgttacattcgttgctcttcttagcctgttttgcattaggaggttatggaaacctaaaactgaaagctccataaagaaaaaccttacagggaaggaaagaaatagagaaaaaaagacatctaagactcggccctttcccgcgtctgctctgaaaatacattccagtgtaaaatgtgcatccttggtagttgaaagtagaaaggagaagagaataaatattttttttaaaaaaccacacaagccagacatggtggttcatgcttgtaaccccaacactttgagaggccaaggcaggaagattgcttgagcctacaagttcaagatcagcctgggcaagacagtgagacacctgtctctacaaaaaaaatacaaaaattagccaggcatggtgatgtgtgctcatggtcccagccacttgggaggctgaggcaggaagattgcttgagcccaggagtttgaggctgcagtgagctttgatcgtgccactgcactccaacttggacaacagaatgagaccctgtctcaaaaaaaaagaaaagaaaagaaaagaaaaacaaatatatatctatatatatatatgtaggtatatatatataggtgtgtatatatatagaggtatatgtataggtgtgtgtatatatataggtgtgtgtgtatatatgtataggtgtgtgtgtgtatatatatataggtgtatatacatatatacctataaagtactccggttaagtaggccttgtatttacccttctgagacaaaacacaaacagaaaactataaatgtccattcattccaggccattctgtaaattaactgtcacacctattgacgggcttctagaagtagcatggcaaaagtcccagcccaccttcttcgaattgctcctagcagtgttgatggcaacagtgagtgttttcctcacaagcacagaaaatttgcagtacagataatgcactagcagttgtcttgaattatttttccccttataattccactattaattaaatttgttatttatatagcatcagcatcataatgcctggatgtttcaaggatcccaaatatttatgtgtgtgatcatcatatttattctccctaagaaatctcttaattaggcatgagaaactgaatgacaagcatttttctgtagtagattttaatttgcctgactgtatgggggaaaaaaaagccacttcatgaaagatattcgtaggaatcagttgcatgttagggaaggtcattttaaaggttactggaaaggcaagaagatgatcataaatgttgcttgtataggaatttgctctcctcttttcttttcttttttttttttttttttttttgagatggagtcttactctgttaccaggctggagtgcagtggcacgatcttggctcactacaacctccccttcccgggttcaagcgattctcctacctcagcctcctgagtagctgggactacaggcacgcgcctccatgcccagctaatttttgtatttttacaaaatacaaaacatggggtttcaccatgttggccaggatggtctcaatctcttgacctcatgatctgcctgcctcatcctcccaaagtgctgtgattacaagcatgagccaccgcacccggccttgctctcttcttttatgttttgagcggtggctccatttacagagattgtctagccatatcattggattctttcaaaaaacctttagactgttcagatccttaaaatgtgatgtcataaaatgatttcctaaatcatacttttagtcttcattaaatcgctcccaccaaacccacttttccaataggtagaagcatttcagagattgctggaatcttgttagaatttcttgaaagaaaagctgataagttcagaaatggttgaccatggaaatgtgatctagtctattataaaagtaacaatgtactcagctgtctttaattggaactagagtttgtgttaagtaaaaatgtttggtcttcagcagaaagtagattgtctttacaagcccatgtgatacgagttctaatagtctcctattatttgagctcatctgcaataaatttttgtttggggacatattgttagaattgcccagatatgctgctagaaagaatattaattctattgcttttttttcatttgttgaaactgaaagattttagtaaaaaaaaaaaaagaaaattaatgaaaaatgtattatagtgctatgagttgagctataatcaattttgtctgaaaagtttgttaatggctgcattacttcattgccttcaggatatcatgtgagatacgttcagtagaatgcgttacacacaaactaacaactgaaccatgctcatggtctctcttttgttcagcataatctgcatttaagtggaagaggtgatggttgggttgctgaactcatccaagagtgctgtctttgactaagtgcttagtacgtactgatactggtaatgcctaataggcaacagagcaactattatataaagatcttcaaatacaggctagttttgttgtatttggacaataaaatgattttgtatctatagaaattaagatggtacaatgaactgcttcagaaagctcagggtgtcatttgtctgattatctccagggttggtgtgtgtgttggagggtcccctatgttttggcctttgtgctgtataactctttggtccgaaaggccagcaaagccaaaatattgtcattgagctcccctaaatgagactgacaatcattgcttcatttctggctgaaataatatggtattaaaaatttctaggccgtggatgggcacggtggctcatgcctgtaatcccagccctttgggaggccaaggcaggtggatcacttgaggtcaggagtccgagaccagcctggccaacatggtgaaaactcatctctactaaaaaaaataaaaataagaataaaaaactacaaaaattagccaggcatggtggcaggcccttgtaattccagctaattgggagactgaggcaggagaatcgcttgaacccgggaggcagaggttgcagtgagccaagatcagtccactgcactccagcgtgggcaacagagcaagactctgtctcaaataaataaataaataaatttctaggccagacacggtggctcatacctgtaatcccagcactttgggaggccgtggtggatggatcacctgaggtcaggagttcaagaccagcctggccaacatggtgaaacctcgtctctactaaaaatacaaaaatgagccgggtgtggtggcatgtgcttatagtcccagctactcaggaggctgaggtaggagaattgcttgaacctgggaggtggaggctacagtcagctgagatcgtaccactgcactccagcctgggcaacagagcaagactctaaaaaaaaaaaaaaaattctagatttattctacttacattcttgtgatgctgccaagagaaaagccaggaaaagcaaagcatattattttgctatttataggaagctctactttaaaaacaaatagtcatttagagcatcagctttggtgtcagaccaaggtttgaatataggctccttcccaaattacctgataactttatacaatttatcttacttttctcctttgtaaaatgggaaaataagatccaccttatgttgttataaggatttttttttaaatgtacatgatttagtacaatgcctagcatatgagtactccataagttatagcaggtataataatgagagaggttcatttggcactattgtgttcttactcaatctatcaccaaagataaagtagtgacatcacactgtatgtgaaaaatgactcagaattctaatacatacttgagttctcatgctgttagttttgggactgatggagagttctggagcagtgagagctcagtgtggaagcccttggtctgatggggcttcagggaacatttcctggatccatcctgaacaaagtcttgaagtaagagttaggttaacaaaagcaagtgattagatggctccaagtagaagaaacagcagaatgaaacatatgggtggaaactaccagttctacagcctgaaagtgaggtctgactaatgatggagacagagctagaggatcagtagggactggaaatggacgggcttctttgtaaagagtcttaattttatctcacgaaggttttggaaaaactgaagaagggattttgttttttaatttaaatagagacaaggtttcatcctattgtccaggttggtctcgatctcctgggctcaaacaatcctcctgcctcagcctctgaaagtgctggaattacaggcatgagccaccatgcctggcccgcagaagagattttaaaagaaaatgagaccaagcacagtggctcacacctgtaatcccaacactttgggaggccaaggtgggaggatggcttgaggccaggagttcgataccaggctagacaacatggcaaaaccccatctccactaaaaatacaaaaaattaaccagggtggtgacacacacctatagtcccagctactcagcagggccggggtgggagaatcacttgagctcaggaggtcgaggctgcagtgagccatgatcgcaccaccgcattctagcctgggtgacagagcaagaccctgtctccaaaaaaaaaaaaagagagagagaaaagaaaaaaagaaaatgagactaggcatggaggctcacactataatcccaacactttgggaggctgatgctagagatcgcttgaggctaagagttaagagttcaagatgagcctgaacaacatagtgagacccatctctattagaaataaataaataaataataattttttaaaagagaatggcatcattagatttgtggtgtccagtgaagaatgaacatagggatgggcagacctgagggagtgagttaggctgcggtcgtgtccagggtggggacatgggcaggcagcagccgtaggagtagggaggaaagataccagcatgcttcgttttactgcacactgctgtatcatgcttcacagatactgcgttgtggcaatcctgtgtcaagcaagtctaccagcaccatttattctgacaccatgtgctcacttcgtgtctctgtgtcacattttgataattctagcaatatttcaaactgcttcattatttttatatctgtgatagtgatctgtgatcagtgacctttgatgttactattttaattgttttggggcaccatgaactgtgcccatataagatggcaaatttaatcgaattttttttttttttttttttgagatggagtctcgctgtcacccaggctggagtgcagtggcacgatcttggctcaccgcaagctctgcctcccgggttcacgccattcgcccacctcagcctcccgagtagctgggactacaggcacccaccaccacgccctgctaattttgtttttgtatttttagtagagacagggtttcaccgtgttagccaggatgatcttgatctcctgacctcgtgatccgcccgccctggcctcccaaagtgctggaattacaggcgtgagccaccacgcccggccatcgataaatgttttgtgtgttctgactactctcccagatggcctttccctcatctttctcctcctccttggctttccctatcctctgagacatagcaatattgcaattgggccagttaatatccctacagtggcctgtgtgttcaagtgaaaggaagaggcacacatctctcactttcaatcaaaagctagaaatgattaagcttagtgagtaagacatgttaaaagctgagagaggccaaaagctagtcctcttgtgccaaaccagctagccaagttgtgactgcaaaggaatagttcttgaaggtaattaaaagtgctaatccagtgaacatgaattataagaaagtgaaacagacttattgctgatagaaagttttaatggtctgaatagaagatcaaaccagccacaacattcccctaagccaaagcctaatccagagcaaagccctaactctcttccattctacaaaggctgagagaggtgaggaagctacagaagaaaagttggaagctagcagaggttgcttcatgaggtttcaggaaagaagccatctctctaacatgaaagtgcaaggtgaagtagcgagtggtgatggagaagctgcagcaagttatctggaagatccagctaagatcactgatgaaggtggctacactaaacaacagattttcaatgcagttgagttcctatactggaagacgatgccatctaggattttcatagcttgagaggagaagttgatgcctcacttccaagttttgaaagacaggctgactctctagttaggagctgatgcagctggtgactttaagttaaagccattgctcactgaccattcaaaaaattctagggcccttaagaattatgctaaatctactctgtctgtggtcttaaatggaacaacatccatatggcttctggatgacaacatatctgtttatagcatggtttactattttaagctgaatgttgagaactactattcagaaaaaaagatttctttaaaaatattactgctcattgacaaggtacctggtcacccaggagctctgatggagatgcacaagattagtgttgctttcatgcttgcaaacacaacatccattctgcagctcatgaatcatggatggtttcatctttcaagtcttactttaaaaatacatttcttaaggctataactgccatagataatgattcctctggtggatctgggcaaagtaaactgaaaactttctgcaaaaggacttaccactccagatgccattaagaacattcatgattcgcaggaggatgttaaaatatcaacattttgaagaagtttatttcaaccctcatggaagactttgagcagttcaagacttcagtggggctgggcgcagtggctcacgcctgtaattccggcactttcggaggccgaggtgggcagattgcctgagctcaggagtttgcgaccagcctgagcaacacggtgaaaccccgtctctactaaaatacaaaaaaaaaattagcagggcgtggtggcacgtgcctgtagtcccagctactcaggaggctgaggcaggataatcacttgaacccgggaggcggaggttgcagtgagctgagattgtgccactgcacccagcctggcgacagagcgagactccatctaaaaaagaaaaaaaaaaaagaaacttcaatggaggatgtaactgcagaaatatcaagagaactggaattagaagtggaagccaggtaaggtagcttacacctgtaatttcagctacttgggaggctgaggtgagaggctcaggccaggagtttgagaccagcctgggcaacatagtgaggtgacgcaacacctctctctctctctctctttttttttttttttttttttgagacaaggtctggctttgtcacttaggctagagtatgtggtggcacaatctcagtgacctctgtctcccaggctcaagtgatcctcctgcctcagcctcccgagtagctgggactataggtgcacactaccattcctggctaatttttgttttgttttgttttgttttgtttttgtagagatgggatttcactgtgttgcccaggctgctctcgaactcttgaactcaagtaatccacccaccctaactttccaaagtgctgggattacaggcatgagcaaccacgccaaggccccatctcttaaaaaattttttttaattagccaggcatggagcacatgcctatagtcctagctacttgggaggctgatgcaggaggattgcttgagcccaggagttcaaggttgccgtgagttatggtggcgctactgcactctagccatggtgagagcaaaatcctgtcttaaaaattaaaaaaaaaaaaaaaaagtaaacctgaagatgtgactgaattgctgcaatctcataatcgaattttatcagacgaggaattgctttttttttttttttttagagacagagtctcactctgtcacccaggctggagtgcagtggcatgatctcggctcactgcaacatatgcctcccaggttcaagagattctcctgccccagcctcctgagtagctgggactacaagtgggtgccaccacgcctggctaatttttgtatttttagtagagacagggtttcaccgtgttagccaggctagtctcaaactcctgacttcaagtgatccacccgtctcagcctcccaaagtgctgagattacaggcgtgagtcaccacacctggcctgaggaattgcttcttagaaatgagcaaagaaagtggtttcttgatggaatctactcctggtgaagatgctgtgaacattgttgaaatgaccacagaggatttagaatattacataaagttagttgataaagcagcaacagagtttgggaggattgactccaattttgaaagaaattctactgcgggtaaaatgctaccaaacagcatcacatgctacagagaaatcttttgtgaaagcaagagtcaattgatgcagcaaacttcatcatttccttataagaaattgtcacaatcatcccaacctttaccaactaccatcctgatcacgcaacagccaccaacattggtggctccctccaccagcaaaaagatgatggcttactgaaggctcagatgatcattagcattttttagcagtaagatatttttaattaaggtatgtacattgtttttttagacattgtgctgttgcacactcagtagactatagtgtagtgtaaacataacttttctatgcactgggaaattacaatatttgctttattgcagtggcctggaagtgaactcacaatatctctgaagtatgcctgtacagagtcaatagttaatttttcttttttctttctttcgttctctttttttcttttcttttcttttttttttttttagacacggtcttactctgttgcccaggctggggtacagtggtgcaatcagagctcccagtagcctccaactcctgggctcagatgatcctcccacctcagcctcctgggtagctgggactgtaggcacgtgacacagtgcctagtggagaaaaatttaaaagatagaaagatctaatacgtaactgaatgatgataggcaagaaggagggtatcctgagtaaaggaggcatctgtgatgactgggtttctagtttactcagagtattagtggtctcataaacaaactgggaatagaagacgaaggacaatatttgtttggaggtagatggatcatatgatttagaaattcaggctttctaaagagatttcaagttagtcaattcgtttgaatttgtgtcagatcttttttttctggttaaccattaccctatcagatcttataagccaaaaagagcaaatgacctaaacaataaattttttgaatttttaatttttatgggtacatagacggtgtatatatttatggggtacatgagatattttgatacaggtttgcagtgcatagtaatcatatcatggagaatggagtgtccgtcacctcaagcatttatcctttgtgttacaatccagttatactcttttagttatttttaaatgtacaattattattgactatagttaccctgttgtgctattaaataataggtctcattcattcttcctaactattgagatttctttaaatatttgaattggaacattgaaactctaatgagttgactcacttttaaaaatccaaataaaaatttaaaaaaaaataaataaatggactgataattaagacttagtatgcgcaagattctgagtcaggttctgtggaggataaaatatgaacaagttagtcattcaccactccataaatatctattgagaatcccctagatgccaggtaaagtatctgctgtatctaatgtaccaggccagagtatctcagcactttggatatatcattaaacaaaacagacaagatcccttccctagtccctctataatccagcgcagactcaatgttcaagagattaaagctctccaaacataaaggagaaaataaatattaaaagtaacttggatcaaaagacagttacttactagagctgcgtgtgattcaagatcagcagaacaatttgaattccaaatcttggccctggtgcagtctaattaaagcttgtaaaccagtcttcactacaaaatcacctcctttaaattcctacagttgcagaaagggtcttggaatctcagataagataaagaaatgttatggaaagctttgctggctgttttcttcttccaggaggcttctggctgctcgaaataattctttactgacacctctctaagaacaccttggttagttatagcacatggtaacagtgttaaaagttggcatgcccagattttcccttgtggagaaccaaccatcctagttggtggagagtttaaatataaaaagaaaatacctggtgagcaaaatagttttgagcacatagttcatgaaacaaagcagcaaatattctataattttaaaatttagctgggtgtagtgcctcacgcctgtaatcacagctacttgagaggctgagatgggaggatcacttgagcctgggcggtagaggctgcagtgagctatgattgcaccactgcactccagcctaggtgacagagcaagaccctgtctctgaataaatttttttttttttatttaagatggagcaggccaggcgcggtgggtcacgcctgtaatcccagcactttgggaggccgagacaggcaggtcattaggtcaggagtttgagaccagcctgaccaatatagtgaaaacccgtctctactaaaaatacaaaaaaattagccgggcgtggcggcgggcacatgtagtcccagctgctcgagaggctgaggcaggagaatcacttgaacccggggaagtggaggttgcagtgagccaagatcatgccattttactccagcctgggtaataagagtgaaactccggctcaaaaaaaaaaaaaaaaaaagatggagcagtgtctattatttcaaagttttgtataaaaccctaactactagattgcacaccctcatttaacatactagctttccaatgacattttgatctctgcagtaggagttagttgggtagttcttccacatggattacattccaacctaaaaatcatgtgcctacttcttttataatgataggcccctgagctcttttaatgttttaattttttactttcttgaggcagagtttctctcttgtcacccaggctagagtgcaatgatgtgatctcggctcactgcaacctccacctcccaggttcaagcgattctcctggctcagcctcccgagaagctgggattacaggcacccaccaccatgcctggctagtttttgtatttttagtagaaatggggtttcaccatgttggccaggctggtcttgaactcctgacctcaggtgatccgcccacctcggcctcccaaagtgctaggattacagatgtgagctaccgcgcccggccactgagctttttaacattacatgtaaatagtgtaatatttttaaatactctattttaaaggtgaatatcaacaggaagataaagtttgagcttagaagcctggcgcagtggctcacaactgtaatcccagcactttgggaggctgaggcgggcagatcccctgaggtcaggagttcgagaccagcctggccaacatggtgaaaccttgtctttcctaaagatagaaaaagtagccaggcacggtggcgcatacctgtaatcccagctaagttacttaggaggctgagacaagaaaattgcctgaacccggaggtggaggttgtagtgagccaagatcgcaccattgcactccagcctgagtgacagagttaagactatgtctcaaaaaaataaaaataaaaaaataagtttgagcttagaaatataagtccttcagttactgtgtctcccatgggcagtgaaaaaaaatggcaattccaagtgagagcttacatcagggctaagctgttggttgtctttcaagtaaaccatggatatactgactcatttaggaatgtctgggtccctcctgccaccccttccactgcccctacccagactgtacaccccgggcagccacaagtccagtttatccaccctgagaaatcacgtcctcagacacaccgactatcttctctccccttgactactgtggcagctttgagactcttgccatctggtttctctgcagggttttctccactctccctctaattagggcataaatacgaccatgtcactcttctctgcttaagcttctgtggctccccactacccctagaataacttggcatctttctgatggcttatgcagctattcacagcctgggcctggctgcctttgggcagtctccagcctctccctcctgtgttccagctcttttggccctcaaactttgaccggctcagcctggactaggcccccttccctgtcccaaacccattccattcatcactctgatcaaatccttttagtccttaaaaatgcagctcaaatgtcaccccaccttcacggttcctgaatcttgacttcttaccgaattgacgtatcaatatttccttttattcctatattaaaatttaaccatacctcaaatattcctataatcaccatgtatcatggtttgttctgtagttctgaaaattagaccagtcatttattttcctcacttttttgtgtatttttctctgtcttctttttggaataaatcaagatacagaatatggatttagaatgcgaagtctctaagtcaagggaaaggtctaggtcgaacagtggtgcccttcaacaagtaataccctacatctcagccaaagaatctatcagtgaatccatggatggatgcatgagggatcagacagcccctgtcccactatgtctggctctatggaaatgtgggactggtgacaccctccttctcacagtattataagtaaatgcagcagagagtccactcttgaagcttgtgactgggaggaagaaagcatggagaggaagtatgcattcaggtatcttctcataccaactaatacttaaatttggaatttttttttttttttttttttttttttttagagaagtctcgctcttatcccccaggtttaagtgcaatggctcaatctggctcactgcagcctctgcttcctgggttcaatccattctcctgcctctgcctcccaagtagctgggattaagtcgtctgccaccatgcccggctaatttttgtatattttagtagagacggggtttcaccatgttggccaggctggtttcgaactcctcacctcaagtgatctgcccacctcggccttccaaagtgctgggattacaggcatgagccactgcgcccggccttaaatttggaatgttaatttctgctttcaaacttttcttccatatattaatattgtagtatattttagtatattgagaccctgtctcaaataaataaatatttatagggtctggtgacagctccagaccctatctcaaatagatagatagatacagccaggcgtggtggctcatgcctgtaatcccaacactttgggaggccgaggtgggcagatcacctgaggtcaggagttcgagaccagtctgaacaacatggagaaaccccatctctactaaaaatacaaaattagccaggcgtggttgcgcatgcctgtaatcccagctactcaggaggctgaggcaggagaatcgcttgaacctgggaggcggaggttgtggtgtgccgagattgtgccattgcactgcagcctgggcaacaagagcgaaactctgtcttaaaaaaaaaaaaaaaaaagatagattgatagagaaaaggtttacatataatgtgaaaatataaaaattcacttattttatcaatataatttttaaatgataatttcctataatctgccctcccctggaaaccatactactggtttggtatttatagtatctaaataattttgcaatgtatatgtcagcttaccaaatattacttataacaatatgattatactgtatactggggtttgcaatttaataaatgttggatatgttgccatggtacagctctctcaatatttattggaatatattttcttagtttcttaacattttggtagcttttcagtagtgaaatttaagagtgtatcaaaccacagatggacaggtgttgagagggttgcagagcctaaggtcagaacctaaagttttttattcaattaagctgaatgctagtttaattatctgttcatgaaaagtaacaaacatttcctgggttgggggaaggagtatttcagaatagttgggagtaagggttagggtgggcaaagatggcagtgtgtcttcagtagtagataacaaccctgaacaaggtcaatgaacggacctggtcctatattctcccacacaacttgggctgtggactccagacagcacagctgtaaacacctatctggtattagtgtcataatcagctattgagtctttagagacccaggaaatactagaactggtggagcttctgggagcatctagttagagagggaggtgcctgggggctgccttggaacaacaggggtgaggagagttgtgggagagtgtcaggaggaagccagtccagaacttcaacaaagcagtgacacttctgtttctatatcgagatgtttatttcattttatttatttatgttttggagacagggtatcactctgtcacctaggctggagtgtagtggcatgatctcactacaacatctgcctcctgggttcaagcaattctcttgcctcagcctcccaagtagctgggactacaggcgcccgccaccatgcccagctaatttttgtatttttagtagagatggggtttcatcatgctggccaggctggtcttgaactcctgacctcaagtgatccacccgccttggcctcccaaagtgccgggattataggtgtgggccactacgcttggccgagattttttgttttagttggaaagtggattgtgttctctcctcaaaagttctaaacattgacctaatccaaactccagcatttttagagatgaaaaacacaacaccttagagaagtgattcctcccattgtcacatagtaattgacagataatagacatttaagtctcctaacttcaaacccagtgcatcagggtactgtgaagggagagtttacctccctcacaaaggaaggagggtcagggaggggatgggtgcctaggattattggagtagtaaatctaaagagggattgggtgtagaaaacgttaaagaaccagtgctctctaatcacattgctttaaatataatcaaaggggaaagagtaattggagaccttgggaaactgcaacctattataaaactttataatgcctgttagccctaagaagagcttggtatctgccttggggcccttccctggggatgccacagacccaggtaatggtaactagaatttgcaaatgttcaatgacccaccagggtataatgaccaatcggggatacaacagaaatgtttaaaattgacaagaaagtaacacatttggcataaactttcagcagtaacaaatttggaaagaaacaaaatatcattacagtgattcctttggatattagtttcttcatctgggtaagatgtaggatcccaagggttttgtgaactctacatttgtatgattgattttgtgattcttttagatacctatctacatagtcagaacaaccaaactgctgttctggaatatgctcgcattgaaaactagaactgccaccctatttaatactacatctgccaactgcccctcaaatttaggttagatgtcatttgtgattatcagagcctttgatctctcatttctattaagaaacctgaaagacatctaatcatttaaatacattcttcctagattgctggaacttacagtagttataaatcctttcaaatgtctgataccaagagcaactaactcttacccttaaaactaaaaaggaggtctttttagaagggaaaaaatgaaggcaaggagcagaaaagacctcagggtcactatatacacaacatggaagaaccagggattagcgccaaagttggctttgtactgtgtcctttatctctttctaccagacccaacgcagctggctgacatttgacaaacaaaatgctgcctctttatttctctgcctttggcatatttctgattttctattatcctctcctccattaggacattgtagttcagcttgactttagattagaaacagacttgtacaggtatagtatacttatgagggcctgagaagaataatgtctgagaatcattcattcacttaactcatgtttattaaatttgtctgctatgtgccaggcatcattctaggtgctgagaatacagtagtgagtccccaaagtccccagcttctaggaaaggagaaagacaacgaacgataaacaaatagacatgtaaatacctggcaatgctaagtgctttgcagacaaatattgcaaatggagggagggtgatattttagttagggagttgaagccttctctgtagagatgaccttagagcaaagaccaggatggagcgagggaaccaagccctgtgaatttttgggcttcctttctcaactggcccctaaagtgtgatctgcaagcatgaatattccacctggctgaaacaaaaggatgctggttgggggccttgctctccattctgcataagttcacccttgacaataacaacccctttcagaccagactaaagtctgtttcattgagattgaacctttgtaggaagcttgcaactgtctccacactgcttcatcactaaaaacgcttacaatgggtaataaaccatgacagtacctgttgaaaatataacaaaacgtatttacaagtaactgcgttagaggaagcacatttacaatggctgacatttaatagtgataagtgctgctatagtttgtagttggaagtattttgttgcctaatgtagctgtcctttaaaagctattccaaaaagggtctgcctggcttaatgtattcacctgctgatactccctttatcataatcatatgatatttcagagtttgatttaaatcaataattgattgcgcatttctcctataggtaggtagctgaaatcttccctgaggaagcccaaacagagtgaagtaggaaaaaggaaatctgacctaggtattcatggttaattttacagatccacagaggaaaatggtaacctttgaagtcttcccacaaatccctaaactaggcctaaggccagaagagttctatatcagaacgttttgggaatcgtcttcaaaaccggaatccatttggccaataaagagtctatttgaattacaaattgtgttgtccgaatcagtgtttccaaactagtctaccagcagagccacaacttttctgtttctgccactttaagagagtaacaaaaaaaaaaaaaaaaaaaaaaaaaaaaaacttctcagctgccttactttgtagctgagataacagaatttggccacagagtgatttacttgactgatctatttatggcaacttgtttatgtatttttaaatcacagttacaatgagctattgttcacgtgtatactgtagaaccacataggttgcaaatcaatcccaaggaatcctgatggtacaggattattttttagcttaaaaaaaaaaagataccaaaggaactggtgaccactttaaattgcttttatttactgatattttacaaattgatgaagctcttaaatattgcattttccccttcattctcttggtatttctatcaccttgtgataaggaggctatagtggaaactaaaatttgtagttcagaagagattagacctctactgatgagtactaatctatcattttttttctgggcttgctttgaggatatgttttgcttctcttgaccctttctgtagacaactgaagccaaactccactttctctcagtgtacctacaaatagctcagaaacaagattagcttcagtatgggacacttccttgtgtttgaataatgatattcacttaacctatttgtaaaaactctcagtagtgtacttgagttagtacatcgcgtgacctggctccttttctttgctgttatttactgataaaaataaatctcctgcgctaagcagtaggaatcactccgaaatgcagggaaagtcctaagagaattcatatgctaatgagcccttctaagtgagaacttgcttaaatgtgccatttgctgacatcattgttatgggcagagtggagatgatttctttaagaggtggcctttcatattctcccagcgtttcgtggcccgcgcgtgcacctgcgggagggggaagtttacataagcgtcctagggtatttgcatcttagcggcttcactcactgggctcgggagaatggagcgggcgggcggcggtaggtgctcgagccgctaggctggccaagggggtgggtaacttttcgaggaattgtgcgcgcgggacctcgtggagatcggccaggggcacggtcagcagtgacagttcctggaaagcgggcggcggcgggagcaggctgggcaggcgccgcccgcgggcgggagcggggagctgggtccggctgggatcgaagggcgggatcggcaggaaacgaaatggttactttttttttttttttttttttttttttttttttttttactgcgggctctgattacttttgaagatcgccggccccaggcgggctcccggcgctgagcggagacgagtttttctccccgcagaggaggatcctggaaggacgcggagctggggcttgggggatgcagtggcctggacgaggtgactccaacccgggggagcagagtccgtcacgccggcagggaccgagggtctctgcggagctggaggaccttttgtgggatgcctcacggctgctgaggggctgcagcgggtgaggatcgccgcgctgcgccgccagggagctcggcggggaccggccgggggggaaagtgcgtcacggcggggcgggggcgacccctcgcccgccaggcggggccagcaccgggacgcgacccgggggcgcggtccgctgcaatgtagtggggacccggtgcttgctgccccaccctgctggggtctcctccggaaatgagtgggtgcgggtgactcgtagggcacccagccctctgttccttcgggagtcctccgctcccgctccgggccgccagcctccttcagacgcagagcgggcgggcggctagtgcgcgccgagggctcaggggccggcgccgcgaggggctgcaggccgcgctcggccgctgtccgggccgcaggtgggagccgctgtctgggtcccagggctggatggcagccggcggcggggactgaacgcgggagggctgcagggtgcgcgccggcgaggggcttctcgttggaagctgagggacagacgtggggacccgtggctgctcggccccaccgtccagccgcagggcgagtgctgctccgtggaggtgacacggcgccaagagcggcgcgaggctttctgctggaggagggtaacggggaattcgaaggcgactgttctatgctggaggacaaggggcactgttctctcggggcttcgcgtcggcgccgaggaggggttcgctcgctgcctctgcgtcctgagctcggcctctggctcctggggccggggacgcagagaggggctggagccggtcgacccacggcccagggcgccccctcgcggcctaagcagcggccgccgcctggagcgcagagtttgcggggcccagggggcgccgacgcccgctctgaggcgtctctgctgctgcggcggcggggatggggacgacccaggggaccccctgcagccatcactggcagccccatcaagaattggccggctgagttttcccaaagtacggtgacatcctttccttctcgcttcctccagccccatttttaaaagctcggcctttcccgttagtctgtgtccttataagccaggctatgtgtggaatttgtttttacaactcgagtcttgtgacttctcaaacactttcttgaagtgttttctctggaaacttgtttcaaatgggtgctgtaagtttcacaaagaggagtgttgttcaggagccaacaggtgacggggcgaaacctgagtctgtgtgtacattggagtcaagtctggctgccgtttcctcgggccactgttgaaaatagaaatccaaaaaatcaatagaagactgaggagaacacgattttgagaaaatatctgcatcccccattatggaaaataatgggctcattagagcaccgccttgtgtggtgcccctcattccatggcatgcattttggattttgtctttacatactcgtgtgcggataatctgaccctagaagcgccgcgctggcggaggaccaggctttgtcgtcatgtttcctccttttgtttcttactgtcatggaatgtacttgtgcatgaaattagaatgctttgaaagagttccacatttcctcttggaaaaatggatagtttcttgaccattgggtgatgtgtgatagcccactcagctgttgggaaatgtacaagctggatggaggtttacctcgaaaatgctggacggaggtttacctggaaaatacagaaaatactaaagggcatatggcctaatgccactaattgctcgtatggaaaacttagtaaaggaatgtttcataaacaatatctcctgataacttcattatgtttttatttttcaaataagtgaaattgaattgggctttgttggcagtgactttgtctttagtagacagtaagcactgaatgccccttgagtgtgtgaaacctttaaagaaatgacagtttagtgtctcttttactggaaaattcacatctcgattgaagttaaggacatcctaaacaaggaaatgtgtatatccataagggtggtatattttgtattgtgaaaagaatggatgtgtgacatgtttctgtactgctaaattagtctgtagttaaatttaattcacctgcatatgtagtctgggagaattggagtagcttttgaatggagaacctgtgatctgcatcttccatgcactaaggccttgttaacaagcagtttaacaaagaagctgttaagcagtttgtagcccacggatggcacttagcagcaggggacacctagggaatgttggcctaactgacttcacaaatcagtatctgttctggcttttggtgatcagaggatttctaacttccctgggcatgttcacacaagaaatactttttcatagggatcttacaatgccatggtagtcttcatataggaactagagtgggattgcattggagaaaaaaatgtaattagggatatgaccttatacttcattttcaatggcaggccctgacaattactgttttctatttgcatgattttgatttggtgacttggttcaagaaaattatgaataataggaatcataccagacctgatatacagttacaacctcaatatgtatctgattaaactcattctcctgaaatccctcaaatcctcactccccttctgagttgccctaaggtacttatgtattggtatgtcaatcacctaatactcaaaactgtctttggcccaatttcttcctttcctattagttccttttactttccctccccaagtcactatgtgtaagctttcttagggacagtgtactaattggcccctctcaggttctttatctttttcctgaccatcactaccatattaatcttctttaagacccagaagtatcttgtggcagtctccattcatgtcttttgcagcttcccattgcctgtagtgataagcccacagttttctgcctgaaatgtgtaattcttgaaaataggattcagacaccattgccatctgttgttgcttctttggaagaatctgtcttctagcaaaaccgtccactcttcactgcctctggaccttcatatactgtgctgacttattaagctctttacagaaacatagttatggctcatttatgtatatgtcaaggtcaatcaagataataatccttagctatcctggaagcagcatacagaccagtagaaaatgaaatgatccccaagtggccaaaatagcataacgaaataataaaccttctctttagtttgaataacaccttctcacactgtatgctatcttatttcaccagtggttactgtgcttataggagaagtccttaagcccttgtccatgccataattactacatagatttttttttgggacagggtcttgctgtattgcccaggctggtctcaaactcctgggctcaagcaatcctcccacttcagccaccaggtagctgagagtataggcatatgcccagcttctgtgtacttttagacaaactttttcaaagaatggttgcctaataccggaagcaacaaattttgaaaggtttggaggttgttggctgtgggcaaaagagaaaggcaccttaataagagacaggtagcagggatcaaaacattatgagagcagggagaaaaaaacctacaaaaagtttgctagttatcataaatgtatgggtcaggggccattctgtttcttgaatcccgaagccagtgttttctactgtgctcaaaatgaaaacaaatgatcagccgaaggctaaatcacatataatttttacacgtgccaccacgaaagaaagcaaggagatgaataatggaattttttttttttttaagatggagtttcgctcttgttgcccaggctggagtgcaatggcatgatcttggttcactgcagcctctgcctcccaggttcaagcaattctcctgcctcagcctcccaagtactgggattacagacatgcgccaccatgcccggctaattttgtatttttagtagagatggggtttcaccatgttgatcaggctggtctcgaactcctgacctcaagtaatccacccaccttagcctctatagtgctgggattacaggcatgagccactgcacccggtggctacatttctttctaagttctggcttttaatggaataaatgtcagttggctccttttggcattccccagaaccgttcaataacaactttaaatataaggatgaatgaatgaatgcagtgaatgaacctagaaagtaaatttcacaaaggaacccctcattatatcactgtgttatatgaataaggccatacttgaatttggggaacaagctttacctagaaaaactgtcatgctccatagaccactacacatgctgtgtgcgaatgtgtgcacgcacacacgctatgtgtatggtattggaggctttatgtggggactggttagaagctgctaccgaagcagctggaaacgttggtcaataacttggcaaaattgtctgccgttcagaaggctagagctctcgcaagctcaaaaagaagatgaaactcaggttttgttattaacatattgtttcaattccatttgtcactggttagcttcaagaaagtctgtttagtcccagtggaagcagcaatgccaattggtacgttgcaataggagctttaattctttatggtcgtgaaattcttttctgttttaaaacatccttagaccatctttggaaggcaaatagtggctattttttaaaatcaggtctcaagatgtttgttgacttgtcaaagctttgaagacatcaggaccaagtttactgaatgctgagagcatcagattccattccctaagtatagcccttatcctttgggtcagatgttctcttgacaatgatgattgagaagtcttacatctgttagctgcttgtctttgtttttaatgatgagaaatagctatttaactattttgaaggaagaggcgagagaaaggacaaaggagggaaatggaactgttccattttctattgcatggaatagccccatgatattccttgcctttctaaaaaaaaaaaaaaagagtatcccagctctctctacatgaccttgggcttctttctcacctcccttgtgaccatacccttcttttctgtttgacatttatttctctacttgactctgatagtaggcttttagttttcaaaatagtgtctgcaaagaactcatgaacctgctagagaattaagttctaacagcagttccttgtgcttgaccaccccctcccaatgccatctttgatggtggtggtagctgttaaaaggttttgtgccctccacacacctccttaatggtcagactatttggaacctgaacaaacccatctctgaaaactgttttgcttttctttctccttcattatgaggtttatttacattcaaaattatagagagacactggagaaataggatgcctattgatttatttccaaacttagcacaggattggttaatgcatagttgacattcatttatgattaagtttgctacagcattttaagaccaagacaataaatctgccttagaatagtcaagaatactgatgttttgagctgtggttaggtaaaagaatgtaaaaaaatacactctcaaatggatcccacagaagtgtgtatacatatgagagagaaagagggagagggagggaggatgatgatgcaaaagcaaatggagcaaaatgtaaaccattgatgagtctgggtaagggatgcatcagagttcttttactattgcaactttttggaagtttaaagtaacgtccaaataaaattgtaccaaaaaaaaaaaaaaaaaagtatagggcagggccactgttagttcatctaagcatggttctacaaaagaaaaaagaagcatcataaaaaaagttttactctgtcataaccccaactttgaatagttctatttccattataatgcagcctacttttaaacctgattctgcccgtttcatgtgatcaaccttaagagacaatacctgaaaataaagttattagaatttttctattaggtctgatttacctgtggtctcatatgcttggcttaaagcatgatgttttggcagaccacattcaaccatggttaggtatcctcaggaagaccttcagccatgacccagagcagaaggaatggccaggctcccttcttccttctgtgctacaaaagtaaataccatatagtgttttaaatgcctaaggaagggttatttgtgaggtcatatatatatatatatatatatatatatatatatatatatatatatatatacacacacacacacacacatatatacgtatatacatatatacacatatatacatatgtatatacatatatataatatgtgtatatatatatattttgttttgttttgttttgagacagagttttgctcttgttgcccaggctagagtgcaatggtgtgatctcggctcaccgcaacctctgcctcctggcttcaagtgattctcctgcctcagcctctcgagtagctgggattacaggtgtgcaccaccacacctggataattttgtatttttagtagagacggggtttctccatgttggtcaggttggtctcaaactcccaacctcaggtgatccacccgccttggcctcccaaagtgctgggattacatgcgtgagctactgcgcctggccacgtctttataatttttagtgtaactttttacaagcgtaagaactgtgtttagctgccactgctttacccgactgatatacttaagaatagactctcaggatctcttggcaagtacaagcaatctttaaaaataagaaagaagtcaggtgccatggctcacgcctgtaatcccagcactttgggaggccgaggcaggaggatattttgagtccaggagtttgagaccagcctgggcaacatagggagaccccatctctacaaaaaacaaaaacaaaaaactttggtgtggtggcacatgcccgtggtcccacctacttgggaagctgaggtaggaggattgtttggacctgggaggtagacaggctgcaataagccatgattgtgccactgcactccagcctgggtgacagataaataggaaaaagaaaaatctaaattgaagttttcgtgttatcaggtaaataagttgctagaagccaggtgccgtggctcacgcctgtaatcccagcactttgggaggccaaagcgggcagatcccctgaggtcaggagtttgagaccagtctgaccaacatggagaaaccccgtctctactaaaaatacaaaattagccaggtgcagtggctcacgcctgtaatcccagcactttgagaggccgaagtgggcagatcacctaaggtcaggagttcaagaccagcctgaccaacatggagaaaccccgtctctactaaaaatatgaaattagctgggtgtggtggcacatgcctgtaatcccagctacttgggagactgaggcaggagaatctcttgaacctgggaggcagaggttgcggtgagccaagatggcgccattgcattccagcctgggtaacaagagcaaaactcaaaaaaaaaaaagaaaaaagaaaaaagaagttgctagtgatgatgtagcaactcttagcacagcctggtcccagtggaggccatgccatataactttttttttttttttttttgagacggagttttgctcttgtcacccaggctggagtgcaatggtgcgatcttggctcactgcaacttccggttcaagcaattctcctccctcagcctcctgagtagctgatattacagggacataccaccacgcccagctgacttttatatttttagtagatttggggtttcactaggttggccatgctggtcttgaactcctgacctcaggtggtctgcccccgcccccccccagcctcccaaatgctgggattacaggtgtgagcgactgcacccagccaacatttttttaatgtttgtgttttgatgagctctgagaacttgcgagtgaatggttttgtcattttaagtattctctgatataaaggaaaaagaaaaactttcgtcagtgaataaactctgaaccaagtgctcatgaggccattgaatttttacaatcctttttgactgtatatccttaaaatgccttccgtgggtaaagtggactaccttccagttgtgtcattttgtgtgtctgcagcgcaggtagcttggctgattcaccaaagaaaaaggaattggctccatcagcactccccccctggaggcagtgtggggttgcaggggtttaggatcacagccaagaccggtcctaagaccacttactgaccttgggcaattgaccctgagggacattgctctgaggcccagtttccccatctgttaaatgagacaccacttaccgtgggttgcttgatgcagtgattaaatgccgtaacactaatggtaccagccaggcatggagaagtaagttagccatctgctaaaaaatgaaacagaaagccatgcctgtaatgaaaagggtattgtcactcatgtccttcagttggactctttactttgtgcatgaatgacagtcaatcctcagtgtaatttgttgaaaggctggaatgaacttgtgggaattgtaagattgagatgtggccagaacttccaggtgattgggaggaggggatggtgggatggtggcatgtagtgctaacgttgatttaccttgattaggatagtaatttactgcacatttttcacaaaaaggctaatcagggagtacagctgtaaaagtaattcacatcttcggcaatctgtatctttgtgctggcttggaaaatccatggcttgtcttaatttgtgatgttttctcttgttttataatccagtgacatttaatttttaggttctatttaatatttatgttctttgtaaatctgcagagcaaataccttagtgtctccctgcttagcctgatttagcagggggcagatgttcatatttcatgatttgggttaaatttcattgaaggcactcattctcctggtaggagttttagagttactaattaaattcttaacctctggttctcttcctttgacatgtgggagtggttttttcaaaatatccaagacattttctgactcattaacacatccttttttattgaggagtcagaggaatacgcctatgtttagaaagcctttccttagtcaagacatgaatgagtcgcacctgtgtgaaatgatgccttgtttaaaaggtcataacctcccaatggtagtgtaggaaatgaggtcatcttcacttcttgttcagggtgaatgaaagttaaatttattagttggaataatatatgtgtggcattgctcctactgctaataaagattgtagctatgaggtgcttgcccttcatttatgaactgttacaatgttaattttctcaatgtcctatcatttataaaagaaaaaccataaattttaatcaagttttattttattttatttttttcgagacggagtctcgctctgtcgcccaggctggagtccaggggtgcaatctcagctcactgcaacctccgcctcccggtttcaagcgattctcctgcctcagcctcccgagtagctgggattacaggcacccaccaccacgcctggctaatttttgtgtttttagtagagacggggtttcaccatgttggccaggctgagctcaaactcctgaccttgtgatccatctgcctcagcctcccaaagtgctgggattacaggtgtgagctaccacgcccggccaataatcaaaggttttaataggtagtattttccaacactcagtatttagagttgaattgagatagtcactgaaaaatgacttagtctcaggctgaaagtgtatggcttttcactgccttttacacttgtttaagcaaatgagaactttttttttttttttgacatccttcctgagatggaagaatgtttattgaggcagaagaatttttggaagtctgacatgtcagtgtgtatgtgtgactagactctggcttttagccatatgaccttggacaagtctcttgactttcctgaatcttgttttctctaaaatcattgggtcgggataattatctataattttctttctttacatcatttttttgtgggtgaaaggcccaggtataaaaaagctccatctctccatctggttctgaaagttctgctattattatttttttctttgtgccctgggatgagggatgattttaataatcagaagatacaaagaacataaatggtgatagcaaagttcctgggttctagggcagggaatgttgtcttgacacttttatagcccttcatccaaggaggctttttattcagaggaggatttacatcttactctgcccatagcaggctgatgacatttcacacatactaggcactgactgcataacttttcagcgaatgcctgcttatgatgcaattaaacattaacagtcaccaagctggattttattttcacatagtactgtattcagtgactgtttgttgaaggaactcactgatgaatgtctgactgactttagcccttagtaaaggcttgaggatttaatgtgcagtataaggatttaattgtgctatttctattttgtgtgtaaactcagtttagtgtcttacaaaacataattagaaatctgaaacctaagcagtttggctgagtggacccactctcaggaggcagcactgcctcagttggaaaaattgcttaggaaatacaggggtgccgagtggggtcttgagccatttttcctggggcatagtagtgggcaaggcaggtagcctgaccccgacacttctttctacaacttacagtatgtcacaaggatttgtgggcaagttagaaagtcaacacatcaactttcttgagaacttttctaaggaatcgactgtagagaggcaccttttaaaggctcctggaaataaactagctttggtggcatgttctgaaattctgagctggcaaagagactactaccaaattatatagctctaaattttaaatttcagggggcctggggcctgggggtggtgacagtagtaatttggttactttctctgggcccagctgtctgttaacagcattcaataaaagctctgggtcgggggtaagagaaatgcattcaggttttagatgtctttgttttttcttatattgttcacagcagccattgtttgatgtcctgtgactgagaaaccaggctttaaactttatgcctttggagatggagcccaagatgagcaaactggcctttggctgtcagagaagttccacatcagatgatgactctggctgtgcattggaggagtacgcctgggtccccccgggcctgagaccagagcaggtaggaacttcatcatcctatatttactctttgtttttcagtgtgagttcagactttagaacattattttgtaaatggatagaacatcactgagatgctggaataccaccctcctcagtccttattcttctttgtatggctttgaagttttacttttgaaggtcatatttagtttctcaatggaagtttccaatctcgtcgtacccatggttccagaagcctcataaggatcccatttttgctctaatgaatgaaatccagagtactacatatgcattggttatgtgtatttcggatgaatccctcttgagagtgagaggaatttcccttttaaaaaacttctgtgacaacaaaaaggcaataaaagaaaagagaaaagtttccatgccagttctcagcaatgcttttgctttggaagcgagatagtgagctatcagaaaccctctgaagtgttactgcttagacgtttgacctttgataactttgcatataaaagagcctgtcacttacaccacagggattggaaaaaaaattaaagagttaattttatgctttgtttgtattgttattttagggaagatgagaacattccatatgcctatttaattttcccaatatctttacaatgattaacttgttgaaaatcactggcgatattattaaaagagcagaggcatcatttgaaaataaagttgacagtggggtatgtggttgctttgcttctgatgttagggttctgtttcctgtagggtgggacgttttatgagaatagggtatccttatttatccatggcatagcacagtacctggcacgcatgtagctgatattcagtaagtgtttataactgtaaaaagcttctagagctgatagaatggggagagggtggagtgctggtgaagcagttagaaaagcaatattttgacaaactacttagagagaatcccttcttacaacttagagtgggtaggttttgtgtggtactaaggtattgaagtagacaggccctaaattcctgtctcctgtcttttttttcttttattccttctcagctctgcagtatcctttgcagtactcattaagggatgttcctttaaagacatcagaaaaacaaacaagcagaaattaagttttcctttcagagtgagcaaagtacagctcaatgtggcttctctccagtttgcctggggaggctgacttcaggtattcagaaaatagcactcatggaagcaaagaaagctgatgtttgagagaacctgataaagaagagtttacaacatttagcaaaacagcctttgtctttgtgttgtgtaaaattcagagagcaaattaaatgtgttcgtgtagtggctggattttggaccatttcacacagtctgtgtagtaatttgcaggattcacccaggactctctctcttgctgatctcttgtctgaccccttggaagactggctgaggaggagtagtcttttttttttttttgagacggattcttgctctgtcactcaggctggagtgcagtggcgcgatcttgggtgactgcaacctctgcctcccaggttcaagcgattctcctgcctcagcctcccgagtagctaggattacaggcgtgcatcaccacgcccagctaatttttgtagttttagtagagacagggtttcaccgtgttggtcaggctggtctcgaactcctgacctcaggtgatccaccagcctcagcctcccagagtgctgggattacaggcgtgagccacaccaccgggaagagtggtcttaaatgtgcatattttatggtgcataatttatgatgtccctaattgtcactacaaattacattcctgaagagcaatttagcagctgggtgctagttatctgaaggtttgcagttctgctgagttggctcagctggtcttctcattagctacaagaggccaaaccctgtacctagggaaaggtaacttttaaagattaagtgagctgagatgctcagttctgtatgttgatgccattctcactgtctcttttgcagatccagctctattttgcttgcttaccagaggaaaaagttccttacgttaacagccccggagagaagcatcggattaaacagcttttgtaccagttaccaccacatgataatgaggtaaaatagcaggaagaaggctaattagaaaaaagaagaaaaaatgcatgagaagcattgagatgctgctcataaaccccaactcctcactggcgagggctcccttttgcctttctttagttaaaatttggccagagaatacagctttccattctttgagagaaagagagaaaagagtatcagtgtaataaacttaacacaagttggtttttatagtgtttgcagccacccaccaatgatcaggaacctacaaattcctgagatttcccagcccctgcatccagagtgaatgctttatggtcattcaggcctgcagttgagttgagtgcatgtagaatggagagtaaaagtggcaattaacaagtttaaaccttttgtggaaaggttaatgtcctatatatattttttaattctgtgttgataagggttttcaattaaacatttcttatttaaaaaaaaagtattccttcacattgcatttccctttttctagagaggctgtaaaattcagatatggtgtcattttaaaatcgtgggggtgtgacacaggcgagctaaacttactgtttcacttcctgaaaccctaactctggaagtagagaactggtgagaaagactgtgcactcagtgtggtgtttctgttttgctttctgtgaaggtacggtattgccagtctttgagtgaagaggagaaaaaagagttgcaggtgttcagtgctcagcggaagaaagaagcactgggaagaggaacaattaagcttctgtccagagcagtcatgcatgctgtgtgtgagcaggtgagcagccccttctctgatgcgtagcttgtggcagtgatgtggatggggtggacagtcgggggtaggtgactggactagcagaggtgtgggtcctgaaagcctccagaaaatgagagaaagacagcctagctttttattaaatagcaaatcatgtttcatatttgtaactagctacactgctgtgtatgacagcaggagtcagtcacccttatgcaaacattgggtgaaatcctgcctttggtaggatcctggcatggaggtaggtgctaggatacatctcgtattcaaaagatgcagaaacataatgaagacattcagatctttgctggcagttctcagagtaggaaatgtatccagcaggaggctggcacaggaaaaccactatttgtgtgaatcagattacaccgtccttagaaatagttgtagtatgtctgagacacgtgccttacagtggagaatcaccagtaatccagcattaaagagctatttaatcactaaaagaggtagcaaaaataaatacattcctgacaaattcgagatttatcctaaagtaggaaagcctgagaatcctgtctttaaaaaatgatccttttacattcaaacccatttgtttgtagtgtggtttgaagataaatggaggtgaagttgcagtgttcgcctcccgtgcgggccctggtgtgtgctggcacccatcctgttttgtctgtttcacgtgtaatgagctgctggtcgacctcatctatttttatcaggatggaaaaattcactgtggcaggcaccatgcagaactgctcaaaccacggtgctcagcatgtgacgaggtaaaaaaaagttcatcctttcacactgggaaaaataagcttagattaagccaatattccactgtttacatcaagcaaaatactaaaatttcctggattttgttctgtgtgcatgttttaaacataatcctgtacattcatacaatgaaatgatctatatttggttgctgcaaaagtaattgcggttttttgccataatggtcaaaaccgcaattaatttttcaccttcctgatagaaagggaagcagatgtctttgtactttgataagtattatgtcttcagtgggttgtgagaaaatacaagctgcagaagagcatgtagtagatggtctcatttttgttaagaatttaaaaaacaatatgatatatgtatttgtttatgctcagaaaaggtatggaaagacaaataccaaattaatagtagttaccctcggggaaggtgggaatggatgatggcttgaaaggaaaaattttttccctttagctttttattttaaaataattttagatttacagaagagttgcaaagctattacagagagatcctgcatgcccttctcccagcttcccctgacactaacgtcttacataaccataatatatgtatcaaaactaagaaattatcagcagtgtaataccattaactaaaccatagtctttgtttagattttcccagtgttttaacagatgctccttttcttatccaagatcaatccagggtgcttcattgcatttactcgttgtatcttcttagtctccttcaatctatgacaataaactttgtttttatttttatacattcatttactttatacatttttttcaacaatgttctatttgaacatatttttgtttttgttttgttttgatttatttttttgggatggagttgctctctgttgcccaggctggagtgccgtggtgcaatcttggctcactgcaacctccgccccgcgtgttcaagtgattcttgcacctcagccccccgagtagctgggattgcaggtgcccaccaccacgcccagctaatttttttttttgtatttttagtagaggcgggcttcaccatgttggccaggctggtctcgaattcctgaccccaagagattcacctccctcagcctcccaaaatgctgggaataccagggtgagccaccatgctccgctgaacatattttggaaaccaaaaatataaaaaaaatgaaagaacctgccgggctcggtggctcacgcctgtaatcccagcactttgggaggccgagatgggcagatcacgaggtcaagagacagagaccatcctggcaaacatggtgaaaccccgtctctactgaaaatacaaaaattagctgggcatggtggcatgcacctttagtcccagctactcaggaggctgaggcaggagaattgcttgaaccccaggaggcggaggttgcagtgagccgaggtcacgccattgcactccagcgtggtgacagagcgagactctgtctcaaaaaaataaaaaataaaaataaaaataaaaaaagaaccagactagaccccatggtgagaccccgtctctgtcccaaaatgtttttcaaattagctgggcatggtggttgtgcccttgtggtcccagctactcagaaggcagaggtgggaggatcgctcaagcccaggagtttgaggctgcagtgagctatgattgtgccactgtgctccagcctgggctacaagtgagaccctgtctcaaaaaaataaagagtccttaatctagagatggccaccaagtcaaataaagcattatcaacacaaatgctgttcactcaattccagcatctgtgtagctataactgtgttgagtccacagacatttttatgagttttctttctactaaaacaccaaattatttcactaaattatttccgtgttaatgtgttctttgccagattatgccaagaaaatgttattggggagcaaaaatatgaccaaatgaattacctccggtgtagaattctgtttttttaaagtcaaagcaagcatttattatttagtttgttttctcagcactgtcaatttatgctctagtttgtagctaaatcaagtgttagatttaagcttgtgactctaagaaacaaggttagctatctgatttttttaagagccagtgtctgtccattgcccggaaaacatgcagttacttggcctttaaaatagttcctaatgattttctttcattctctggtttcacatttctttttgaagataatttttgctgatgagtgcacagaagctgagggtcgccattggcacatgaaacacttctgctgccttgagtgtgaaacggtcctgggaggacagaggtatatcatgaaggacggccgccccttctgctgtggctgttttgagtctctctatgcggagtactgtgaaacctgtggggaacatattggtaagtccacagccagcccgtctgccctgtcacctagccattagtctgtcttggattatccagtcttattttttctttttctgttttttaaagttgagatataatttacatacaatgaaatgtacagatcttaaatgttccagctgatgagctttgacaaatgaacagagagttgattcttgttacttgcagtagttgtgttctgtgacgttactgcaaacactggattagtgaacactgaaccattgctcatgggggaatacagggttaggttcctgtgagcctctggtcacagcagtttcatcaacccatcaatacataaccttgtttcacgtgtgtttttgcttaaagccactgccttattgaatgtacattgttgatgcattaatattgaactcacagccagtggtaccgtactcaagattaggagcttacgtaatacatgtcttttctctgtaaggcacatcacagccttcttgcccttagcaacatgacagcatttcagcattatcagcattacacttgggggccattttaaacagtaaactcaccaacaaagagcacaaaaatgcagaaaacgcggcagtagatagaccagaaataggacacttgtctacagtatgagagctgaaacaaaaagctgagcatctcctggatcagtgcatgttggttcagttcgtatttttaccactctgcacatctgcgaatgaccatgaaactgttgcgaatattagtttgggagttgtgaataaatttttatgagtaggcacactcacaaatacagaatccacaaagaatgaggattaattatatctgtgtcacccacacagctcccccatacccataatctttatttattttcttcgtttcttccttataccttgtttcaggcattaaaccataacctgttatttattctatccttttcaaaacaggtgtggaccatgcacagatgacctatgacgggcagcactggcacgccacggaagcctgcttttcttgtgcccagtgtaaagcctctttgttgggatgtcccttccttcccaaacagggtcagatttactgctcaaaaacgtgcagtcttggtgaagacgtccatgcctctgattcttccgactctgcatttcagtcagctcgatcaagagactcccgaagaagtgtccgaatgggcaagagcagccggtcagcagatcagtgtagacagtctctcctcttatcgcctgctctgaactacaagtttcctggcctctcaggcaatgctgatgacaccctttctcgaaaattggatgatctgagtctctccagacaaggaacaagttttgccagtgaagaattttggaaaggcagagtagagcaggaaactccagaagaccctgaagaatgggctgatcatgaagattatatgacgcagctcctcctcaagtttggtgataaaagcctctttcagccacagcccaatgagatggatattcgagccagtgagcactggatatctgataacatggttaaaagtaagaccgagttaaagcaaaataaccagagccttgcaagtaaaaaataccagtctgatatgtactgggcacagtcacaagatggactgggcgattctgcttatggcagccacccaggccctgcaagcagtagaaggcttcaggaattggaactggaccatggggcttcagggtataatcatgatgaaacacagtggtatgaagattccctggagtgtctgtcagacctgaaaccagagcaaagtgttcgggattcgatggattctttggcattgtccaatatcacaggtacgtaatctagggattatggggtatttgaaaaaaggagctactaaaaagtgtattcaaaaaattgcaattcaagccaggcgcagtggctcatgcctataattccagcactatgggaggctgaggtgggcagatcatttgaggtcaggagttcgagaccagcccaggcaacatggcgaaaccgcggctctactaaaaatacaaaaattagctgggcatgggcctgtgatcccagctactcgggaggctgaggcaagagaattgcttgaacccaggaggcagaggttgtagtgagccaagattgcgccactgcactccagcctgggcaacagagcaagactccatctcaaaaaaaaaaaaaattgcaattcagcatgagtaggagttgtgtgttattcaaaaccatggatcaagggaaggaaggaacctcacttaaataccaaacactagcaaaacaaacacatgtgtgaggtgagtgcatgtgcataaaatatatttacagtgcagtctttagggataggttttattaccctgttttgaagagaaggaaattgattggaggaaggagtgtacaactggattgtgtctgaaagatattgtacgcttgaattattctgtatgtattctaagataccaaaattggcccacacactttacaagctctttttttttttgaggtggagtttcgcccttgtcgcccaggatggagtgcaatggcgcagtctcacctcactgcaacctccatctcccgggttcaagtgattcttctgcctctgcctccccagtagctgggattacaggtgcataccaccatacctggctaatttttgtatttttagtagagatggggtttcgccatattggccaggctggtctcgaactcctgacctcaggtgatccacccgcctcagcctcccaaagtgctgggattataggcatgagccaccacgcctggccacaagctcatttttttttttaaacatcttcctgaatttccctgtgacagtagctcaaaaacagctgaatactttttatttagattctaaaatattactgtaatgttttcttttttttcctagttttttgttttgttttgagatggagtttcactcttgtcacccaggttggggtgcaatgacgcgatatcagctcactataacctctgcctctcaggttcctgagtttaagcgattctcctgcctcagcctcatgagtagctgggattataggcgcctgccaccacgcccagctaatttttgtgagacaggctggtctcaaactcctgacctcaggtgatccacctgccttggcctcccaaagtgctgggattacaggtgtgagccactgcccctggcctactttaatgttttcaaagcacagtcataccagttatccacattttatctttaaaatgaccctgagctatatagagtggatgatatgattgcatttcacaaatgaggaaacttgaattaccaaaaggctaaatgccaaacattacataggttctaaaggcaagattaggcctagaacctaggacattatgcaaattatttgcaacaagtctttggattatagaaatgttgctgttgcatggctagttttatagtcaaactactgacatccagccctttgatgaaggtaatgcttctgtaatgtagacaggaaaggcttagtagctgcttcctgccaggaataacttgtgccagacactgcagtgacaaggaagggtacggcaaagctacccccccggcttctgtggacttgtcaaagataaggccggcaataaaggggagttgaggaagaatggtgggtgagactgagtaagcaccttttgtctgccaggcccagtgctaggagttttaaatttaatatcagaaatagacataatttggccaggtgtggtagctcacacctgcagtcccagcactttgggaggcccaaagcaggtggatcacctgaagtcaggagttcgagaccagcctggccaacatagcaaaaccctgtctctactaaaaatacgaaaattagccaggcatggtggcatgtgcctgtaatttcagctactcgggaggctgaggcaggagaatcacttgaacctgggaggcggaggttgcagtgagccgagatcataccactgcactccagcctgagtgacagagcaagactctgtctcaaaaaaaataaataaaagaattaaacataacttggtacacatttaagtgttaggggctgacattccttgacaataataagctgaaaaataggccccctttaaaaagtatgaagttatatagggccgggcgcggtggctcacacctgtaatcccagcactttgggagaccgaggcgggcagatcacgaggtcaggagatcaagaccatcctggctaacacagtgaaaccccgtctctactaaaaatacaacaaattagccaggcgtggtggcgcatgcctgtaatcccagctactcgggaggctgaggtgagagaatggcatgaacccaggaggcggagcttgcagtgagctgagatggtgccactgcactccagcctgggcgacagagcgagactccatctcaaaaaaaaataagtacgaagttatgtagtctccagttgacaacagtatcactttgtctatagggctatatgtatttatcttaacatgcctgggtcctattatatcaaaagagatcaatatctgttttgttaaatgtttcaatagaagattaatctggaagtggcatattttacacgttgaaggcagaaaagactggatgaagatctaggtcaggggttgagcaaaccttttctataatgggctcgatagccctttttaggcctacggtctctggtgtgactacttagctctgccactgtagaaagcagctataaacaatatgtaaacaaataggtgtggctgttccaataaaacttgatacacaaacaagctgttgagctgtagtttgctgaccactagcctcagtataagatgaggaagactagctcatgatggagaccaaggagggactgatgtgaaagatctccaaatgaagcagtgtggctttaatgaattgaggagcagaagcttctacatcttatgttaatgaatgaacaggctgctgtgaagagctcttaaagttttgctgctcatgccatgtgccgtaactacttaactaatctttgactccaggcttataagagaacctgtgccccaggccaggtgcagtggctcatacctgtaaacccagcactgtgggaggccgaggtgggtggatcacctgaggtcgggagttcgagaccagcctgaccaacatggagaaaccccgtctttactaaaaatacaaaagtagccaggtgtggtggcacatgcctgtaatcccagctactcaggaggttgaggcaggaaaactgcttgaacctgggaggtggagattgtggtgtgccgagatagcgccattgcactccagcccgggcaactagagcaaaactctgtctcaaaacaaaacaaaaaaacaaaacaaaaaaggctgtgcccaccccttataacaataactgcatttataccacttctcaattggcatagatacatgttggctttccctatgggttttaatcaaatattgagattggaaattttctttgaaatatttcctttcagtagcttacttttaagtactgtcgaatattaggatgattgagaagcacatcttgttttggcctctcttctaggggcttcggtggatggagaaaacaagccaaggccatcattgtattctctgcaaaattttgaggagatggaaacagaagattgtgagaagatgagcaatatgggaactttgaactcttccatgctgcacaggagtgcagagtccttaaagagtctaagttcagagttgtgtccagagaaaatcctgcctgaagagaagccagtacatctgccagtgctcagaaggtccaagtctcaatccagaccccagcaggtcaagttttctgatgatgtcattgacaatgggaactatgacattgaaatccggcagcctccgatgagtgaaaggactcggagacgcgtctacaattttgaagagaggggatccaggtctcatcaccaccgccgccggagaagtagaaagtcccgctccgacaatgccctgaatcttgttacagaaagaaaatactctcccaaggacagactgcggctgtacacccccgataactatgagaaatttatacagaataaaagtgcccgggagatccaagcatacatccagaatgctgatctctacggacagtacgcccatgccacttccgattatggcctgcagaacccaggaatgaatcggtttctgggactctacggcgaggatgatgattcctggtgttcttcctcctcctcctcttccgactcggaagaagaaggatattttcttggacaaccaatccctcaaccccggccacagagatttgcctactatacagatgacctttctagtccaccatctgcacttcccacccctcagtttggtcagaggacaacaaaatccaagaagaaaaagggacacaagggcaaaaattgtattatttcttaaccaagtagtgatgcagagcatttgtttaaaacttagccattaaccgtctgaatcgtttccttttcttccgtaggaaagttgtgaaaatagtttaaagtgctttctttgcccatgtaaatgagaactcaactgctgtttacagtgtcagattaacatttgaaaggtgtgatttctccaatttaccctctttggatggtgccaggtggacgtgacatctcgtgcctgtccggtgcgggtgcgttacagatggacgtagctgctttggttttccagtcctcaagggaatactgaagatgctgactgaaggggattggatgttgattttagaagatggagaactccagccacctttgtaaagcactagtgtttgtcatttatgtaagtcaggtcggctcaggtcttgatagtccgtcttggtgtgaggcatgcctgtcacgatgacctagctaacactgtgcatcttattgtgaggccagcttgtcccctcgaaccctctttggccaggtaaacattgtattgtatcagcgccagctacagattgaaaaaaaaaaacaaaaaacattgctatttataacttagtatttcatagacttaagtgtattcctaatttaacggtgcaaatattaatgtatatactgtacagttcagattttaaagctgatatttttatatccctgaattgtaagccgtttgttacgctgcagtgctagatttgccagggaaccagaatttatggatgaactgattgcttatattttagtcagggtttataaatgtagatggtcaaatttacattgcctagtgatggaaaattcaactttttttgatttttttttccaatattaaaaaaggctctgtatgcatggtggggctatgtaagtactctttaaaactatggccctattaatcttacaagtgttacttatgggtcaagcaatgtaaactgtataaatgtaaaaacaacccctccacacacataacccctggaatatatggtaaaaacaagtagaagctgtttcagcgagtgggttttttccccctgcctgcggggggtgcctttctcattttcagcaaggtgatgattatctcatgggaaatgacaaagatctgcttttgtggcagaggactttgtagatttgttattttaagagaggttattcctttttattccttccctcccactaatttgttggcctttaacagcaattttgaaaactgggtcttctggttatgtttttgttttaaaatctttaaattagaggatgctgtgccattgagtactgtaagttaatatgaggttctggttcaaggaaaacttacgttggatctgaaccaatgagcagatattttgatatgtgccactcttgcatatacatctcagtcctaactaaaggttctagtggcatccaggacctttagggaggcatttaataaacacttaataaataacaaaactacctttctgaatataaatctttgcaaatgtatccagataacttccattttgtgcctgtgttcaggcatgatttattttgcagttgccctaccattaacagacctccatttgtctcgtgtgtccacacgccccacttgtaggccagaaatagggcttcagacacagaggcttattttttccatatagactggagtggggaaaatttggccttagggaggacagacacaagtccaatgggtaaaccagcgagtagtaggtggacagccgtcccacacaagggtttgtatctgggctacacagattcccttcagaaaagcaccaatggtgagagagttcttcactcagtaacttacattccctggtctggtgcctttaaaaaaccatcagcaatgaaaaggaagtgcatacacatgacaaaaaaattcaaatagggcaaaagtcagagacagcatctcctttccattcttcatcccagtcccccaggtcctctccccagaagtaaccactcttacccagttttagtgtctccttcagacattcaaagcacattcgtataaatgtgtcttttaaaagtggtagtgacctatatgtgctgtgacatgcttttttccctttgtatgtggacatttcacgttagtgcatataggtctacccattctttcagtgactgcttaatagcctactcctaatgatggagttgactttcctcatacattatgctacactggcacatgtgcacataaatcgggagcagcgtagttactgggacaaaggttacgtatttaagactgatggatattgccaattttcctccaaaagaaattctcctgatttacattaatgtaatgtaaatgagagtgtttgttccatcacaacctctcaatgtattagcagatttcttgattttgaagaaattttcagaacctgtgctgccacaagtgggcatccttttagaaaagactgttgcaatatgttgcttataaaggatggataataaatagtaaacaggtgatacttagcctgaagaaatgcaggtataaggtgaaggtactgccctcacttttcaagtacattctcaaaagataggggtaacatagcctgccaaaggcttaaggaaatgcagatatttattcacaataataatgtgactttcttttccttttttttttttttttgagatggagtttcgctcctgttgcccaggctggagcgcaacggcacaatctcagttcactgcaacctctgcctcccgggttcaagcaattctcctgtctcagcctccggagtagctgagattacaggtgcctgccaccatgctcggctaattttttatatttttagtagagacagtgtttcaccaagttggccaggctggtctcgaactcctgaccttcaggtgatccacctgcctcagcctcccaaagtgcaggggattacaggcatgagccactgcgtctggcaataatgtaactttgaagcttaaaaattaatcccagtttgtagcaataacagaagactatctacaacggaagaaagaagcaactgccttacagttctgtaaagaattggcaagaaaataaagcctatagttgccga

SEQ ID NO: 414 - DNA, 11953 bp, Homo sapiens
  source 1..11953: mol_type = genomic DNA; note = NC_000003.12:c49133066-49121114 LAMB2 [organism=Homo sapiens] [GeneID=3913] [chromosome=3]
cgcgattcccaactttgctcaaagtcgctggactctaagctgtcggagggaccgctggacagacctgggaactgacagagggcctggagggaaacaggccaaagacccacaggcagagttgacacggaaccccaaagcaaggaggagggctcgggcccgagaccgttcacctccccttatccctgttcccctcttcaggatggagctgacctcaagggaaagagggaggggacagcctctgccctgggaacttcgactgggcctactgctaagcggtgagagggcctggtgggggctgggggttgtggaatgtgatggtaggtcctggtagttgcccttggggcacatgaggtggagccactggataggaactcagcggaactgactgagctactgtccccagtgctggctgccacactggcacaggcccctgccccggatgtgcctggctgttccaggggaagctgctaccccgccacgggcgacctgctggtgggccgagctgacagactgactgcctcatccacttgtggcctgaatggcccccagccctactgcatcgtcagtcacctgcaggtgtggctggggacagggtgtgacgccgagtcagggtggggctggcactgcctgaggcactgattctaatccccatccaacccaggacgaaaagaagtgcttcctttgtgactcccggcgccccttctctgctagagacaacccacacagccatcgcatccagaatgtagtcaccagctttgcaccacagcggcgggcagcctggtggcagtcagagaatggtgaggccatgggtggggcaaaagtgagcagggctgcccaccagtagctttgagtccttgacttccgattcctgtcccaggtatccctgcggtcaccatccagctggacctggaggctgagtttcatttcacacacctcattatgaccttcaaggtgcctgcatatctgggagcctgcccgaatcaccctgcttggctctccattgcccctggacagagcctcagctccttaacacagcctccttgagcatggatgcaggaggctccttcatcccttcacaccttccatttgcctccaggcctttgcacatgctcttctgcctttccaatcccaggctgggtcaggcgctgtctccctgagccccatgaaccctgagtctccccattagaggtggctacctttgctggtcattatctggcttccaccagtcacccccactctctgtgagctatttgagggcagtcttgggctgagcagggctcttgatggctctgggttgggcttgggtcctggtgcctgctgatcagctatgcccccctacccagacatttcgccctgctgccatgctggtggaacgctcagcagactttggccgcacctggcatgtgtaccgatatttctcctatgactgtggggctgacttcccaggagtcccactagcacccccacggcactgggatgatgtagtctgtgagtcccgctactcagagattgagccatccactgaaggcgaggtgagggctggcatctgggctgggggctggaagctggggatgatgggcctgaggcaaggtccagtgtgactatgaactccctgcttctccaggtcatctatcgtgtgctggaccctgccatccctatcccagacccctacagctcacggattcagagtgagtgctccaccctttgagtctggcacagtccgtgtccggctagggactatttggggcctcagtaactattttgggtgcttcctagggcaggtgccaagcccagtttagctcgggtggcagtgtataggaggtctttcaaggtgaccttggcagctgagcccctgggtggacatggggcagcaagggcctgcctggtcagttggccccccttcccccgcctcagacctgttgaagatcaccaacctacgggtgaacctgactcgtctacacacgttgggagacaacctactcgacccacggagggagatccgagagaagtactactatgccctctatgagctggttgtacgtggcaactgcttctgctacggacacgcctcagagtgtgcacccgccccaggggcaccagcccatgctgagggcatggtaaggggcttcagacggttgggatagggctaggggcaggggcggacatggctgagcagtgctgacaacctacctgccaacctctataggtgcacggagcttgcatctgcaaacacaacacacgtggcctcaactgcgagcagtgtcaggatttctatcgtgacctgccctggcgtccggctgaggacggccatagtcatgcctgtaggagtgagtgagatcttggcctccatagctccagcactctgcagcctggctgtgccctgggtagaacctagagctagttggtcaagcccctaaaacccaggctgtatccaaagagtatgcagaccttgatgccccttgggaccccctcaatcctcctctgcagtctgctctgggtagggaaccagtatgatgctgaggccttgaagtccctgagcccctacccacaaattctggcctgtgatagggatctaaggtggcctacttcttacccttgtgacctggttcctcatgtggcctttgccctgcccttcctcccctgccagagtgtgagtgccatgggcacacccacagctgccacttcgacatggccgtatacctggcatctggcaatgtgagtggaggtgtgtgtgatggatgtcagcataacacagctgggcgccactgtgagctctgtcggcccttcttctaccgtgacccaaccaaggacctgcgggatccggctgtgtgccgctgtgaggctgggattgggcacggggagagaaagctgagcctggggcaggaactagagagctggactgctgtctaaattgcaggaaattggggttaggggcttgggatagaacttgaccagggatccagggtgggatcccttaggcttaggagaggactggcagtgagctagttgagatagggtgagtgaccctgtatctctttttgccgtcagcctgtgattgtgaccccatgggttctcaagacggtggtcgctgtgattcccatgatgaccctgcactgggactggtctccggccagtgtcgctgcaaagaacatgtggtgggcactcgctgccagcaatgccgtgatggcttctttgggctcagcatcagtgaccgtctgggctgccggcgtatgtgtctcctgccctaacttctatgctgacctttaacccctgtcctcttactcctgactcagctgaacatgagcactgccacagtttcccaaagtgctgatggttctccttccctgcaggatgtcaatgtaatgcacggggcacagtgcctgggagcactccttgtgaccccaacagtggatcctgttactgcaaacgtctagtgactggacgtggatgtgaccgctgcctggtgcgactggaaggggctggagttctaggggcatgatttgtccttagagcacagggctggggtgtcacatctatgccagtgggtgggtgctgagagcttaggatccagtcctggctgagaagcctcaggtctgggaggccaaggatgtgggccagtggtctggggggcatgttttcactgaggggtgattgaggctaagacgtgtggttgggatttcctgctgggtggtgatggggtctggaggtctgtttctggcccccagcaactcctttcgtgcagcctggccactggggcctgagccacgacctgctcggctgccgcccctgtgactgcgacgtgggtggtgctttggatccccagtaagtgttgtaaagggggcctgggaagggatggggaaagatcctgagcagaagagaaggttcttcttgagtaaccacagagttccctccaggtgtgatgagggcacaggtcaatgccactgccgccagcacatggttgggcgacgctgtgagcaggtgcaacctggctacttccggcccttcctggaccacctaatttgggaggctgaggacacccgagggcaggtgtggggcctccccctaagcagagggctggatgtgggtggacacgtctatgactggagaggtggggttatgggcagtaccttgttgaggggataggggtgatatctagctttggcaggagaaatggggtttggggctggctgtggcagaagaggcaaagcctcacctgagcctccatccctggctgcattatctcccaggtgctcgatgtggtggagcgcctggtgacccccggggaaactccatcctggactggctcaggcttcgtgcggctacaggaaggtcagaccctggagttcctggtggcctctgtgccgaaggctatggactatgacctgctgctgcgcttagagccccaggttagaccctgttatctaatctggggctgaacctctgggtgtgggagcatctcctccatcatcccgttttcccaggtccctgagcaatgggcagagttggaactgattgtgcagcgtccagggcctgtgcctgcccacagcctgtgtgggcatttggtgcccaaggatgatcgcatccaagggactctgcaaccacatgccaggtgagggcactggtggtagcactcacaatggcagggggttgtggggccagccctaagctccctgcagggcacctggaagaccccacagctcattcatctgttccttctttcaaatacctccagaatgctggttgccaggccctgttgggcatggctctgttcacagaaaggaagtagacagatcaaggcctgctctctcaggggtctaaggcccagaggccaaggcaggaattaatgggaaatcacctggtgtcactatcaggagggtccacagtggtggtggtagagggtggtagtggtggggttgtggcatcagagcactctgagcagggatgtgcctggtctgattaatgttttattacattttgggtagtatttgtttcatgtttcatgtttcttttttttttcttttcttttctttttttttttttttttttttgagacggagtctcgctctgtcaccaggctggagtgcagtggtgcgatctcggctcactgtaatctccacctcccgggttcaagcaattctcatgtgtcagcatcccgagtagctgggactacaggtgcacgccaccacgcccagctagttttttgtatttttagtagagatggggtttcaccatgttggccaggatggcctcgatcttctgaccttgtgatctgcccgccttggcctcccaaagtgttgggattacaggtgtgagccaccgtgcccagccctgtttcattgtttcatgttttgtttgtttgtttgtttgtttttgagatggagtcttgctctgtcgcccaggctggagtgcactggcgcgatctcggctcactgcaagctccacctcccaggttcacgccattctcctgcctcagcctcccaagtagctgggaccacaggcacccgccaccatgccttgctaattttttgtatttttagtagagacggggtttcaccatgttagccaggatggtctcgatctcctgaccttgtgatccacctttctcggcctcccaaagtgctgggattacaggcgtgaaccactgcacttgacctattgcttttagtttttgaccatgtaaatattcaaacagaaggaaagagaataacatattgaacctggctgtgcccattatagacattttgccaactgtgacttgtgtttagaaaaaaaattcctctagaccaggcatggtggctcatgcctgtaatcccagcactttgggacactgaggcaggaggatcacttgagcccaggaattcaagaccagcctaggcaacatggcgagaccctgtctctacaaaaaataaaataattagctaagcatggtggtgtgtgcttgtggttccagctgcttgggaggctgaggtgggaggatatcttgaacccaggaggtcaaggctgcagtgagccaaggtcacgcactgtactccatccatcctgggcaacagagaccgcatctcaaataaacaaataaataaataaatcagaaaataaaaagaaaaaagatgagggattgaagaacaatttttgggatgggataaaagaacccaagtatgagtttgcagcacaatgggaaaggaaagccttggagacaaagagagagggggcgacatagtgttgatgaagaggagcagccattgtaggttgtaggtcggggtcagaggaagcgtgaggtggttgttgaggagaattggcaagttcttgggatttccaggctttatgagtatttccagtgagtctgcacaggtggatgtatgattctagagggccacctttatgagactattctgtgcagattctttgttgggctgcccagctgtttgttggcctagcgcagcccaacgcaacccagccatagtctctgctttggccaatggcctggttgctgggagaaggatgggggaggcccagatgatttgtacagggcccctagatgacccactgcacctgtccccactcgcccccaggtacttgatatttcctaatcctgtctgccttgagcctggtatctcctacaagctgcatctgaagctggtacggacagggggaagtgcccagcctgagactccctactctggacctggcctgctcattgactcggtgaataatctcctcttgcccacaccaaccaagatggcagggcccgtggtgtgggacttgagggatagcaggggtctgtggcagaagaggcaggcccatggtggtgccagggtgggcaggcttgtggcagtgctaaggcaagtgctctggcaatgcctacgtggtcccaggtctgaactgcgatcttccttgctcactccttcagctggtgctgctgccccgtgtcctggtgctagagatgtttagtgggggtgatgctgctgccctggagcgccaggccacctttgaacgctaccaatgccatgaggagggtctggtgcccagcaagacttctccctctgaggcctgcgcacccctcctcatcagcctgtccaccctcatctacaatggtgccctgcgtgagtgtctgtgatgtgggttgatggggcagaggtggggacccagcctgacttggcccaaccctcctccccacagcatgtcagtgcaaccctcaaggttcactgagttctgagtgcaaccctcatggtggtcagtgcctgtgcaagcctggagtggttgggcgccgctgtgacctctgtgcccctggctactatggctttggccccacaggctgtcaaggtactcttctgccccttgttccctcctatgcttctctctccttcccattactgttctctctcctccttctggacctgctgctggtttcctcaaactaagtcttggaccctctactctcaacctgggtcagttgtagttctcttccatttcctgaccttcccacctagactcccactactcacactcccctgagaccctcccccacccacactcccctcagaccccctcccctggctctggctcagctctgccttgctcctagcctgccagtgcagccacgagggggcactcagcagtctctgtgaaaagaccagtgggcaatgtctctgtcgaactggtgcctttgggcttcgctgtgaccgctgccagcgtggccagtggggattccctagctgccggccatgtgtctgcaatgggcatgcagatgagtgcaacacccacacaggcgcttgcctgggctgccgtgatcacacagggggtgagcactgtgaaaggtgagactggagcagctatgagtgggttggttggtgggcaggcttcccagggatgacacatttcttcttcctcctccctgcaggtgcattgctggtttccacggggacccacggctgccatatgggggccagtgccggccctgtccctgtcctgaaggccctgggagccaacggcactttgctacttcttgccaccaggatgaatattcccagcagattgtgtgccactgccgggcaggctatacgggtgagtggatgggggcaggcgtgggatcagggtgagttggctgggctgagcactcacagcttcctcttaaccgtgggcagggctgcgatgtgaagcttgtgcccctgggcactttggggacccatcaaggccaggtggccggtgccaactgtgtgagtgcagtgggaacattgacccaatggatcctgatgcctgtgacccccacacggggcaatgcctgcgctgtttacaccacacagagggtccacactgtgcccactgcaagcctggcttccatgggcaggctgcccgacagagctgtcaccgtgagtatgagtgtgggagggcatggctgaattggggttctgcttcttggcctcctcttgactactgtgctcatcttggttggcacaggctgcacatgcaacctgctgggcacaaatccgcagcagtgcccatctcctgaccagtgccactgtgatccaagcagtgggcagtgcccatgcctccccaatgtccagggccctagctgtgaccgctgtgcccccaacttctggaacctcaccagtggccatggttgccagccttgtgcctgccacccaagccgggccagaggccccacctgcaacgaggtatgggaccctcctgcagatccctggttagatggggccaggtgtctgtcttatctccagggcttagcctcttatagaggctctgaccctgccttgttcccaccccagttcacagggcagtgccactgccgtgccggctttggagggcggacttgttctgagtgccaagagctccactggggagaccctgggttgcagtgccatggtgagggagccagcggggccagggtagatggaggacttcccagaatgccccacagtgaccctaactctgtgctctgctctttcttgcagcctgtgattgtgactctcgtggaatagatacacctcagtgtcaccgcttcacaggtcactgcagctgccgcccaggggtgtctggtgtgcgctgtgaccagtgtgcccgtggcttctcaggaatctttcctgcctgccatccctgccatgcatgcttcggggattgggaccgagtggtgcaggacttggcagcccgtacacagcgcctagagcagcgggcgcaggagttgcaacagacgggtgtgctgggtgcctttgagagcagcttctggcacatgcaggagaagctgggcattgtgcagggcatcgtaggtgcccgcaacacctcagccgcctccactgcacagcttgtggaggccacagaggagctgcggtgcggaagggcctaagaatacatggtgggatggggcagaggcccagtggaccagggctgaagcctctctaaacacccccctctccatcattgcaggcgtgaaattggggaggccactgagcacctgactcagctcgaggcagacctgacagatgtgcaagatgagaacttcaatgccaaccatgcactaagtggtctggagcgagataggcttgcacttaatctcacactgcggcagctcgaccagcatcttgacttgctcaaacattcaaacttcctgggtgagttgttagccaactaggcaggtggaccagggtcagtcttcagctgactgtctgcctctgcccaatttaggtgcctatgacagcatccggcatgcccatagccagtctgcagaggcagaacgtcgtgccaatacctcagccctggcagtacctagccctgtgagcaactcggcaagtgctcggcatcggacagaggcactgatggatgctcagaaggaggacttcaacagcaaacacatggccaaccagcgggcacttggcaagctctctgcccatacccacaccctgagcctgacagacataaatgagctggtgaggttgaagtgttgggtggggcaggtgggtgtagatgttcctctcacagggccctgacttgttctgtgcctggcaggtgtgtggggcaccaggggatgcaccctgtgctacaagcccttgtgggggtgccggctgtcgagatgaggatgggcagccgcgctgtgggggcctcagctgcaatggggcagcggctacagcagacctagcactgggccgggcccggcacacacaggcagagctgcagcgggcactggcagaaggtggtagcatcctcagcagagtggctgagactcgtcggcaggcaagcgaggcacagcagcgggcccaggcagccctggacaaggctaatgcttccaggggacaggtggaacaggccaaccaggaacttcaagaacttatccagagtgtgaaggacttcctcaaccgtgagcctcccacgtgtcccaggccatgtggttgtcccctttggcaactcccggtgtctgtatctcccttggttcatacttgagcctcagggactacactggattagtgtttatgatcccttgactggctcctgagttattgcccatatgtggtcccaggtccatgttcttgagtctgagccccttgtatagtccctgtccttgtgattatatccttatgcctggtaacaaacccctatcccatgtacatgtcctgagtccataccccaaaactgtatcctcatgcccatgctggagaatctatgttcttaagttcttgctgtgtccctatagaggagggggctgatcctgatagcattgaaatggtggccacacgggtgctagagctctccatcccagcttcagctgagcagatccagcacctggcgggtgcgattgcagagcgagtccggagcctggcagatgtggatgcgatcctggcacgtactgtaggagatgtgcgtcgtgccgagcagctactgcaggatgcacggcgggcaaggtctgaccccatccctggcccctatccctgacacctggttttgatacctccaggttctgattcccccttctccccaggagctgggctgaggatgagaaacagaaggcagagacagtacaggcagcactggaggaggcccagcgggcacagggtattgcccagggtgccatccggggggcagtggctgacacacgggacacagagcagaccctgtaccaggtgaggtcttcctaggacatcagtgggacaaggttatgggcatgaaccgtagatctgtgtaacctttggctcacccatggcaggtacaggagaggatggcaggtgcagagcgggcactgagctctgcaggtgaaagggctcggcagttggatgctctcctggaggctctgaaattgaaacgggcaggaaatagtctggcagcctctacagcagaagaaacggcaggcagtgcccagggtcgtgcccaggaggctgagcaggtgggttgaggcagagccagctggagaaggtaggggtggaagatgggcctccactgagctaccacgctaacctaaccctctacatctgcagctgctacgcggtcctctgggtgatcagtaccagacggtgaaggccctagctgagcgcaaggcccaaggtgtgctggctgcacaggcaagggcagaacaactgcgggatgaggctcgggacctgttgcaagccgctcaggacaagctgcagcggctacagggtaagaaatggggcaccagagacacaagactgcgggaaaccccccctaaactgacacctgcccttcctagaattggaaggcacctatgaggaaaatgagcgggcactggagagtaaggcagcccagttggacgggttggaggccaggatgcgcagcgtgcttcaagccatcaacttgcaggtgcagatctacaacacctgccagtgacccctgcccaaggcctaccccagttcctagcactgccccacatgcatgtctgcctatgcactgaagagctcttggcccggcagggcccccaataaaccagtgtgaaccccca

SEQ ID NO: 415 - DNA, 107310 bp, Homo sapiens
  source 1..107310: mol_type = genomic DNA; note = NC_000001.11:c167916389-167809080 ADCY10 [organism=Homo sapiens] [GeneID=55811] [chromosome=1]
actaataatacaaaaattagctgggtgtggtggcgcacgcctgtaatcccagctactccagaggctgaggcaggagaatcacttcaacccaggaggcggaggttgcagtgagctgagatcgcgcctttgcactccagcctgggcgacaagagcaaaactcccatctcaaaaagtaacaatatgtatcctgtcaaaaactctcattgccacttggaacacatagcctagttatcagtttcacaactattctcaaagacttagtaagaatatattagaagtccttactatcaatgcagttactgaactccgtaaaaataatttccacagtggtgcaaatcgattagtatagttgagttgaattctttatcacagctttttgacaggtctttattgatagcttcactatgtaagttttctttctcaatgccaagtctgacagccctgggtttcaactcaactctgccacacattaactgtgagactttgttaacctctgtctctgacctttaatattttcaagagcaaaatgaggataatcatagtactgacttcataggattgttctaaagattgagataaggttttaacacagtgcctggtccacagtaaatattgaagatatggaaagttcaggaaacgggccaggcgcggtggtgcatgcctgaaatcccagcactttgagaggccgaggcaggtggatcacctgaggtcaggagttcgcgacaagactgactaacatggtgaaaccgcatctctactaaatacaaaaaaattagctgggtatggtggcacatgcctgtaatccgagctacttgggaggctgagacaggagaatcacttgaaccagggaggtggaggttgcagtgagctgagatcacgccattgcactccagcctgggcaacaagaagaaagttcagaaaatggtaatcttattaattgaaggtagacccagaaagtacttttctttaagtactttaaaggaagttttaattttactacaaaaaggatatactgtgttaacctatttgcacggtttctgaactaataactttatagcagaaaagaagctgcttggggtagaggagtagtaggtggggtggagaatgctcaataagagataaattctttagtctttttttgtggtatggcatctcttttaaggaaactttgatccaaggtatgtcagtgctgctgtttcctcatagtaaatattttcttttttaacttataaaatcatagcgaaaggttgaatgttaatgaggatggacctcaaagctaaggttcctttctgtaaaacaaaggtctctactggagcctgtttatataatgaagcagaaatagaaaacactggcatttattaagaatagctctccctaaggggattgtttaattaaatgaggtatgattctaattataagactggtttccacaactcacaccagaaaattcactcaatgaacataattaaatgaccctcttgttttcctccctaagacaactgtgttttacaacatttggaagtacacagtaaacaattacagagcggggctttataggagaacatgtacagctttttaaataagactttttaaattccaattttaaaagctgtgcccctaaatgataattgtggttgtgatgatatacataagaacatttagaaaatcaacacatgatttaagctgttagaaaacacaccagcctcttaaaatacatttttccagtgtcacatcagataaagaaaactcaaatccagtgcccattggatttcaagttatctttgggataaatttgattaaaagcgtgcacttgaccagtcagaaagggcaggtatataattcttcaaacaaaaatttacctcacaaatatatctgaaggtaagtattgaatttattataactggtaaatttcatagtcctggtacaagctgtaaccactattgactaaaattaggtgtttgcttgctctggagatacttctgatgatcacctaccaactattgcctaatttcaaccatcctccacatggccaagggaagaattgtgtaaactactctggggtcatgtcagtctcccctgacccttgcctcaaatgtgcggataagagaacctgaaacagccagtccttccttgtacagtagtaggccactcaggttggtgggggaggggacggcagtgccacccaatcagaaacatggtcggtgcccgtggaacaatgagctactgatgagggtgtggcctggaaaacggcttttagacaaaactgtcattttatgggtcagctatagacagacatggcgcttcagctgtcttcagaataatgtcacccggcctcctctcctgtcttctgcagtcttaaaagacctagtccctaactgaggtctggcttttcctcagccctggatgaagtggaggtatgtggaagtaagagtctcagcagaaagattgattgcagagctgaagatgagggcgaccgtcaggaaagaagacagctattgcagaggagtgggaagcctggggctagaagtcagggttcaagtttgtgtatacctctgtgtcagtcccttacatgagcttagaagcttgaaggcttaaatattgcctcaccttctcaacctggatgctctgtctttctagcttactttctttatttgcctcttttctgcagtttctcacgtgatatcctcctttttatcagtcaacaactaccaagtgcctacctcttgaagggggctctggcaaggtgctgtggagtaaacaaagatatgtagaagatggttccaaacggggagcttacaattcagatgaagacaaaatagaagcaattcaaaagataatcaaggatatttgtatgggaaataagccacttaagtgtagacattaagagccacaatagctcagaagaaaaattaccatggctagagtaggcaagcaagctttcatgacaggtaacactgtgcctttaagttcagagtatctccctctttggactcgtgaaacctgactttacatgtaggtgaaaagttgaatataaaatctattaggaaattctagaggagagatttagagaaactgatgaatataatcgaaccctaatttctcttttcatttttgggtactactgagttttctttactcacactccgcattcaggaatccttcttggtttatctttcgggcctcattcgcctgcttgccttttgactcaggtatcctcatttctcattccaaggtgcttccgcgctttgtcagtacccatgctgttcatgctgtattcttgatgtgatagaattggctgaacagttgataagggtaccatcaacatgcattgaaagtgctcttaaattaaacctacatcttttgtctaggtcatatacatccccaaagtgctataaagcgtatacaaatgggatatagcatgatatagtagaaacaacagggactttcaagtcccacagacctggatattccagctttataacccagagcaagttaatacctctgtgcttcagttttcatatctatagaaatcaggtctacttcatagcgctgtttggatgattaaatgaggcaacctatgtagaattgatacggctccgatgagtggaggaacaccaaggttcttagtcctcatcccggtttagataaaacgacacagacacatgtggagtgattttaaggatcggagagtttaataggcaagaaggaagaggaaagagggaagaagctcccccatacagagacagagggaggggggctccaaagccgagagagggaacccccagtggggtggacgtcagctaggtatatattacagacgctggaggaggcagtgtctgatttgcatagggttcaggggattggtttgaccaggcatgtcattcacaaagcccttgaaaaagctagccctctcaccctagccttttaatatgcaaatgcagggtgccatgatgttctacacacgtgggagtatgtggaggtggccatgttgccaggaacatgtggggcaagggaaagaaggcctccggaatcgccatgttgggtgggccctgtttctaatggccttcatttgcttatcaaaggttgccggcctggctctaagagccaaggctttacaagaaattttctggagatgctttaaaaaatgaaaatttcccaaggaccccttttcctctctatctgcctaaaataatttcttaataactcctacaatagaatgcttcacataaaaaggtcataataaattataattacaatgtggtatgtgcctgtagaaaggtaaatacagctatcactaatcattttgtgatgttgcagaacttaaagcagaaaactatatcttcaaaaatagaaaatttctattgtcttttatgggtgttcataagaaactcccagatatttattttagatctccctgccttttaaacctatcattttcttcttttagtttcacatctacatatgccatcttaatctcaaaatgcatgtactttccttgtttggtcatcataaacagaaaaatctgtccaagttcattcacatcaccttaattaaaacaatagaatcttaacaatcatctaattcatctctacactgactaaaatcacctctgtttgaaacgcttgttctccaatgccataaagaaatagcacttgaacataaatttatttagtaagggcatttttacttcctgcagagagggtatactcgccagcagttttgccacgagagtacactgaacaaaggagacggggtcatttataacctgacacgttcaccctactgcccattggccggaacaggacctcacattctgtatttgtcccgatcggctagcaacttagaacttttaaaagaggcaaaggtagaggagaacaaaagaaggaggaagtaacttgtggaatgctgagaaaagtaaaaatacttttaaataaggaagaggaacaggctatgacctaatggttgcttggaccagtataagcatgccagggcaaatatttaggctacattgtgggagccaagaacataaagtacattgatttctttattatggctagcagatatttaagaatgttagcacaggtctttgaataaattttgcttttaagataagttactatttattcctaattagacggggaggaaagtctttgaagaggaacctctactttactttttatacctctaccctcacaggtagatagctattcaacacttcctaaaactgcccagtttgaacactcattcttacattgtttatatttgtccttcggtgattgccagtcattgatcctagttgatcctgagcaacaaagaataaacctaacccactttccatccagtgttaacaactttagcaaaacagtctatactatgcatgtgaggagagtgtggtattgccaagattgaaggggctgatagtagggctgctagaaagaatgcaatgtttggaatatatttatactaaaaaattgtttatttaaaattcagatttaactgagcatcctctgttttcattagctcagtctttcaatcttacaagcttggtagctaaagaagtcaaagttgagccagtgaactgggggcaggagagggaagaatagagctacgccctgctcagttctgctcagtcctatcttagttctctggctactcagcacatctgtggaagccacttcagagcacccatgcctacggaacatactgtttacagtcacttattctttgataactagctccctccactgaagaaaaacacaccaactttcctttcccactgcatacttcccatgaactttaatcttgctaacccaaaccaaatttctacctcaaggagaaggtagggaagttgttctttgattgcagggtcccacattacaccttgcatacacacccatgtcccccacttagcccacgtccaccacttaccccacaactttcacagttcagcccaaatatttgaagacaactacaattttaaccaaaatgtcataattttctgacttatttccagtctctgccatcattcctcacattccagagtcaatgaattttaaagaggtcaatgaacttcagtcctctggattagatttgaacacttttatgtatcttaaaattgcattgcatccaaatagctagttaacatatgaaaaggtgcttaatctccttagtaccaacaaggaaacacaaaaccacagataccattgtagcaggacgagccacagacaaaaccccttagacacccgggttaaagaaggaagaggctttattcggctgggagcattggcagacttgcatctcaagaactgaggtccccaaagaaacagttcctggcccttttaagggcttagagctgtgaggggttccacgtgaaagggtcataatagattgagatctgtagatagcacatgtggttagaatgggggttaatcttttaacctcagacctggtcatcagtggcgccggctggtcttgccactgacttcattcctgtgtttttcagcttttacttcctctttctcttcagagacaagagacagtaagagaaatggcctgtctcctcaccaccacttacctagcaagatgactaaaagttgaaaagcctgacaaaataagtgttggctgagatatgtagcaactgaactgtcataccttgcctgagggagtgtaagttggtaccatcactttggaaagctgtttagcaagatctactcaagcaggggtatccaatctttcggcttccctggggcacaattggaagaggaagaatcatcttgggccacacataaaataatactaacaataatgatagctgatgagctaagaaaaaaaaatcacaaaaaaatctcataatgttttaagaaagtttacaaatttgtgttgggctgcattcaaagccatcctggaccgcatgtggcccacaggacatagcttggacaagcctgtactaaagtttaacatgtgtataccctatgacccagcaattccactcctgtgtatatacccaggagaaatgcatacatcttttcaccaaaacacatgaataagaatgttcttagcaccattattcataatggtctaaaagtgggaacaacccacaggtcaatagtatagtggataaatgttttgtggtatattccatcaggtgatggaatactatatagcattgaaaatgaacaattattgatatacaacaacatggatgaatatcacaaacacaaaatatgtagtatgatttcatttatataaagtttgaaaactggcaaaggtgatctatgttgttagaaataagaaaggttaccttcagggaaaagagaagggtagtgacttgaaggtggcatgagaaaaacttctggaaagctggtaatgttttccttcttgctatgaatgggtattacacggatttgctcaccttagagtaattcaagctatacacttatgatttgtacattttcctacatgtatgttatgcttcaataaaagttttttaaaagatagcactaatttgcagtaaatctagttttttagcacctcgtgcttatgcatttgattttgttaaaaactctaaacacagcactttgcacttattcttttgaaatttcattattttggttgattaagatgtattaaaatcctagctctgtcatcagtgcattagttctctcactatattttcaaattttattttccctcagctttattaaggcaaaaatgacaaaaagtgtacatatttatggtgtacaatgtgatgttttaatatatgtatacattatgaaataattaaatcaaggtaattaacgtatcatctcacatacttaacatttttgtgtggtgagaacagttaagatctactctcttagccattttgaagtatataatactttattaactgtattcaccttgctctaggttagatctccaggactttttcattgggtctaattgaaactttgtatccttcagccaccaacatctcattccacccacccaaccccagcctcaggcatcaccattctactctgcttctatgattttgacttttttagattccatatataagtgagatcgttcaatatttttgtctttctgtggccggcttatttcacttaacataaggccctccaggttcatccacactatcatacaagaaagaatttccttctgttttacggctgaatagtactccattgtatacattatccaatgttttctttatccattcatatgttgatgaacaattaggttggttccatatcttggctattgtgaatagtgctgaaataaacatgggagtgcagggatactgatttcaattcctttgggtatatacccagatgtgggattgttagatcatatggtagttctatttttaattttttaggaacctgcatattattttccataatggccgtactttcaattatatctttatcaaagtcttctatcgtgcccatggaggcttacctctgagttgacaccagaatactaatcaatttccattaggtgtgattgctaaccagccaattatattttctttattcctataattttgtatattttactcacaaggatatgagaaatttggccaaatgccttaaagtcaatatatacattgtctatagcagtctcttgatttaaaagtttaataactcttccaaaataggaaataatgttggcttgctcttggctctgaatccatttgactccttttaatcacctcttgctaatctaaataaccattgaggctgctcccaaatattccaactctctttcctattgtgcacatggtaggagtgcacttccctgtctacttgaaactaggcatggtcatgtaatttgctttggtcaatgccatgagtaaaagtgaaatacgtcacttctgggagtagaatgagtatactccactacatcctctttcccactaccttgacaaccagaatattccagtttgggtcccaaagtgaaggcaaaaacagaggagaaccccatacaacccacaagggacatgtagtgtgagcaagaaatgaacaagaaataagcctttgttatttcaagccattgagatttcaaagttatttgataatgaaacataacctgtattatctcaacaaatacattatgtttactggtctgtgttttctgggatccatgagtagcctcatcttttgaaattcaaaagagaatgtgcccatctatggtattccagcccatctcttgttctccatggttttttgagattactgacattacacctgtcagttctttcagtatctgtagatatatgttgtctgggactagctagaatttatttaaaatgactgtgtgctttagcactacttatcttggatttcaattctttcttagcaatgcttgttatacttttcaatcctccatggtggagaaggtagaaacaaaagaaaaggtgtatggtacaccatacttaagcttcatccttattcctcttttattaattaccttgttttcaacaaagcctttaaaaatccctctaggttttcttaactttagcattttttgtaagtctttcattctcgacattcaattttcttgtacctttctttttattatcattattattattttagagatggagtctcactctgtcacctaggatagagtgcagtgacacgatctcagctccttgcagccttgacctcctgggctcaagccatcctcccacctcagcctcctgaatagctgggactacaggtgcatgccaccacacccagcaattttttttttttttttttgtagagatgggatttcactatgttgcccaagctggtctcgaactcgggctcaagcaatactcctgtgtaggcctcccaaagtgctgggattataggcacaaaccactgcatctagcatctcacacccttcttaaaagttcatatagcaccaaatttactatctgaagttatttatttgatttaattttatctattgactgttcctggcacatgctgtggtcttttgctgcatttttaatgctaccctttttttttttaaaccttagttatatgtttctttcttttgttcacttcttaacatttgagtttgccaggacttttccttttaaaggttatccaatatgtaacatttagcactcattttttagaatactaaatacatttttaaatgtatactatatacattttaaagtttgtctgttaaatgtacaaatatttttccctgagttattttttaaatacttccccttaaatctaagggatataagcgactgtctcaattttttcctctaatactctaatatatcccaatatgacctactaacaagttcctctctgctggtcagaattaaaccaaaaataacagttccttttcttaaaaaaacaaatcctcttatattttctgtataacctattccagtaacttggattgctctgaaaaagtaaagggtgtttgcttttactgttcaggctggtagagcatgatttttacaacatttaggcatgagcatttaatctgccccagcagctacaggaaggccttaggaaatcctagttttctcagaactaactgggcaacaaattgaaatttcagcatttccttccatttacagcttaaggtcttccatctttccagctgccacacacacacacacacacacacatttctgaactcttttcttccatttatttaacattatacctttatagtcttaatctcttgcctatatacaaaactctaatactcacttacatataaatacactcacacacacgaatcacatctacactttttttttttttaaagagagaaaaaagtaaaagaccaaggtagagagagggtaaaaggaaacatgaggacagaagaaaaagaagtctggcctgagtgaatagagcttaacagcccactacaactggacttgccctgcgagggcctaccccttcctgcaaatgagttgagccgttcagctaccctctttcaccccagcctctttgtaatggagctcacttatgcaacagctgttcagggtgggagggttcttcctctgtatagaaattggcccttttgaagtgtggctcaacaactctggcattttcaccactataagcaggccgcaggttagaacaaaacaaatggagaaagagcaataggaaaatgagcaaatgaatatatcagatttcctctatttcaattttctttttagaagacctatttggagactgcttcctgtcaccataaaatcctgaacatttgtcttgaacatgaacactccaaaagaagaattccaggactggcccatagtcagaatagcagctcatttaccagacctcattgtctatggacatttctccccagagcgaccctttatggattattttgacggagtcctgatgtttgttgatatttcaggcaagtgcaaaagggatgtttgtttaatgtggatgagcaacaggctcgcgtgggaattcacatgcagagcttgattgcagagtagggaggccattctggagcccttgggctgtcacagcagatgtgctccactgagaacacaagagggaggaaatagcttgtggccctggctctctctcatcctcccttactcaggactgccagtcataggcatatctttaacatgctcaagtcccattctttgctccagtatctctgccccaacttcactgactcatcctctccagccccaagccccatacacatcccagtcaaaattgacctcaggaaatgatctccctagatgatgtttacatcttactaataaacttgccacctcttcagaagtgtttgaaatgtgtgtgtttttgttaccacggaatgaaaattttattcccagttaaagaagttgcagttatcactgtacagttgagaatttggaagaaagaaatatctggagccttttcctgacccctaaaataatagctagaggaggctgcatgtctgacacttgaccagccacaaagatccttaagaagaaactctgcctgtttttaaaagctgaggccaccgggttcggtggctcacgcctgcaatcccaacacttttggaggccgaggagggcggatcacaaggtcaggagttcgagaccatcctggctaacatggtgaaaccccatctgtactaaaaatacaaaaacgagcctggcatggtggcgcacgcttatagtcccagctgctcggaaggctgaggcaggagaattgcttgaacccgggaggcggaggttgcagtgagctgagatcacaccattgccctccagcctgggctacaaagcaagactctgtctcaaaaaaaaaaaaaaaaaaaaaaagctgaggcccgctgccttccagggtagtcctcttctggctctgtttgattcccccaagcagccaaggaaaccagctgcacatttattccaggttttactgcaatgactgagaagttcagcagtgccatgtacatggacagaggggctgagcagttggtggagatcctcaactaccacataagtgcaatagtggagagtaagtgttcccataggtttctggcttgagaatatttcaattcattgttttttccgtagttgtcaattataacctgatagagtacaattgcttagcactcctcctcttccccatgaaatgtgtataaaaccagtcttttttgaaatatgatatagtataactgaagaaataaatataatcaaacctcactaatacagactatttgagggaagggatgttttgtgttagagggctgaattatacactgcttttaaaagaactgtagtagtaatacttttagttatatatccaagtatttatatttatttttatttatttatttagagacagagtcttgctctgtcgcccaggctggagtgcagtggcacaatcttggctcactgcaaccttcgcctcctgggttcaagcaattctcatgtctcagcctcccgagtagctaggattacaggcgcccgcccccacacctgtctaattgttgtatttttagtagagatggggtctcaccatgttggccaggctggtctcaaactcctgacctcaagtgatccacctgcctcagccccccaaagtgctgggattacaggtgagagccagggtgcccggctatttttatttattaatttttttttttgagtcagagtctcactctgtctcccaggctggagtgcagtggcacgatctcagctcactgcagcctctgcctcccaggttcaagcgattctcctgcctcagccacacacgtagctggggttacaggcgtgcgccaccatgcccagcaattttgtatttttttcagtagagatagggttttaccatgttggccaggctggtctctaactcctgacctcaggtgatcctcccacctcagcctcccaaagtgctgggattataggcgtaagccaccatgcctggcctatccaagtatttttaaaagccagcatctataaaacccaaagatagtcattaagagattgttgtatgagtagataaatgatttataattagcttctcaataatttgtctcctaatgatggatgctgaagcacttagagtgaactgaaaactttagtccccttgtcaacctctgcctgccatcttgtttgcattgttaattcaaactattcatgaagacaacggtttactctgttatggtgaactcctggcctagtgttttatcagactctgagttccttagtaatatcttgatgttacccactagacaaaatttaatgcttcataaaagcaggaactatggttgattcctttctgcatctgacttggcacaacaggtgcttaaccaatccatgatgatgcgtaactaaaagagagaatggccatttatgccataccgtctaaataaacaaaatacaaagttggtaataaccaaaaatgcaagtgactatggttgtgattttcccattccctgactcctagtttttgtggagtcctgtcattcatccacccacccatgcttacacaagccccagcctataacatatattgatcaataaattaattaaaagcattccattatcgtgggaggagggcagctgtcttcagacctcatcagaaaccctagctgcctttctcctgtctttccccattcacagaaatggagcatagatgtaaactggttccacgtactcattctccacttgaggaaacagactcaaatgggttaagtggcttgtctgggatgagatctttagtataagcctattctctgaatcactgttcttttgacctagtttctattccactaagaaagaatgatgtttttttactacctttaaggaatcagggtttgatttaattttttttttttttctcagaagtgttgatttttggaggagacatcctgaaatttgcaggtatgggggcttactaagatagaaggggtaagaaaggagtgctgaggtgcctgtgcttctgtgttggggacaaaggaggcatcctagagaagggagtggccaggagataggctgaggaatgcttgatgagtaagtttctatacagatctcatacaaaatagattgatccccagggcaggtcaaaagcccgcggcatgtctctctctgaaggtgatgcactgctagccctgtggagggtggagcgaaagcagctgaaaaacattatcacagtggtaattaaatgtagcctggagatccatggattgtttgagacccaggagtgggaagaaggcctagacatccgagtcaagataggtaagcatttgagaaggaataaatcctacggcagctgggatagggtcttgactcctggggcatctctctctcccaaagagaagtagtagaacatggtggctcagccccatgatgccctgaactttggcatcaggacaatcagaatgtgaattttggcttcctcacataccagttgagagaatttgggttaatcataatatctacctaataagctattacaaaaagtaaattagttggtatggtagttaatgcataggaaccacccaataaaatagtctttatgactgctactgctgttattattattccatcttgctgcttgtcaaggttgtgcagtataaaacaaaatagagactagcttgccattacatagtttcagcaacgacatgagactggtcaccccctacctcataagaatgaggtgtaggaaaagcttaacaggtcagcctgcaacacagctccagctttacacaaggcttcttaaagttatacatataatatagtaatagtcacacatatttccttattacattgcagacattacacactatgcacgtgcaaacattacgcacactatatgacagtcctgagatacaggcatcattgtatccatttcatagatgaaaaatgagattctgagaggtataagtaatgagtaacagagttatggttggtgctgttggtgttagcttccgcctaactaaactttgcaaaacttagaattctcacatgtcatacctgataggatcatcagcagttatacaattaactgtttctcagccttctttaacctaggcccgcttttgatgttgttaaaaatttccaaataaggccaggtgcagtggctcacacctgtaatcccagcactttgggaggccaaggtgggtggatcacctgaggtcaggagtttgagaccagcctgaccaacatggtgaaaccccgtctctactaaaatacaaaaattagccaggcgtgatggcgggtgcctgtaatctcagctacttgggaggctgaggcaggagaattgcttgaacccaggaggcggaggttgcagtgagccgagatggcgccattgcactccagcctgggcaacaagcgtgaaactccatctcaaaaaaaaaagcccaaataagttaaatattttgttgaaaaaaaaatcaaagttattataatactgaatattttttctaagttagtacccaaggagtctgatgtgttatccttcttgagaatgatgggaacccagccccctcttgcatgctgattggctgttagtgaggtgggtcccagcacctttttttagagtaagtccaaacatcagtgtgtttcagatagaaaacaaactgtatgtagaatcaggggggagtcagccctgacaaatcagtatagcagagagcgaagataaaaaataaacattgattgtattacagtcatttgaaagaaatgtgtgtcacttacagttcatttatacatatattttgtgtacatgtcatattatacaatatcttcttctgtcacttaggttccaaaactttcatttaccaacttaaaagcaatgagagaaatggttgttgggatgggatgtgtaactgtcaaatgcatacttcctttcccccaccctttgttgtctaaaattcaaccctaagggattatttttagttacagcttcaatctctgctaaaatgcaaattctcccaaaataagaattattaaaggtattccctgttgcccttaagtatacataattgaagaaaaggtaaaaataactttggggactggtaggaccatgtagtgagataatgttacagacaggcaaaatttagtggtagaactttctagctttggaagaaggggagctttggaaggcccgagcccaaaagaggtatgccataattcctatgtaaagttttagaagtgagattttgctctgagatagtatagtcccaccaagattatggtttttccaaaaacctgtgctgctgggaaataatccagaacttcttgtgcaaacctattccttgccttcttgccaggactggctgctggccacatcagcatgttggtctttggagatgaaacacacagccactttctggtgattggtcaggcagtggacgatgtgcgccttgcccagaacatggctcagatgaatgatgttattctgtcaccaaactgctggcagctctgtgaccggagcatgattgaaattgagagtgttccagatcagagagcagttaaggtgggtgtgatgctgctacttacagaaagttctgccagcctgtaacagaggccccctgccagaagagtcactgggcacgctggtttcataaagctcctgggctggagattgggatggggtcagtctgggttaggctacagaggctttagtccagggcagctcctctgggaggagcccaggctggtgagcttgaggaggaaatgattaggcttctttatgggtaactgaggatatggaatttggggattgaggccttttgaggggctagcgaccttgcttaaggaaccagaagggtctgccggttcatccaggagcagaggggaatagttttaaaggctgtcattgaccctcactttctttacccaacaccctcctaacccaggatgagggatcactgaaggtaaaggttggagttgagcaagtgcggcgaagttcagtgatagaagagagacttctcttcctgtggctctgcctagtagaaaacattgtggttaagttgcagattgactataagcagaactgtccctgggatatggacaattaaaaaagctgtgctttgagggtatgaaagtggaagaaaggtgtgctgctagatgagccaaaggaatgggactacgcggcagaaagaaagaaaagacagagaatccgtgcagatgctggtcaagataggaggcactcccacactcatgcatcagcctacaaccctcaccaccaccacccactcctcactcttccagcaagacatatccagcctgcatggcctagctggcttatagcaatagcccattcccatgctcttcaatcattctttttttaaaaaaaaaaaaacggagtctcgctctgttgaccaggctagagtgcaatggcgtgatctcggctcactgcaacctccgcctcccgggttcaagcaattccctgcctcaaccttccgagtcgctggaattacaggtgcccgctaccacgcccagctaattttttgtatttttagtagagacggggtttcaccatcttggccaggctggtcttgaactcctgacttcgtgatccacccacctcagcctcccaaagtgctgggattataggtgtaagccaccacgcccagcctctcttcaatcattcttgatacctttaaaaattgttttaactttgaattcatgttagacttacagaaaagttgaaaaaataatacagagtttccatatatccctcacctaccttcccctaatgttaacatctttcataacaagactgcaatagtcaaaaccaggaaattaacattggtacaatactatgcactagttaaagaccttatttgaatgtcaccagttttcccactgtggtccacttagtggaatgttccaggactgtatgcatgatctcacattgcattttgttgattttttttttttttttttttttttttttgagacagagtctctctctgtcgccccaggcttggagtgcagtggcgcgatctcggctcactgcaagctccgcctcccgggtttacgccattcccctgcctcagcctcccaagtagctgggactacaggcgcccgccagtacgcccggctaattttttgtatttttagtagagacggggtttcaccgttttagccgggatggtctcgatctcctgtcctcctgatccgcccgcctcggcctcccaaagtgctgggattacaggcgtgagcccctggcgcccggccttgttgatatttttgatgtagtctcctgcagtctgcaacagcacttcagtggttccgttgtcttgcagtgaccgtgacacaagagagttgccagccgatgttgtcacacacatctctggttagcactgcctgatgctttctctcatctcttctgcatctccaacaacatatctctctctctctctatatatatatacatatatatatatttttttttgagatggaatcttactctgtcacccagtggggagtgaggtggcatgatctcagctcacttcaacctctaactcccagtctcaagcgattctcccaccacagcctcctgagtaactgggaccacagacatgtgccactacacctggctaatttttttttttttttgtatttttggtagagacaggatttcaccattgttacccaggctggtctcgaactcctgagctcaagcaatctgcccacctcagcctcccaaagtgctaggattacaggcctgatgttttctctttattggaccaagtttatgcttttttttttttttaaccaagaataccacaaaaatgagatcgtgccatcctcagtgtgtcatcacatgtgtctcatgatcttgatgtcttatgactggtgatgctcctaattcctttttggccatcagcccccgtcctttaacacttataaggaagaaatggtgtgcagtttaaccaggttttatttgaattaaaatgttatgaaggaaaaaaagcaggaaaaagttctaagggcagaaaagtataagattagtcccccttggaatgaccctctctgtacatataccaaacattgagatgtgagtgaacactgtaattggaaagattttttagattttcaatttaaaatttcaattttacaaatcaaatagtcttggtgtttaagtgtgccaatcactgttcagtcaaaagcatactctctttctgctaagaaattacacttcaaaggattaaacagttctcagaataactgaaaacttctcatttgcttttatttaggttaacttcttaaaaccaccccccaattttaattttgatgaatttttcacaaagtgtacgaccttcatgcattattatccttctggtgagcacaaaagtaagtacccaccatggaaaaatgcctttgcctctaccagtggtcagtagggtcttatatcaatgccgacagcttcattactggtgggtgggctcctcaacacagctcctggtccttaccagcacacaaaggggacctacttcccattctccgggacagcaattctaagtatgacactccccacaccatccacctctccctaggcactgactcctttccctcatccatcaaacattaataagtatcccctaggataaaagaaaaagtaaagcttctttccgtgctgctttcccctcctaaccttcaccaataaacttctaggaaaagtaatctgtaaatgtatttatacctgctctcatgtccccttatttatttattcatccaataaatattgattgcaagcaccttgatgtctgtgctcacctgctcttcagtcttgcaccgctgacacctagcttctacgctagtcccctgctgtctactgagactgtttatgtcaaggccaccaaggaccattaatttgccaaaccaggtgacctcttctcaggcctcatcctagatggttgaccatagcttatgctcttttcttggacactaccttctcctttttccttgagttcaaaagtattattcttttctagttttgcctttacgtctcaaatcacctattttcagtcctctttgcttagtttcctttccatgtcttaaatgttggtgacttcaggtatctgtctttgaccttctagtcttctctactcacttcttagtgaaccatttattcgtgcttaacttccatatgagtaagatgaggcaagtgagaagactgtatcacaaaacttaagcagacactcactctcaaggtcctgcaagttgcttacatcacccgagtctcagacctaacagccagaattcgcttcagtcttttgtcctgaattctaggacagatttttgtcctgaattcataaaaaacaaacaaaataccctacctatgggcgacttccactggatgtcaaataggcatctaatattaacgtatctgaactttagctacttacccttccctgaaaactccatccaagtgagaaacatcagaaacatctttgaatcattctttctcatcatttatgtacaggtctggagtattttagatgttacaaatagaagactgtacttttacaaagccacaataggcagtggggtggggagtggggagactgtacaaacattgatcaggaaaggccaagaacctcagaagctccagagatgaaggagaaagcctcatgacattacccactccttgagctttactaatgccatctcctgggtcttaatggtaccttctataaagggtttcttcaggccttactttgagcaccataatactgcaatgcaattcctttttttttttttttttgagatggagtctcactctgccaccaggttggagtgcactggcgcgatatgggctcactgcaacctctgcctcccgggttcaagcgattctcctgcctcagcctcctgagtagctgggaatacagaggcgtgccaccacacccagctaatttttgtatttttagtagagacagggtttcccatgttggccaggatggtctccatctcttgacctcatgatccgcctgccttggcctcccaaagtgctgggattacaggtgtgagccaccgtgctcggcctgcagtgcaattctgatgttataaccacctggagttagtgcaggatttcattggttgaatcctctacaaacttcagacactagctgcaagctctgggatccccagaccaccggcacttctgaccaactacctacaaatctggggatctccttaatgccctcaggttcagtaattcactgaaatgactcacagaactcagcaaagtgctacacttacagttatggttttattataaaggctacaaatcaggaccagccaaattaaacacacacacacacacacattttttttcacattatcattttcttccctgctgaaaaccctttgccatttctgtctcccttattttttgactccctcaaactcattcctaccatctcttatcagtctatcctagagcataaaactatcaatctttatagtgaagggaaccacagagatcatgaagctcaactactcttttcccaggtgaggaaataggaggcaaccagggcagcaaagtgacttctccagggtcacacagtgaagcggtatcaagcctgagatcagaaaccagtcttcttaatgttattcctgctgccctttcaactctaccatccccttcattctgtcaccatgctcctctcttgtcattccctcatttgtttgttcccatctcctgtggcaatagttctaaaccaagttcagaagtgaaaatctccctaagtcccaaagcgtcatgtcagtttgaacaaggttttgagctacatgtgactgaattttgggaaacctttaacctctaagagctcctctttggatttcccctggccctttcagcccctaggtgtcccagagtctcctgacaactgtaaggacaagaaggcccactgcccaagagaatagggactgggagcctcctctcactagcactgcagagccaaacttccctctctgagcctgcaccctccttctgccttcttagacctcctgaggcttgcatgcacgctgaagcctgatcctgaactggagatgtccctacaaaagtatgtgatggaaagcattttgaagcaggtattttcaaaattgaatttactggctttggggatgtcagggatctggacagctggaattttaagatttaagaaaaaaaaaacagcagctactagtaaatagtaaaatgttccattaaaataaaaagacttccttttttttttttttttttttttttgagacagagtctcactctgtcacccaggctgaagtgcagcagcatgatcttggctcactgcaacctccgcctcccgggttcaagcaattctcctgcctcagcctcccacatgcgccaccacacccagctaactttttgtatttttagtagagatggagcttcaccatgttggcctgactgatctcaaattcctgacctcaagaaatctgcccgcctcaccctcccacagtgctgggattatgggcatgagccaccacactgagcctaaaaagacattctctatatgtaggtgactgtgaaattcattgttcaaatctcaatactttcaaagagatcattattcataattataatatgacaacaggcataaaataggactgcgttgccttatataattgcgcaaatgggagctgttgcaagcatataagaacatgcgggcaccctttctatatgccacatagcagaaagacttcaagtggatgaacattggtacactatttctccaagtcatttgcattagctcttaagttttgagatttaacaatgcaggtaattagaatactctgagctacctccaccctccaatattttctctttttattctcttaatcttggttctctcaaatttattattccatgtgaattataactatctcttatcactcaccatatgccagtcactctgctagttcatgtatttattctttacagtccttggtagatatttttatcctcattttatatgcatgagaaaactgagacccagagaacactacagcctttcctgaggttgtcaagtaaaagatatagctaggatttggaccctggtctatctgacttctacaatttttgcacaggctatccaccctcctaatatatgcctgctttaatacttagtcccatcaaaatgctgttgtgtcctggaggaaatctttgtaacaaaggcctgtccagtgggtagctgccttcatagagtgaattggagaggtatcagaatgcaccctgccaccttcagcccattgtaaaaacattacccctagtgcctgcattgcttgactcttcatggcttttgaagcttaaaaaagtcaccccattctcccgcagccattctcaagagatataatacattatgcttctttaattgcaaccagttgaaaacaaggtctttagcaatggaatataagatggactctgtgagtcactgggaaaattccaggtaggaaaaatgtttacctggtgaagaggtacagctaagagggttgaaaataagaccaaagacaaccttttacaactttaccaaaaccagaccctgaacccaaagaagagaagtccttaaagataccgtagtcctcttttccaagccaaaactcagaatacatagtctgacagaagttttttatttatttgtgaatgattttatttgaaaaatcaaggccaggctcatgcctgtaatcccagcactttgggaagcccagacaggtggatcacttgagcccaggagttcaagaccagcctggacaacatggcaaaacctcatctccacaaaaatacaaaaattagttgggtgtggtggcacgtgcctgtagccccagctactagggaggctgaggtgagaggatcacttgagcaaggagacggagcttgcagtgagccgagattgctccactgcactccagccttggggacagagcaagaccctgtctctaaaaaaaaaaaaaagaaaagaaaaaaattagcacattggttaattagaaattattaaatctcttttataaaaagaataaaattacatgaaaccaggaccttctaggcaattaggaagcatggctgcattattccctataccaattccttctttaatctagaaaatgtgtttcacattgtcgttgaagaatctgacacttctgtgctatttcggggagaaagtgcagtgattttcccccattgatttgctatgtatttaattaacaaaattcagggatgatgattggcagggataatttgggaacactctcctttctttcttttttttttttttttgagacagagtctcattctgtcgcccaggctggagtgcagtggcgcaatcttggctcactgcaagctccgcctcccgggttcatgccattctcctgcctcagcctcctgagtagctgggactacaggcgcccgccaccacgcccggctacgtttttgtatttttagtagagacagggtttcaccgtgttagccaggatggtctcgatctcctgacctcgtgatcttcccgcctcagcctcccaaagtgctgggattacagatgtgagccactgcgcccgacccaacactctcctttattttccctgtgcctgttgtgttggagagaagaggggaactaaatgaaatataccaccaccccagagaggcaggagagtgtggcagattaaatgttagatgagccaagcgtgatggctcacgcctgtaatcccagcactttgggaggccgaggtgggtggatcaccaggtcaggagttcaagaccagcctgaccaacatggtgaaaccttgtctctactaaaaatacaaaaattagccaggcgcggtggcacacacctgtaatcccagctactcaggaggctgagacaggagaatcgcttgaacccaggaggcggaggttgcagtgagccgagattgcgccactgcactccagcctgggtgacagagcgagactctgtctcaaaaaataactaactaactaaataaataaataaatgttggatgaggagtctggagatttggattctagtttattgtgtccttatgtgaccttgggaaagctgtgttacttctccatacatcagttatctaatcggtaaaatggggataataatactgatttcattttgtttgaacgtagagtaggacagaatgtgaaaacattccagaagatacctaatgaaaatggaagtttgaattacatagcatgctattcttatccctaactataaaaataagagagccaaactcccagatggcatctgtggacctgcctggggcctggaggaactcatcaccctgaagggaaagacacaaacctggctggctttgcacctgctgattgtagagtgctagagccttgaacaaaaataggtggtagcctggtagtagtcacagtgggccttgggcaatatccagtgctgtgctagcttcaggtctgacccagtgcagtctcagtgatggtagccacaagggtgcttgtgtgaccccacccccagctccaagcagctcagcacagagaaatagagactccatttgtttgggagaaagtaagggaagagaacaaaagtctctgcttggtaatccagagaattcttctggatcttatttaagaccacaaaggtggtacctctataagtctgcaagaaccatagcattactgcacttgcggtgctctgtaatatagatatggcttagatcacaacacccaagtttttttgaatatatggaaagccttcccaaggagggcaggtacaaacagtcctaaatgtcaaagactacaataaatacctaactcttcaatgtccagacactgacgaacttccacaagtatcaagaccatccaggaaaacatgacctcaccaaaggaactaaataaggcaccagggtggagagacagagatatgtgacctttcagacaggtaattcaaaaaagctgtttgaggaaactcaaagaaattcaagataacacagagaaagaatttagaaactttcagccatgttaactaagaacagaagagaaaagacccaaataaataaaatcagaaatgaaagaggagacattacaactgataatacagaaattcaaaggatcattggtggctactatgagcaattatatgccaataaattggaaaatctagaagaaatgtataaactcctatacacatacatcctaccaatattggaccctgaagaaatctaaaacctgaacagataaataacaagtaacaagatctgggacccgaagtattcactgctgaattctaccaaagacttgaagaactaataccaaccgtactcaaactactctgaaacatagaagaggagggaatacttccaaactcattctacaaggccagtattaccctgataccaaaaccagacaaaagtacatcaaaaaaagaaagctacaggccagtatctctgatgaatattgatgtaaaaatcctcagcaaaatactagcaaactgggttcaacaacatattaaaaagatcatccatcatgatcaagtgggatttatcccagggatgcaagggtggttggacatatgcaaatcaaacactgtgatatgtcttatctacagaatgaaggacaaaaaccatattatcatttcagttgatgctgaaaaagcagttgataaaattcaacatcccttcatgataaaaattcccaaaaaactgtgtatagaaggaacatacctcaacataagaaaagccatatagaatagaccgaccactagtatcataatgaatagggagaaactaaaagcccttcctctaagatctagaacacaaggatgcccactttaccactgtttttcaacataatactggaagtcctatgtaatcagacaagagaaagaaagaaatggcatacaaattggaaaggaagaagtcaaattatccttgttttcagatgatcttattatatttggaaaaacctaaagactccaccaaaaaaccattagaactgatacacaaattcaacaaggtcacagtatacaaaatcatcatacaaaaatcagcatttctttttctttctttttctttttttttttttttgagacggagtctccctctttcgcccaggctggactgcagttgcgctgtctcggctcactgcacgctccgcctcccgggttcactctattctcctgcctcagcctcctgagtagctgggaccacaggcgcccgccaccacgccccgctaattttttgtgtttttaatagagacgaggtttcaccgtgttagccaggatggtctcgatctcctgacctcgtgatccgcccgcctcggcctcccaaagtgctgggattacaggcgtgagccaccgcgcccggcccaaaaatcagcatttctatatgctaacagggaacaatctgaaaaagaaatcaagaaagtaatcctgttaacaatagctaaaaataaaataaagtacctagtaattaaccaaagaagtgaaagatctctaccgtgaaaactataaaatgttgacacaagaagttgaagaggccacaaaaaaaaaatgaaagatattccatgcttatagattggaagaatgttcatactacccaaagcaatctacagattcaatgcaatacctaacaaaataccaatgacattcttcacagaaatagaaaaaaaaaattctaaaatttacatggaaccacaaaagacccagagtagccaaagctatctgaagcaaaaagaataaatcaggaggaatcatattatctgacttcaaattataccacagctatagcaacccaaatagcatagtactggcatgaaaacagacacatagaccagtggaacagaatagagaaacaagaaataaactcatacatctacagtgaactaatttttgacaaaagagccaagaatataaaggaaaagacaatcccttcaataaattgtgctgggaaaactggatatccatatgcagatgaatgaaactagactcctatctcttgctatatacaaaaatcaagtcaaaatggactttgagacatcaaaccatgaaactactacaagaaaacattggggagactctcaaggacattggagtgggcaaagatttcttgagtaataccccacaagcacaggcaaccaaagcaaaaatggacagatgggataacatcaagtgttttttttttttagaattattttatcagataaaaaattagtttcattgatgagtttttttaatcttttatttttatatttatttatttatttttattatacttttaagttctagggtacatgtgcacaatgtgcaggtttgttacgttatgtatacatgtcccatgttggtatgctgcacccattaactcatcttttacattaggtatatctcctaatgctatccctcccccttccccccagcccacgacaggccctggtgtgtgatgttccccaccctgtgtctaagtgttctcattgttcaattcccacctatgagtgagaacatgtggtgtttggttttctatccttgtgatagtttgctcagaatgatggtttccaacttcatccatgtccctacaaaggacgtgaactcatcctttttatgggtgcataatattccactgtgtatacatgccacattttcttaatccagtctaccactgatggacatttgggttggttccaggtctttgctattgtgaatagtgccacaataaacatacatgtgcatgtgtctttatagcagcatgatttataatcctttgggtacatacccagtaatgggatggctgggtcaaatgatatttctagttctagatccttgaggaatcgccacactgtcttccacaatggttgaactagtttacagtcccaccaacagtgtaaaagtgttcctatttctccacatcctctccagcacctgttgtttcctgactttttaatgattgccattctaactggtgtgagatggtatctcattgtggttttgatttgcatgtctctgatggccagtgatgatgaacattttttcatctgtctgttggctgcataaatgtcttcttttgagaagtgtctgttcatatcctttgcccactttttgatggggttgtttgatttttttcttgcaaatttgtttaagttctttgtagattctggatattagccctttgtcagatgggtagattgtaaaaattttctcccattctgtaggatgcctgttcactctgatgatttcttttgctgttcagaagctctttagtttaattggatcctgtttgtcaattttggtttttgttgccattgcttttggtgtttcagtcatgaagtccttgcccatgcctatgtactgaatggtattgcctaggtttcttctagggtttttatggttttaggtctaacatttaagtctttaatccatcttgaattaatttttgtataaggtggaaggaagggatccagtttcagctttctacatatggctagccagttttcccagcaccatttattaaatagggaatcctttccctatttcttgtctttttcaggtttgtcaaagatcagatggttgtagatgtgtggtattatttctgagggatctgttccattccattggtctatatttctgttttggtaccagtaccatgctgttttggttactgtagccttgtagtatagtttgaagtcaggtagcatgatgcctccagctttgttctttttgcttaggattatcttgacaatgcaggctcttttttggttccatatgaactttaaagtagatttttccaattctgtgaagaaagtcattggtagcttgatggggatggcatggaatctataaattaccttgagcagtatggccattttcatgatattgatttttcctatccatgagcatggaatgttcttccatttgtttgtgtcctcttttacttcgttgagcagtggtttgtagttctccttgaagaggtccttcacatccctatataagaagctgtaacagctctatagaaaaaaatctaataatctgattaaaaaatgggtaaaaggtctgaataaggccaggcgcagtggctcacagctgtaatcccagcactttgggaggccgaggtgggcaagtcacgagatcaggagttcaagaccagcctggccaacatggtgaaaccccgtctctactaaaaatacaaaaaattagctgggcgtagtggtgggcgcctgtaatcccagctactcaggggctgaggcaacagaatcacttgaacccaggaggcggaggttgcagtgagatgagatgtgccactgcactccagcccaggtgacagagtgagactccgtctcaaaaaaaaaagatcgaaatagacatttctcaaaggaagacatacaaatggcaaacaagtatgtgaaaaatatgtgaaaaggtgcacaacatcaccaatcatcagataaatgaaaatcaaaactacaataagattatcatcttaccccagttaaaatgacttttatccaaaagacaggcaataacaaacgctggacaggatgtggaaaaaagggaatccttgtacactgttaatgagaaagtaaattagcacagccaccttggagaacagtttgaaagttcctcaaaaagctaaaaatagagctaccatacaatctagaaattctactcctagatacatactcaaaagaaaagaaatcaatatattgaagagatacctacactcccatgtttactgcagtgctattcacagtagtcaagacttggaagcagcttaagtgtccatcaacagagaaatggataaagaaaatgtggtacatatacacaacgaagtactattcagccataaaaaaaatgagatctgtcatttgcaacaacgtggatggaagtggaggtcattatattaagtgaaataaaccaggtatagaaagagaaaccacatgttctcacttatttgtgggagctaaaaattaaaactattgggctgggcatggtggctcatgcctgtaatcccagcactttgggaggccaaggcaggcagatcatgaggtcaggagttcgagaccagtctgactaacacagtgaaaccccgtctctactaaaaatacaaaaattagccaggcatggtggtgcatgcctgcaatcccagctactctggaagctgaggcaggagaatcgcttgaacccaggaggcagaggttgcagtgagccgagatcgcgccactgcactccagcctgagcaacagagcgagactccgtctcaaaaaaaaaaaaaaaaaaaaattaaaatgattgaactcatgggggtagagaatataaggatggttaccaaaggctgggaagggtagtgggggatgaggaggaattgggggtggtcaatgagtacaaaaaaagagaaagaatgagaaagacctagtatttgctagtacaacagggtaactatagtaaaaaataatttaatcattgatatggtttggatttgtatcccctcccaaatctcatgttgaattataatccccaatgttggtggaggggactggtaggaggtgattggatcataggggtggattatacccttgctgttctcgtgatagtgaatgagttctcatgggatctgattgtttaaaagtgtgtagcactccccctgctctcctctggccatataagaagtgcctgcttctccttcgtcttctgccatattataagtttgagtcctccccagccatgcttcctgtacagcccatggaactgtgagtcaattaaacctcttttccttgtaaattacccagtatcaggtagttctttataacagtgggagaacggactaatacaaccatacattttaaaaataactaaaagagtataattggattgtttgtaacacaaaggataaatgcttgaggggatgaataatccatttaccctgatgtgattattacgcattgcatgcctgtatcaaaatatctcatgtaacacaaaaatatatacatctactatagacctacaaaaattaaaaaattttaaatttttttaaaaataggagagccaaaaagaacagtagttatttcccttattgcaatggctcatattggcatgaggaagccagcagttggggtaatggagtggttgctggccaaaaattagcacatgcataagtccccactggaagagagggattttgattatatttccatctgctccacttcaggcatgctggctctgtcatgttgtacctcacccattctgaggtagacattccctagatgatttcgggtatgaggtgggggcggtgttgggggagggatccactgccaaggacacctacagaaagctgctctctactttgcagattgataacaaacagcttcagggctatttatctgagcttcgcccagtgacgattgtgtttgtgaacctgatgtttgaagaccaagacaaagcagaagagataggcccagccatccaggatgcctatatgcacatcacttctgtcctgaagatcttccaaggccaaatcaataaagtcttcatgtttgacaaggtaagtgtgaactatgggatgggaacctaccaatagttttaggttagcattcatggacaagcacattggtgagaatagacacaggaaatttaacctagaggctgggcgtggtggctcacgcctgtaatcccagctctttgggaggcagaggtgggcggatcacttgaggtcaggagttcaagaccagactggccaacatagtgaaaccctgtctctactaaaaatgcaaaaattagctgggtgcggtggcacgtgcctgtaatctcagctactcaggaggctgaggcaggacaatggcttgaacctgagaggcggaggttgcagtgagccgagatcgcaccactgcgctccagcctgggctatagcgtgagactccgtctcaactaaacaaaaaaagaaatttaacctagaaggccagtctttgtttataattataacttctatggtggatatggcacttactatgtgccaggcactgttctcaggacctgatctctattgactcatttcatcctcatgaccactctgagcagtaggttgctcttgtcattatcctcattatatagatgaggatgctgaaacacagattaggataccaggacaaggcgagattacgttttgcttatgatcatcaagctagtaagggggaggctgggattcaaacccaggcagtctgccatccccgtctgagctcactatgctgggctacctctcactacgctgggctacctctcactacacataagtctccagctcagtgcatgatgtattacccaggggtttcaggtcaggagtctttagtaaccatcttaccccagaagcttgtttccaagaaagcccacttgccatgtcaacacctccagttccccttttattttcatccatggcagggaggggactgcctctggctcccaggtgttttcgctctgttcttttttttttttttttttttgagacggaatcttgctctattgcccaggctggaatgcagtggcatgatctcggctcactgaaacctccgcctcccgggttcaagcgattctcttgactcagcctcctgagtagctgggattacaggcatgcgccaccacacctggctaatttttgtatttttagtagagatgaggtttcgccatgttggccaggtgggtctcgaattcctgacctcaagtgatccacctgcctcggcctcccaaagtgctgggattacaggcatgagccactgcacctggtcttcactctgttcttaatcaattcagagaaaagtgatgtgatgaacaaatgaccacagatgcatatgtgagaattgatttcccatctcaattccttttgtgtattaaaagcagagcacttaattactgccccacatccactcactcactaattcaacaagcatttactgagcatttcatagaagacgaaaagctagggctgggcagcagagatgagtaacacatatattgacacaaccaggcaggaagcatgcattctatatgagacgaactaactctgtgctatgggagttctggaaagggattacttccagcctggtgtctccagtaccttcttcaatactgacccatgggtatcataagaaaagagtgtagaatctaagagaacagtctttcgtgtcttgcagacatggctccaaagattcccagctgtgagacttagcaagtcattgaacttctctgagccttggtttattcctctttgaatggggatagtatttgtctcaaatgattgtggaaagttttaaataatgtaatatgtgtgaggcacttggtgtaatgcctatcttagagtcagtgtgcaataaatgagagctgtcattccattgctagggggaatcaaaagctcttgccaggccgctacataaatttgcaggcaaaagctccctgcttcccccaaaggggttgccctctttgcacgtacctagaagcagtgtttcccccttcatgtcaaggcagatcccagtcctttttaagatctaacagttgatcaaattcttttggagagggttgaagaaattgaggtattttagtgttctttgcattttatcaggatgtaacatgtcaaaaactcaaaatttcaacccatcaccctttattcacaatgcccttttcttacagacaacagcacctgactgaggtcattttttaagtgactaatactacaaatgccaagttttagagttgaatcattgcatggaacagttagctttatgataagaaaacctacttacagcctaagcctttatccctaagaataacagtatctgcaaagtactttatagtttaggatgactttttgaatatatataacacattaattcttttagtagccaaaaacatctcagcaggtctacagtatatccattttcagagagataaacggaagttcctagattgtaatagacttatctaagtttccacacttgagaagtggcttgaggacagagactttctgattccagagctggtgccttttccactgctctgtgctgctgcttcatagacttaaactgagcactttgcagcatggaccttggccacaggagagagtaggccgaagcatgcacacagatagctcagccctattcactatatctggagcaaaacaagcccttctcaaggctcaagccctcctgttgatgatgcagtagaagtgtttgaagtgtactaaaaataaaatactgtgagagaaatcatgataaaatctgattcagaagccaaaaattgccgccggctctctgttgagccttctggccagtccagtttaaagcacactgtccatcagctgtggttgctgtctctctccctcacagggctgctctttcctctgtgtctttggcttccctggggaaaaggtacctgacgagctcactcatgctctggaatgtgctatggatatatttgacttctgctctcaagtccacaaaatccagtgagtattgaccctggtcccacccagcggtccctgacccttttgaggcataagtagggagggcatgcagggaacaggaaagaaagaagaattaattaagaacttagtcctgtgtctcaaactgttgttcctccttcgcatctccgggccatgtagaaatgccataaactaattccaacgggtagagaaaatcctttcccaccctttcccaacccagacattatttcccacccttcccactttctctacgctcattatctttatttctttccccacaaatcttgtctcccctgcaccagaactgtatccatcggtgttgccagtgggattgtcttctgtgggatcgttggacacactgtgagacacgagtacacaggtgtgctgggtcagctcatctccagctttctttctgcaaacacagcaccttgccactgggctttgcgggaggaagcacaaaaatgagtgagacatgagccctgccctcagaaactttagagtcttccagatggagccaagccatggagccctcaatgcttgcagagtgtgcatttctggggctatgtatgagtagagaaatatgtagtcatgagaggggagcagtgggaggctatatgttgatggaatgaggggctcctgtaatactttcctgttaacattaaatagttacttctcttaattcctggaataagctagaactccttaaaaattatgaatgttgatattactgaaaaataatgacactctcaaaagagagtagtaataagtaaatcttatctccagatttcacaactctattacttcccttttccatcctatcagggtttaagattttcagcaataatgcatctaaaatactgaatatatgtaaaataccacgatagttatgtctgaaatgatacaatgtctgagatgttcttcaaaagtacacagggtggggagtgtatgggggtgaggatggggcaggattagccatgggctaatggcttgttgggatggggtgatgggtatatggaaattcattatattttattttatggtcaaatttctccacaataaatagttttcaaaaagagtaccttgttcagaagtattcaagtttatgttaaagtgacacatttgctacctcatttgtagtaatattaattgaaggcttacaagcagccagctgctgttgaaagtgataaacgtgtattaactaattaatcttcataaaccaccctctcagagagttactattatcatccctattttataggttagagaatggaggcatgaggagttatttaaagtaattgtcccaagtagtttgcacatagttaggggtagagctggtgttcaaccctgcacagtctgccttcagagcctgtgcttcaatcctccatgcacgcctcttctagcccatttactaaatcgagaaatcgccaaatgaaggtttattcataggagcatgcagacacaattttatgtctcatatggagatcagtaccccaggcccaagcatgtgcttgtccaccttgtggcagaagaccaactgacaccttctctgagagccttcagtgctgtggccatcccacttacagagcctgctccatactcaagccccttccatccctgagcaggtcattctcttgacctcccaagtgaggcagaaactttgctaatggctaactaactccctgcacattttgtgaatagccattggctgaatatgggtcttgagactaggcttctgtgtcactcatgaacagcaaagggagtaaagggtaaaaatgctatttggggacaatgtttcagattacattcagttcaatgcctgttatttccctgatctttgactttctctttcttgctatagtcattggtcaaaaagtcaacttagctgccaggatgatgatgtactacccaggaattgtgacctgcgactctgtcacctacaatgggagcaacctaccagcgtacttttttaaagagcttccaaagaaagttatgaaaggtgttgcagattctggaccattgtatcagtattggggccgtactgagaaagtgtgagtgtggagcattaattttgaagtatattttagtaaagaagcgggagaattatgatagcaaagcagtcacccatttaagatttggagccagttcaaaaagttgaaatctatgctttccccagaccaaggcccagacttcaaaatccttaatctttcctccatctgactgacactatggcatggtggaaaatcccattctctcctcagatctgagaatatgagggtaattcttcaaaggttgtacaaaccaaacaaaaaatcctctcatttgagtatctatttgcacccaaatgggcccaatcaccaaccatttaatattatttactaattatgtcaactgtatgccgaggcattgttagggttaaaagagtataagatattatttctcctctaagtctttagtgaaatacattccccaaaagctcagcatagatttatgggtgtcactttgaagcttaaaatccttcaatggctttcagtcattttcatggtgatgttcaaaatctttgcagtgacatacaaggtaccacctgcctttccaacctcatctcctcctgttccccctcctctgggttgtttaagtagattgtcctcatcagcacccacctaatcctggtctattgggaaaaccgcagtcaatttttgaaacccagctcgagggattcatagacattcctctatgaattccccatcccagctagacagttaagctctttccccctttgtcttccttcttcctcttccttttttcctcctatagcatatgcttctattagaacactccttgccctatatcacaattattcacttcctacagttttcacttgttacactgtgaactctttgaagatactaattatttctttattcttatatccccagtgcttggtatacagtaggtcctcaataatgatgaataaatgaatggcacagagagcagaaagttgttattcattagattagcaagctggaatcgaggtcttcaagagtcagataacagaaccagggctgcagttgggtcaaggtgtctttattattcccttcagtattcctgaggcttagcactgtgcttggcatacataggccatcaataaagtgcagtttgaatacatgaatgaataataatttttagtgagtacttattaaacatcaggtactttacctcaaaatatataatccagtcttaatattgaccatacgagatagaaactattataatttccattttataaattcaaaaactgaggctcagagatgttaaatgacttgtctatggccatatctatagtgagcaatggagtcaagattcagtcacaataatgtgaccttacgggcaatcacaaaacttcagtggtgtgcaaaaataaacatttatttttctcacaaatgtggggttcaattgatcttggctggatttggttgatcttgtcttggcttattcacgtgcctggggttcaacagactgttggccaacctggcggcctcagttgggataactagggcaatctggctctatgtgtctcatcttccatccagcatgtttgtcctggcaatactggaggagcaagagagcaggcccaatgcaaaagcatttttcaagcctcttcctatgtcttatgtttgcagatagtccattgacaaaagcattcacaaggctgagtccagaatgagaggactctgccaagttacacagcaaagggcacagatacaggtactggggccattaatgcaatcagtttactatgcaaacccaggactatctgatcccaaagcctgtactcttcatgatttttctgtaccacctctgcagataaaagtggagaaatacacacacagtatgaacagggcctagttcctgcccagaaaactcacaatcaagtggggaagaccaacatacacaaacttagctgtatgttacatgggaacctttgatatatgctataagagaggcataacaaagtagtattgtagttcagagaagggcataatccattttgactaaaaggcttcttcaagagatagtgttatggagtgagcaaacatatgcaccctggcctatgtttggatactgtcagtatcctgtgttaccacctgctatggggtcttgggcaattaaactctttgtgcctgaatttcctcactggcaaaatgaacataagagtagtacttttttttttttttttttgagatggagctttgcttttgttgcccaggatggaatgcaatggcgtgatcttggctcactgcaacctctgtctcttgggttcaagcgattctcctgcctcagcctccagagtagctgggatggcaggcgcaagccaccacgcccagctaatttttgtatttttagtagagacaggttttcaccatgttggtcaggctggtctcaaactcctgacctcagatgatccacctgcctcggcctcccaaaatgctgggattacaagcatgagccaccgtgcctggccagtagtccttttttttctttttgagatggagtctggctctgctgcccacgctggagtgcagtggtgcgatctcggctcactgcaagctccccctcccgggttcacaccattctcctgcctcagccccctgagtagctgggactacaggcaaccgccaccatgcctggctaatttctttttgtatttttggtagagacggggtttcaccgtgttagccaggatggtctcgatctcctgacctcgtgatctgcccacctcggcctcccaaagggctgggattacaggcgtgagtcactgcgcccagccaagtagtacttcttaacagtgtttttgtcaggattaaagaaaatgatgcatgtaaagcacttggaactgcgccagacacatagcatgtgctccaataaaaggcgcgctattattgtttgagcaattggtggaatctttgcaggatgtgtgactctgcaccacattgaaatctactgggtcgtatatcaggtgtctgatctccccagaaaggggtttctctaccagtgcagactcaacagcatttattgaacaatgtgccagatgctatggaaacagatgctacctgagttctttggattctccactaccaagtcagaccttctcgtttctccttcttttggcgtttgcgacccgtgagtcaggggatagactcttgttagcaattgagaaggaaactttctgggaactaagaactaatcactcttgctctcaatatgtccctgttttgaatctagcatctgttcttttgttcttctcttcagcatgtttggtatggcgtgcctcatctgcaacagaaaggaggattaccctttgctgggtaggtagtaggccttgattttaaacttctttattgaactaaaacaaaacatgcagaaaagtacatcaatgataactgtgcagcttaatgaattatcacaaaatgaaaatataatcatcatccaggttaagaaatagaaaaatagcaatacaccaggattactctttccttcttcctttccccaaagtcttctaacaccctcgattacttatgcctgtttaaaaaattgatacagatggaatcatacattgtataattatatacggcttatatatactttctcttactcaatggtatgttatataattcatccatattgttgggtgtagctgtaatttattctatgtcattactatgtagtattccatttttataaatatacaacaatttacccattctgttgctgtgcaacatttgggttatttccagtttttggttcttatgaataatattgccataaacattcttacacaagtcttttggtgaatgcatgtatgcatttctgttgagtacaaggtaggagtaaaacgtaggactgaaattgttgggacaaagggtgccaaatagttttccaaaatggttgtatttatttatattctgactgagaatgttaagagagttccagttgttcttcatctttggcaacaacttagttttatcaatctttatcctttcaataattctgttgggtgtatagtggtatcttattatggtttccatttgtatttccctgatgtggttgagctccttcttcataagtttattggccatttggatttatttatttatttatttattttgagacagagtctcactctgttgcccaggctggagtacaaaggagcaatcttggctcactacaacctctacctcctgggttcaagtgattctcaggactcagcctcctgagtagctgggattacaggtgtccgccaccatgcccagctaatttttatattttagtggaggcagggtttcaccatgttggccagactggtcttgatctcctaacttcaagtgatccacttgccccagcctcccaaagtgctgggattacaggcgtgagccactgtgcccagcccagacatttttttaaagtacctgtacaatttttcacctatttttcaactgggttatattttgattatcttttggaattatttacacattctagagatgggtcctttgtcatttgtttctactgtatatcacttttcccactctgtgtttgcctttttactctcaattatgcatttaataaacagaattcttaactttaatgtaatcaaatttacctgtcttttatagttagtgcttctgtatactatttgagatacctttccttacccaaaaatcatggagatatttttctagcatttttttcagaaattttgtttttaccttttatatttaagtctacaatccatttggaattgatatttttgtgattcctggtgatagggaccttattgtaagaaagataactcgagattagacaggggagtagacctaaaatgaggaagggatatacctataagagaagagacccaaagaagattgacctgtggattctgaaggcagccacttctagtagcacttgtaatttccttctgtcagacacgaacatccccaaaagtcttatcataagttaaatcttggtcctaactgtgtcaaggcaattaagaggaggctctgtctcacactttggagaaatattgggccacaatcttggtgtcagcagagcctgaaggagggcaacagttccagaactgcaaaaaaacacttgggccagcagaaatgcctcactttcactgctttcaggtagttttcagggtcttcaagccaatcacttcatttaagtccagattccaaaactcctgaagctagagagaaggaatacccactctcaccctcctcagaggccttacttttcatcctaggatatacttattttactaactgacagcaacagaatcctaaccttctttctacaagattgcagacccaacatgacagtcacattagaacacattatgtggatatttcttttttttttcttttgagacagagtctcactctgtcgcccaggctggagtgcagtggcgcgatctcagctcactacaacctctgcgtcccgggttcaagcgattcttctgcctcagcttcccaagtagctgggattacaggtgcacaccaccacacccagctaatttttgtatttttagtagagacggggtttcaccatattggccaggctggtcttgaactcctgatctcgtgatctgcccgccttggcctcccaaagtgctgggattacagacgtgagccactgcgtgcagcctatgtgtatatttctcagtctgatctagttgcccttttgcactgattccaccagtatgacataaagatcaggtccacatacctttccttcaagctataaccaaacacagattgtcagaggctagcagcatgggaaatgcccttcttttacaagggctgctataaatgaaattgcaacagcatggttgacaacaaaactataataaataaatagtggctttttagggtaaaaactgcatacaacagtccccgatattgaggctttgcttagatagaaacaaggtgcatgcatttcaagttaaggagacaatctcattttagaatccagctaaagatactccataaggttctaccagtaggtgttctgtatgaatagaacacagggagctggaagagtcagctatgcaggctttttttttttttaagcttccttaggaaactttattttttttgagatggagttttgctcttgttgcccaggctggagtgcaatggcgccatctcggcttactgtaacctccgcctcccaggttcaagcaattctcctgcctcagcctcctgagtagctgggattacaggcatgcaccaccacgcccggctaattttgtatttttaatagagacggggtttctccatgttgaggctggtctcgaactcctgacctcaggggatccacccgcctcggcctcccaaagtgctgggattacaggcgtgagccaccgctcccagcctggaaactttattattttttatttatttattttttattattatactttaagttctagggtacacaatgcacaacgtgcaggtttgttacatatgtatacatgtgccatgttggtgtgcagctatgcagcctttgaagcctcatcttctaagttcctatgtgagcttcattcaggccaaagaaaaacacaaaacatctcacgaaattgaggttcaaatgcattttcagaaagggaatatttcacccaaaagaagcaatacagtctgctaagtagttctcactaagccatactcagaaatgtatattaccaagcaaagcacttagcttctttttattaaatgtctacacttgaattaatggtccttcaacaaagacattagataatacctggatatttatttgttctatcagtgaataacaaaatgggcctccacattcatctgcccagcacagaaggaatagttagctctcaatgagtctccaacttttttgacagaaattgctcactgcttagaaattacaattcttacagctccttacagcagggtttcagatttcacccagggctgttacagtatttaaaaacacacaagaaaaataagggttgtaacccaaggtgatttttatttttttcttttccaagttttccatattttctacagcaagcatatgttagttttataatcagaaaaaacctataatctattttcactaagaatttaagttgctcttatgatagaaataatctgtacatgatttctgaaggcaaattgaattttatccctggtaatgctttttgtagccctgaattaagtataatcttcatttacagagggcaaatttcctttatcacagaatcagaaataaaaatattttatccataattgtttaatgtaggaaaactaactttaataaatttatttcctaatgtaatagtctacatattacttctagtgtgttgaataaaaacaaaaaacaaaaaacaaaaaaaaacaagctttagggttagatagccttggcttaattcctggttgtgtaatctaagcaaatctcagttttctacactataattaaacattataatgaggattataagaatactttctctcacagcttctaatcaaatgaaactgcaaaaccacatggttagctaaaaagctcccaggaagatttaaacaattttgaaagtgcataaggcttgaagaaagtctgtgaacaatgccatggaaattccaagtttttttttttttttttagatggagttttgcttgtcgcccaggctggagtgcaatggcaggatcccggctcgctgcaacctccgcctcctgggttcaagcaattctcttacctcagcctcctgagtagctgggactacaggcacccgccaccaagtctggctaatttttttttttttttttttttgtattttcagtagaggcagggtttcatcatgttggccaggctggtcacgaactcctgacctcagcagatccgcccacctcggcctcccaaagtgctgggattacaggagtgagccacagcgcctggcccaaggatatttttagaaggagggtttctatgtgactttttatatctctagactattttacgttgattgagtttgctcttttttaaaactaaaaataacaggacgtaataaagagatcaactacttcatgtatactatgaagaaatttttgatatctaacagcagccaagtcttaatgtatgagggattaccaggatatggaaaaagccagatacttatgaaaattgagtacctggcccaaggtaagaatcacaggtgagtgtcttggaatgattgttctgtgtgaacccatagaatcctgatttattttgatgctcctctccttcctataacttgccttatgtaaattatctataacctacaattattggatgccatgacccttgtgctaaatagataactaacaataaacacatagagctaagaaaaagagaaactgggctgacccatggatatcctgatttaatgccaggaagggcttggttatttaaagtttcctaagtaatcccaatattcagacagatcgagaacaattggcatagatgttgagatcaaggctagatttggtctgcagaacaaacacttaagtttatccagctagctgacagtgtagcaggaccagctgcagacaaaacccctcagacaccgagatagtgaagggagtggctttaatcagctgggagaatcggcaggctagcgtctcaaaatccgagctcgtcaaggtgctcaacttctgcccttttaagggctcacaactctaagggggtctgcatgagagggtcgtgatcgattgagtaagccagggggtacgtgacaggggctgtgagcactggtggtcacagtgaaacagaacagaacgagagatttcacaatgtccttccatacaatgtgtggaatctatagataacaacagttgctaggtcaggggtcgaattttaactaccaggcttaggtcaggcaggcccaggcctggtttcgggtctggttcttaggcgccgggctacctgcctttagtttcgcttctctgtccttttctgagtataaaacaatataaaacaatatgagagggtctctctcttccctcatttcccccgtttgagactctcactttttattagtgggagttctcactcttatttttgccacttatgccttcttgtgcaatagattgatagtgattcatatagtacacttgtgttgaggcattttggtgaactaaggtagcaatgaagctttttatcatttgaagaagtacaggcagcaagcaagggagcagtaagcaggtttctattactattataactcctatataagagttttaaatcctcctagtgctgggaaccaccttctaaacatggcttcagggtcgaatccgtgctacactcgtacgggcatatgtgccagttttgtcatgtttttaactatgtctttaactacgtctttaactacttgcctttgattatctatgtgtagacagtaattagtaaggttaaatttttatagacctctctttcagctgctagaagtagtcgagagccaatctattttgatagatagcatttcttatctgagtttcttgccgggccagaatagtcaaggcttgactggttttattagtgatgatttctaaaacagcttgcaaccgtatgattcagttgagcatgtaaatgggggtctggtatacccatgagccatcttgtgtctaagtggcaggcctatagtattgtataattttttaggtggtcattcatcatctttttaattatctatggctatgtttcgcttttcgcggaaagcatagacagggaagcccaggagttcgcctatttgtatgggcagtaggaagaaagatggtttaatagtgccaataacacaactacctgtccactggtcaggcagcttagcgtaggttctatgtccacgtatccagtatagcctagtggggggctgtctagtcccggtggaattctgggtgggcttaaacggtctgcaactttggaaatttactgaatggatttttatctgtgtggtttgaactccaccatgtaactgtttttgtggtaccattatacagtttttgtcctaggcaactaagtcatcctacaggatgagtgaattctttccttttttcagctatgcaatattgtctaataattgagacttttagaacctagaaatgatcagggtgattcttttgggccgggaattcatcaggaactgggtctgtaggcactaattctcgggcttcttatgccattgatctcttattacagtttctccacaaacgtaacatgaggtgacatttagagactgggctacatgctcggctaattgcaaaaacaaatttctggtttttcctggagtctctggtactggcacatttagttaatcatagaaagtctgaaatactggttccggagagagtttacgaacctcctcttttactaaggtatttactctaggatctagtccttttttatcgacgcccagagatacgtgtacttctttttttctaccttgggtttaagggatttgtaattactaatttcaaggggttgcagcttccactcgtacaggaggggctgccttctcctttttggagctaaacagggtctttttcatcctttttctaagtagcctagatgacacaagaccagtaattacacacatttgcacatgagcttaattcgtggcagatatacttatttcctgctgtgtaacttttttttttttcagtttaaagaaccgcatcttattctatgccgattgctattgatagtggcacaagcattaaattttagtgttacatgcttggggatccctctttcttctgtcttagctattactttacttgtgtcacctagaaaaggaccagtccttaatttattttaaaaaactgtgatcattggaggcttaaaatgggtcataacacacatcaggttggttatttcctaggctacataccttggatagaatagcattatacaaacaagtttcttttagagtcctcgtacacttataataaccatgaaataataggactgtagcaatcttttgtcctacctcagtgacttgatgtatatactgggaacagttctcagtctgaggaaggtcagttgaagtccttactgtacaagtccaaattttaaggaaaatgagtcccgtgatgagttttctcatgcttcggccgtgcgtggaccagtcagcttccgggtgtgactggagcagggctttttctgagtcactttgcagaggttggtgaagctgctcccatccacgtacagctcccagtttactgatgtttaaggatggttttggaggttgggcccactagaataaactgagtccaacacttctacacagttatgtttaactgggctctctgataccaggagcaaggtggcggggtttagggtgttgcaaacttcaatggttatgtggggattttcacagagcaagctttggtatctagttagtctagcattcattagctaatgatgtcctttggtactgattaaagtcaccacagcatgggggggactttatgtttaggttttgcctaagagttagcttatctgcttcttgtgctaacagggccgttgctgccagggcccttagatatgggggccagcctttggaaaccccatctagttgttttgagagataggccactggccttggccagagccctacagtctgggttaaaactccaactgccattttttttttttgaagataaccattcttttttttttttttttaagtgaactttctttatatctgtggactagactgtctaaggccacaagattagaagttactataatacatgttacactgttaacttttagcaaactttacttttgttgaaaaccttgtaagtttgggatttcaattatcctttgctatgagtaagaccttgtttagtctaaattaacttagaattggtatagatggccctttttttttttttttttttttggcacatagagtgtgcactttcgtcaggtcaggtagccccagggctggggccgacctgagtttttctttcaactcatgaaaagcttgttgctgttgtttgtaatagatataatttatctaatttacatttttattaacatcactcactaaaatattgacttaaattttgtagctatttgatttcaagctttaaattgatctggtattcctcgtgggactccaattgcgtctaaatggacgtgagagtcgaaagacctataagggggcttctctcgctttacgatgtcttatttttcctccctcttgttgatgaaatgccagggtgaaagggatagccaactggactaaagtataagtgccactccagttattcggcagagtgcccagtaaaggtccaccacaataccaccacacatccgcttggggatgaacaagggctgactgattgataagctcttgaaaattcttaagctcattgcatcacttcaggtctccaaggaatcctaagtttcctctctgtggtgagagacatgaagtgaacttagtgttgggagacggaggctggatggccctcgggggctgacccacagggatagcagagagagtttggcatgacttattactccaggctgtagaatcctggaaaagagctaccatgcagcccacgcctggtggactggaggaccactttagtggaagggggacaatgagggcctctggcctgccatgtgcacaagcataacaactgcttttgtttaatgtgcagatggaatatttgatccatttcaaccaggcatttgcatcttggtatgctgtcttaattgccaaagtttgttttaagtctttaacttctatgatcctctagtaaaatgaatgtttcctttaggacctatttttattagtttttagaccaaagaaagctaaacaccattttatatttaataatacttcttgtatgatttttataccagataagctaaattttacctttatattagtgtgttattaatgttaaacttaattttaataaaacctcatagacatatttatccaatttttcatgtttgaccataaggtaagtttttacagactctttttaaccttttataatttttgttaaagagcaggttggtgcttcaagaaaaacctgttgcatttttactttaatgtccagttcacagaaaaactggatgatacctttttatctttagctaattagtttacacacagaatttttttttacaattaacattttaaaacttgcttaaactttcaaaacaataatttttttaaccttttaatgtaggtaaaaatccacattcttatgcctccttctaatctttttaccaaaagtatattttacttttcttatgcaccttgcacataaactgtttcttcaatagtactcaggaggccttattactttcaaattatacaatattttttgcataaattttttataacatcgttttctatgactttcgcagataattctttgacatgtctcaactttctgacttattacaaatatttctttctttaaacaacagttaatttatttcaagacaagaatttaccatataacactctttttacataaattttgccttcccacagctctttttttttttttttcctgttagcaaagcagctgctgctacagattgaatgcatctgggccatccgtgggttactgggttaaggatttttgataggaaggcctcagtgctttcgggatacgcccttgtttacactaacaacaaagtggtattagagtgttacagggttacggagaatacctttaattatcaattttaggttttaaatttaccttggcttttaaagggaatagggtacactatttttttcttaactacttggatatttctctctatttttctttctctctttgactttctgtctctctctctccctctctctctctttgactttccttttgcctctgtttcttcctctctttctgcctctcttaactactgtgggggcgaagggggtctaaaaccagctgtaattgtctacgtacagaaactggtctgtgtgccttggcttacaggttaccttgtgccatacatttgaaacaagggacctgtctaggcttccttctgatggccaacccacctctaatgttggccagtctattttacacaaagttctaagtttttctagtgtcatagtaacaccgtaatctcccttaaatcctttcttgaaatttttcaacatagtttctagtagggtgggcttatttgtgcctgacccatgtttcttcgagacaaaacaccactctcacaccacatgcacaccacaaaacaaagaacgggtaaaaagggcacgcacacacttttgcagtttacactaaaccaaaatcaaaaccaaaatcagagtattcagaaatccaagccaggtcaaaaccaaaaccaaagtatcaagcaatctaagtcaagtcaaaaacaaaaaccaaagtgccggaacaggcacaccgtgggtgatcagatcaggccatgcttccactcaaatggagtgggaatggagtgggcaagttcccaagaccagtcctgtcaagtaattcaaaccaagtcaaaaccaaaaccaagtgctgataaaggcacgccgtgggtgatcaggccatgcttccactcaaatggagtgggcaagttccaaagactagtcttaccaagttttagttgtccggactccaagtgccaattccttcccggtgttcagccactctgttgatcctccacgggggcctgccacacactgctctggcgaggtgtcccaccggggcaaatgcctacccaggagagctctcaggatccgcgtcactctggctggttggagtccccagcagggatgttccacagggcaggctaaagccgcctaaggagctgcctcgaccatctgttaatcaccttgcttcccggtcagggaaccaagaaatgtagcaggatgagccgcagacaaaacccctcagacaccgagatagtgaagggagtggctttaatcagctgggagaatcggcaggctagcgtctcaaaatccgagctcgtctgatgctcaacttctgtcccttttaagggctcacaactctaagggggtccgcatgagagggtcgtgatcgattgagtaagccagggggtacgtgacaggggctgtgagcaccggtggtcacagtgaaacagaacagaacgagagatttcacaatgtccttccatacaatgcccttccatacaatgtctggaatctatagataacaacagttgctaggtcaggggtcgaattttaactaccgagcttaggtcaggcaggcccaggcctggtttcgggtctggttcctaggcgccgggctatctgcctttaatttcacttttctttccttttctgagtataaaacaatatgagagggtctgtctcttccctcaacagggaatcactagttcaaaccatttagtcctaagactggagatagagaataagaggtctttggatttttccctggaagacagatctaatatacttgtctcatgttgtttatttattttcatataaggaatattatgagggctatctttgggacaatccattctacttcctcatggaagtagatagtatggtattcaataacagtggtgatgaccaggacaataatgatggtgactcatatcccttccccacctaacctaaacagtgtgaggggaaaatgcttgttaatcttataatattcttagctgtatctctatcccacattaaagttaggcctgagaaaggccagttttaaaatatctttatcattgctgaagggataattcacaacagtcagaagacatttgtttattcatgtattcaatcattaattgaattcctactatgttcaggaactactaagtgctgtattcactagccggggcctctgtaaaaaagtactacaaatggatggcttacaacagaaatttgtctcatagttctcaggggtaggagtctgagatcaaggcatcttttcttctctggaccatgaggaagaatctgtttcatgcccacctgctagcttctggtggttgctggccatctttggtgttccaaagatggcttgtagaagcgtcaccctaatctctgccttcatgtcacatggcattctccctgtgtgttgtttgtgtccaaatttctcctttttataagggcatcagttttattggattagaggcctaccctactctagcatgatctcatcttaactaattgtatctgcaacgactctcttttcaaataaggtcacactttgaggccctagaggctaagaatttaacatatgaattgtggggacatgtgtcaacaagtgccaaagccctgaatatcaataaagtctgctctctgccctcaaggagctctcacagaagaggaggagagagataatgtgttagtcgttttcacgctgctataaagaactacctgagactgggtaatttataaagaaaagaggtttcattgactcacagttccacatggctagggaggcctcaggaaaattataatcatgacagaaggcaaaggggaagcaaggcatgtcttacatggtggcaggagagagcgagcaagggaggaagtgccaaacttttaaaccatcaaatctcatgagaactccctcactatcatgagaacagcatggggggaaccgccctcatgatccaatcacttcccaacaggtctctcccctgacactcgggggttgcaatacgggatgagatttgggtgaggacacagagccaaaccatatcagatagcattaaaagttgaatatagtgagggcaacgatagagtcatgcaatagagaattgtggaagttcagagaagaaagggtatgtagtcaaccttaggacattgatgacagtttccaggaggctacacctgagctgagacttgagatgaacctcaaatgaggggcaatgagaagccatagcactctgggctgaggagacagcataagcaaaggcatggagaggagaaatagctctgggtgtgcagggaactctcacctgcttgctgttggtgaagggtagattgctaggcagagagtggcaagaaaggatagaatgaggctttggaaagtcttgtgtgtcacataaaggaggcctgggttcatgccgttaggcaatgggagctcccagtcagagggtcatgacctggatgggggtagtggcttgctattgtggtagtatagggtggcagtaggactagaaaggagagaattagctaggttaaattaatcagggcttaggaacaggagaagagggagtatatcagaagcagcaataaagaaccattgcgagatagcttggaaaatctccatcattatagctgaatatgagaagacagagctttccttcaacctctattattttcaaaaatatatatttaaaaactctcttctgtttcttgattttctcacaaacaggattattgccatttcattgaataagatcagcttccatcaaactttctataccatccagatgttcatggccaatgtcctaggcctagacacttgtaaacattataaagaacgacagaccaaccttcgaaataaagtcatgacactgttggatgaaaagttctactgtcttcttaatgacattttccatgttcaggtaactagctagtattatacttctgcacaaatagccatgggcaggcacagcaactcctctctggtgcattgtgacttagcatctctttggtctgtatatctgcagtatccagatggtgagtaaatggctcccaatcctctctggatgtgcatcaacattcttgacatattagaggtatcttgaaatatcatactcaagaaaatccaaatggccatctgctgactaatttttttcttacctttctatcatagctatactagctactctgggacacaaagtcactctgttcctacaagtgatgccagtgcagactgtgccctgtcttttcctgaattatctaacacaggggtcctcaacccctggtactagttcatggcctgttagaaaccagaccacacagcaggaggcaaccagtgggtgagcaagtgaagcttcatctctatttatagccactccccattgctcacattaccacctaagctcctcctcttgtcagatcagcagcagcattagattctcataggagcctgaaccctattgtgaactgtgcatgcaagggacctaggttgcatgctccttatgagaatctaatgcctgatgatctgtcactggcttccatcaccctcagatgggaccatctagttgcaaggaaacaagctcagggctcccactgattctatctacattatggtgagttgtataattatttcattatatattacaatgtaataatagaagcaaagtgcacaataaatgtaatgcacctgaatcatcctaaaatcatcccctctgccgcagttcatgaaaaaattgttttccacaaaactagtccctggtgccaaaaaggttgggaccacttatctaacacatgaggattttaagacacagaatagttaagtgttttgcccaaagttgcatagccagtagttccctttgctattttcccatactcaatattctcataattctttgtacagttccctatttctcgggagatttccaggatgagcaccttgaaaaagcaaaaacaattggaaatattgtttatgaagatcttgaagctggtaagagcatctgtgggtcaagaagtagggggaagaaaactgggcaaatcaccacaaagccaggtggtttgaggagttcagaccacattggcaagaggcttttgaaggatgtgaaggctttgtcctaaagtgcttcattctcctccatccttccaaacctcaagcaaaaggtctgtttagaatttagatgccttgaaaagagtcccttaacattactcctaggagtctggcctctctcagcactcattttttcatcctttgttgagatataatgtaccaaagtggttacatatgcaggctctgtcgtcagaccactgaggtttgaacccccaggcctatcacttgctacctgagcaacctcaagcagtgacttaccctctctatgtttctgctttatcatctatcaaatggaggaaaataatagtacgtagctcactgggatgtaagtttaaatgactagattatatgtagaaacacttagaacagtgtctctttcataagaaacactcaacaagtgttagctctctcccagtaatatcacgactgtctgctatatattgatcaccaaatttatatttcagtccccacctctcttataaacaccaaaaccatattcctaagagccttgtatatattccacttggatgtagtgactcacgctgagttgagtgtctaatgccaaattcatttttttactatagtgccctttcttcctcatcctgatcctgatccttgatttcattagtagcaaattatgccattctgtatcatttaaagttatccttgccttcttttttgcccacattcccgcatttactcactgccaagtcctactatttttacctcagtctctggaatctccttgtcctcccttcctattgccatagttcaggctcttatcattttttcctggactatttccatagctttccaaaaaactctgtgcttcacacctctctgcttcaattcatccttcatataattctcagagtatatgcaaatcacaccaacccatactttatactctcgaaataagtcccagtggtaataagataaaagccaaaagattttttttaacctagagaaatggtgctcatctttcaatgtcacctctttggtgagaacttccccagatcactagacatgactaattcttcttccaccaggcttctgtaaggctgtgaacacatttctagttatactatacactctatactattatggcatattgccattcattacttatatatctgtttctctctccctcaggaaatcgtgagcctctttttttttttttttttttttttttgagacagagtctcgctctgtcgcccaggctggagtgcaatggtgcggtctcggctcactgagacctccacctcccaggttcaagcgattctcctgcctcagcctcccgactagctgggactacaggcacgcaccaccacacctagctaatttttgtatttttagtagaaatggggtttcagtatgttggccaggctgttctcaaactcctgaccttgtgatccgcccatctcagcctcccaaagtgctgggattacaggtgtgagccaccacacctggcctgtgagcttcttaagaacagagagtctcttaacatttccatatcactattgatgagaaatgtgcctcataattgtacataataaatgatcgatataagttggtggcattgtattatatttataatacagctttcttcttttgtacttcaggtcataggcaagacaatatcagtagtttctaagtgtcagggcttagactgtttgcatcacaagtatttacaagaagctcctttaaaaatatggatttgtgagttctaactctaaagattaaaaaagtaggatgtggattgggcctaggaacctgtttagttgtttgcttttgttttaaaacttttcagttggtgctgaagcagaatcttgtttggaaactgctaccaaagctgtgtttgattatgtactgacaagtctttggaccattaactatctgtgtgaccctgggcaagttacttaacttctctgtgcccaaattttctcagcaaatagattcaatagtaccactttatatggatgttgtgaggattaagtgagttaattatgtaaagagcatcccgcagtacttggaacatagtaagtataatgtaagtgttggctttttttcactttaaaaagaacccaatcctcattttagattagaagaaaccaggccaatgttttattattgaattcatgattttttgttcctgctttattctcttcaatttatgaataattcattaacaaggctatcccaagattaaaacttaaatttctatctgccccatctttttaaagataccagtcaaactcaaaacaatgtagtgcttacctcctcattaattaaactgttctcagggctagtcaaagggctaagtatttggtgacagaacggggctgcaggagtagacttaggtatgtgtgaacaaggcaggttataacactttataatgactgtcaagcacaaagagaaagaatgggttaactcaatctcttctcagagggaaacaaaaagcagccattagcagtctggagcagtgagaactggggagccggttttctgcattgtgacaccttacacagtggtaaggcagagcctgctacgtaagtggttgacgctaaaatgtaggctccgtattttgtttgagactgtattcccagtacctagaacagcacctgaccctgatagatgcacaataaatgcttaatgagtgaataaataattcagactacttaggggagggtagtctatatgagaaaagggacctgtgatctgttttttaagtgcaacacataccacatttcaagctagaatagcatcggctgccagcagggcgaggactagttttgttcagcacctagcccagggggtgctcagtaagcatgtgctgaatatatgctggttgaataaatgtcaagtagatttccccaggacaactgtattgttcaatagattaaaatgactcataattaacaaaccagttatttttatgtaatgggcacttcagttagcttttgtgggtacccctaaaactccatctattctccaaatttgcactatctttacacaaagctttgaccaagtaagagtccattccagccagctctgtccaaatagccacaaattctaagttaatggaatataaatgaatgcaaagttactggaaagaaaagattgaacttagttctttcgctgcatcataagcaaaccaggaagctcaatggatacatatgcatacccatacatgtgtaaaaaaacctgacgtcctatggtgtttctctttctctttctgcatcttgtccagatagtgaaagaggaaaggattatttttatcattgatgaggcccagtttgtggattcgacctcctggagatttatggagaagcttatccggactcttcctatcttcatcattatgtccctgtgtcccttcgttaacattccctgtgcagctgccagggccgtaataaagaacaggaacaccacctacattgtcattggtgcagtacagcctaacgacatctccaacaagatctgtcttgacctcaatgtgagctgcatctccaaagaactggactcgtaagtaacctctttctattctgaactctcgacatctgcatacattccctcggtctagacttcatcagatttcttagtatgtgtcttgatgtgcctatttcagtatctttcctggccccaccttttaaaaaatttttcttttctttttttctgttttcttttgagacagggtcttactctgtcacccaggctgaagtgtagtggtgccatcatggctcactgcagccttgacctcctgggctcaagccatcctcctgcctcagctttctgagtaccagaactacaggtgtgcacctccggtaaattttttatttctgtagagatggggtctcacagtgttgcccaggctgatcatgaactcctgggctcaagcaatcctcccatctcagcctcccaaaatgctgggattacaggtgtgagccaccatgcttggtctggtccaccttttgaaggagccattcataatgcttggtaggatggatgttgctcaccttttccatgttgcctccctgttacgccttcttaaactttgcttagtgaaaagctctatttccctttcatcatggggggtatgggtatactcactttaacctgcagtgactaagagcattgttatgggcaagtgacaggaaaggcaaactggtaagcgttaaagaccatgacctgccactaagcaaggtcttacctggctggcaatggtgtggtctggtattggtgttctctgtctatggcagatgtggaaagctgactcactggtgagtgctctctgagcttttcagtgattcctctcctggggttttctttgttttttgtttgtttgtttgtttgtttgttttttgttttttagacctagtttcgctctcattgcccaggctggagtgcaatggcacgatctcggctcaccgcaacctccacctcccgggttcaagcgattcttctgcctcagcctcccgagtagctgggattgcaggcatgccccactacgcccagctaattttgtatttttagtagagatgaggtttctccatattggtcaggctggtcttgaaatcctgagctcagatgctccgccctcctcggcctcccaaagtgctgggattacaggcgtgagccaccgagcctggctctcctggcgtcctgacagcagtcaccttaacaacatagagaatgttttttctttagctggctgtttacagcccatcttagtatctgcaatgaggttgccctgcttctggaaggaagatgtcttgaacaaaggctcatttaagataactccaggcaccaatttggcactcattctttctgtcggtctctctctctctctccccctctctctgtttaaattatatagaacatgtatatctttccaaagccaaaaaggtacatccttagtcttgcttccctcccttatcctataggtaaccattttgattagtttttggcttatccttccaatgtctgttttaaaaactataaatcaagtgtgtgcacacttattgtgtacacacatgagtgaaataaaaagaaaacaaagcaatgcctcaaaactgaaaacaaacagaaacaaatgaagaatgacaagaaattattttcaagtgattgagaagacttacatatttttccttcctaaaagatgtatcttcaatgtaaacagattgccttgttttcactacaggtacctgggggagggaagctgtgggattccattttactgtgaagaattgcttaaaaacctggaacatcatgaggtactcgttttccaacaaacggagtctgaggaaaagacaaataggacctggaataacctgttcagtaagtcctgcggtgatggttctttcttactctgttctgcctaacttaagtcttcattcagagaaggtagcaaaaatgagctattccacaggctgcttcctgtagagtcagaaggttctggggagccaggaattattggatccgatattccagattgtaagcgaacttaacattgcctgggactcactggactcggctaaagattgtctaactatggccgggcgcggtggctcacgcctaaatctcagcactttcggagcccgaggcaggcagatcacttgaggtcaggagttcaagaccagcctggccaacatggtgaaaccccatctgtactaaaaatacaaaaattagccaggtgtggtggtgggtgcttgtaatcccagctactcgggaggctgaggcaggagtatctcttgagcctgggaggtggaggttgaagtgagctgagattgcaccactgcactccagcctgggcaacagagtgagactctgtctcaaaaaaaaaaaaaaaaaaaaaaaaaagtaactatagtagaaatgaaagaacattgacaaatcttaaggcccagaactgaagggccgctttgatgttatcttcaaaaagcctttccttttttgccagaggtaaaattgctagtacgaagtgagttatcaacaaagatcccgtgctacacagatatatacagggatgaaatctgaagtgatggcatgaaggaggccagttggaatttttaggaaaataattttattgcagggaaaagggtgggggccagagattacaagttggaaagcagagaattaaggctagatagagcaggctttaattgggactttttttgtttccactcccttggtgtttctgagttgctagattcttaagctctaagtcttgaacatgtgaggcaaaaagaaagccctgccatgggacccactgccacgtttttccttgggtcctaaggtccctagctggtctgacttctttccaccttcaatgtcatcttctgtttgttttacacataacgtctaggggttttaactatatttagcaggaggaatagggaaaaacataccaactctctcttcctggaattggaagcctcttcatttttttgtgactcaaattaagtaatacgatgatttaacagctataagcacgacgtgtattaatattactaaacctagagggtcaaaacgtattcctctgcgactaaatttaaagacaagaatataggtgtgagatcagtgtcatgatgaggtgaatacggtgcaataaaggacttatggtgctgctgtctctatgtagcaggatagaaaatcaccacctaaaggtgacaatgagggaaatttcataaaaaagattcctcttgcttcctaaaaacccctgcctcctgggtgaatgaatgatgctcagatgtccctatccatgtttcagtctgtgctgcatctgttgcctctcacttcttgttcaatagcatgactacaggaccatgtggcccccaagggcacatctgtaggagaaatgagacagatggttgtctgagagaacagggcaaagctctaccttttttttttttaaggaacaagaaacattagcttgctttttaaggaaagatcaattttttttttctttctggatgattgtgatgaaaaaatggagaagactttctctggccaaattagttttaaagatgatagtggatcattaaatagataatgactgctatgattattatttttagactaaataattccattataataatattaagatgccaatggattaaaggaaagcgatatgtaaatataaatactgcagagtaaatactatttctaaattttatacatttgtttactttgtttacttgttcaataaatgtttatgtagtatccgttatgagcttttttttttgagacagagtctcactctgtcgcccaggctggggtgcagtggaacgatctcggctcactgcaatctccgtctcctgcgctcaagcagttctcctgcctcagcctcccatgtagcaaggattacaggcatgcaccactaccgcccagctaattttcatatttttagtagagacagggttttgccatgttggccaggctggtcttgaactcctgacctcaagtgatctgcccgcctcgggctcccaaaatgctgggtttacaggtgtgagccactgcacctggccctgttatgagctttttaaaacacaatcaggtgtcttctctatttaaaacccttcagtgtcttttgtgtcttaattttaaaaaactgaaattaaggagagattctggttacataatattgtgaatgcactacaggccgctgaattgtatactttaaaataattaattgcatgttaggtgaatttcacttcaattaaaaaaataaatatgatacataatcctggactggatcctatactggaagaaaagagaatgttaaaggatattatttgatcaattcacaaaattgggatatggacagtagactaaagtattgtatcaatgttaaatttctttttttttttttttgagacactctgtcgcccaggctggagtgcagtggcacgatcttggctcactgcagcctccgcctcctgggttcaagcaattctctgcctcagcctcccgagtatctgggattacaggcaactgccaccatgcctgactaattttttttgcatttttagtagagacggggtttcaccaccttggccaggctggtcttgaactcctgaacttgtgatccacccacctcggcctcccaaaatgctgggattacaggcgtgagccactgtgcccgaccaatgttaagtttcttgaaggtgataactatattctagttatatgagagagtgttggccaggtgcagtggcccacacctataatcccagtactttgggagtctgaggcgggcggattgcttgagcccaggagtttgagaccttcctgggcaacatgacaaaaccccatctctactaaaaatacaaaaattagccgggtgtggtgtcgcacgcctgtagtcccagctacctgggaggctgaggtgggaggattgcttgagccagggaggttgaggctgcagcaagctatgatcacaactctccactccagcctgggcaacaggagtgagaccctgtctcaaaaaaacaaaacaaacaaacaaacaaaagagtgtcaatatttttagaaaatacagagtaaagtatttgggagtatagggtgtgatgtatgtgacttatattcaaatgcttcagaaaaatatgtacacatagaaggaacctaggatatagtaaatagggcaaaggctgacaacaggcgaacctgagtagggagtacattctgtctatcacccttttatttctttcacataattgaattacgagattatccttttaatgtatttatctattgtttaatgtttgtttcccactagaatgtgagcttcatgaggcatggagttttgtgctctcctgaatccccaatcctaggaaaattcctagcacctagaggcaatcagttaatactggttgagtgatggaaagaatggttgtctcaatgctaggtcctggaaggggaaataagcataaaatagcatggaccacgtcatatccttgagccccactctcctactcccaacacacacacacacacacacacacacacacacacacacacacacacggccccctttttggtatgctatcctcccttggctttcctgaccccacactcctcctgttcccctctctgaccagtcctcagataatccttggctctctacctgggtctactcctcctgggacattcttcaagttctatccttaaccctttcctcttgctagcttgccagaattggaaacaactctctccccagttgttttcatttactcatctatttctcagccttcgtgtgtgtcgaaccctaacctcacccttaattccacacccatatttccaattgcccattgaactattccacagattcccttaaacttaataaatctaaaacttcatgcattatcctcccgctcaaccacccctccttctgtacttcgtgtctctgtcacttctatcactgtcttgcttaggccccatttcctccatatctttagtatttgctttctccttgctgaaccacttgcctggttctatccatcctcacttcttgacattccattgttatagctccttacatagtcttccctgtcctagtctctcgccttttccatatgctgcttccagtggtaccttcctaaatacgactagttggattactactatctcctcttcagaaatctgtgacctttccctcttgtctataaagtccagtcttcatattatggtgtttaatgccctccatgctctgctcccaaactagctctccaaacacgtctcccacatagcacctgagcactccaggccctgcactttagtcacgctgggccgctccattcccctaactcgctaagtactctgaggttcctgtgccttcgcgttggcctctcctccacttgccgcttagaatatctcttcatccttcaaggatcaaagtacttcctcccctatcaagcctttctgaatccaccaagtctgatttaattgttattttctgttcccacaacatgttactctttgctctttagctcttaagtcacccatcctgatgttataattagttacttatgtatctgtctccacagatttttaagcctcttgagggctggaagcatgtgttattcacattgatagccttcactggatatgatgcacagaaagtccttaataaatatgtcctgtattgatgtgaactctggtgcttactgtatgtgcccaatcacatggcactcatctactgcctggcagtccagctcttagtgtacatgacttagagctccaggaaataaggaacttggttttattcaccttcctatttccacctcacctagcacagtcttgccgctaccaaggactacatgaatggctgaagggatagaaaaataatgcattttggagtactaggaaaccaaattactaggcacatttactattcaaacttcaccatttaaaatatctctgatagtagctatgtcctaattagagtacagtgcctcacagaatgtgtttgtaactgagtgtgggtatgtaaatgtatacatacaaatatatgtttatgtatatatataataatacattctgatatacattatgtatatacataatacatatataatacattctgataatctgactgtgaatcaaacgtttgtaaagccttatatcctatggaagacatcaatagtgccaattcttttggttgggcagggttggcagagggagacaaaacatttttgagtacatctagattttcatgaatcagttttacttagaataaggtttccagcggcctggtgcagtgtggctcatacctgtaatcccagcactttgggaggccgaggcaggcagatcacttgaggtcaggagtttgagaacagcctggccaacatggtgaaacctcatctctacagaaattagccaggcatggtagtgggcggctgtaatcccagctacttgggaggctgaggcaggaatcgcttgaacctgggaggcggaggttgcagtgagcaaagatcacgccactgcactccagcctgggcgacagtgagagactccacctcaaaaaaacaaaaaacaaaacaaaacaaaacaaaaaaaaggtttccagaatatttggtgagccaatatacatctctgcccagtcttcctcatatgagatccatctcaaagttcattggaaaatcagaccttataagacaggataatgactcaacttttcttcccttttatacccctgtagagtattccattaagctaacagagaagttaaacatggttactctccatagtgataaggaaagtgaagaagtctgtcacctcacaagtggtgtcagactgaaaaacctgtcacctccaacgtcattaaaaggtaagaaaatctggccgggcgcagtggctcacgcctgtaatcccagcactttgggaggccgaggcgggcggatcacaaggtcaggagtttgagaccagcctggccaatatggtgaaaccccgtatctactaaaaatacaaaaaaattagccaggcacacacctgtaatcccagctactcgggaagctgaggcaggagaattgcttgaacctgggaggcggaggttgcagtgagccactgcactccagcctgggtgacagagtgagactccatctcaaaaaaaaaaagaaaagaaaatctgacctggtatttattttctagtccctaaactccactttggctttctctaggatgtctgtttttaaaaggaaaaagaaaaacagcaacattggttgtttgtctgtttgctctgtactgcctgaagcagtgagaaggctcagggtaggcttggctttgctcctaagagccatctttccccctgtgtatattctgggatctgcataaaagaatgaaatattgtacattttcaattaaacagaaaccaaataatgagggagaaaatctaatactgagatacttcctgtcatccacttttatgagaaagaaatgacaaacgagtttatatgaaagacatattattggccaggcacagtggcttactcctgtaatcccagcattttgggaggccaagtcgggtggatcacttgaggtcagaagttctagagaccagcctgaccaacatggagaaaccccgtctctactaaaaatacaaaaaaaaattagccgggcatggtggcgcatgcatgtaatcccagctactgaggagactgaggcaggagaattgcttgaacccaggaggcggaggttgcagtgagccgagatcacgccattgcactccagcctgggcaacaagagaaaaactctgtctcaaaaaagaaagaaagaaagaaagaaagatgtattattattcttttaaagaaaaatgactttcaaggaatgttttagtatgaactcagctccaattcatgccatccataagcaactttcaatgtttagaaaggtggcctagggacatctcaaggtcctcagtcttcaaaagagtgccatttatgtttcgttagctgtgtctactaatgtaagaaggcagtagctcacacctgtaatcccagcactttgggaggccgaggcaggtggatcacctgaggtcaggagttcgagaccagcctggtcaacatggtgaaatcccatctctcctacaaacacaaaaaattagccgggcatggtggtgggtgcctataatcccagctactcaagaggctgaggcaggagaatctcttgaacccaggaggcggaggttgcagtgagccgagatcagccattgcactccagcttgggcaacaagagtgagactccatctcaaaaaaaaaaaaagaggatggactagcttagtttctactgtgttttttgggcaagttgagaaattctaattttgtccctaacagaaggacatcctggtcaaaatgtccagaaagtcacatgagctaccgatattcaagcttagatgaaaagttgggataggagctgtgaactctctgacacttggtcatgacacagagatgataatgtatgtcatgagaatacataaatttctagggcagatagagagaaaccaggagtttctaggagaaaggggaggcagagaagaagatacaaaaggaccagctgaggaagtcaacaaagcacaggaatggcagggcctgctccttctgacaatagtgattacaatgtcctctcctctcctcacacacacttgtcacactttagcacaaaatcagaacaccatgaaatagatcttaattttgtcaggtcattgtgctgtgtgtctttctaggccataagcctgcatctttagtactcccagcacaagtgctatccacaaattaggtactaaacaaatacttcttttgacttagcttggctgagtttcttgcaacaagaactgtagagcaggatggttgtccacctgctctatattaaatacagcatattagataaagataaataactagttttctactgtgtggccttctacctgcagaaatctctctgatccagctggatagcatgagactttcccaccaaatgctggtgagatgtgctgccatcattggcctgaccttcaccactgagttgttgtttgagattctcccctgttggaatatgaagatgatgatcaagaccctggcaaccctagtggaatctaacattttttattgtttccggaatggcaaggagcttcaaaaggccctgaaacagaatgatccctcatttgaggtgcactatcgttccttgtctctgaagcccagtgaagggatgggtgagtagcacctggagtgacccaatttcctcttaaggacccatctagatcaaagaattgacctatgttaggtagaaggggctgatctgttgcccactgcctggctgaaaaaccctttttgctctctccagatcacggtgaagaggaacagcttcgtgaactggagaatgaggtgatcgagtgccacaggattcgattctgtaaccctatgatgcagaaaacagcctacgagctgtggctcaaggaccagagaaaagccatgcacttgaaatgtgcccgctttttagaagaagatgcccacagatgtgaccactgccgaggcagggacttcattccctatcatcacttcacagtgaatattcggctcaacgctttagacatggatgccattaaaaagatggctatgtctcatggatttaaaagtaacctacttcattttaaaattatcctaactgttcttgggaaatctagagactaagatctagaaggagtgggtgtggatcttgagggcttcaagtctcataagcggcttgggcacaaagaatgatgagacttcagcagcctaggccaatggggaagagaaaagtaagggaatgtacctgtattgagtctagcgaaccaatctcactataactgtcagggagggtttggggataggggctctggcaaaatgggatgtgaccagaactcaaactaaaatatcccacttaattcacaccaaaggatggaatccaaaggggggtacaatctgacatgatgacatggtgtttcttggcagataagaatattattgctttgttggtctagtttgaaacaggttccagtgggtaaagaacatgactgagagagaattagccagggctaagcaggtcagggctccagaaaacagggcttggtttcagggcaagaattcaagaccatcggagaagcaaaagttaaaaagttacaagccaataataccaaccagccatgtgatctgagaaaacatagcagaggattcagggggtgtaaggacccaaagactcagtcactatgggcatgatgggtgtcagacacagagcaacaccaccaattctagcccccattcatggtggccagggagctcctaatgggctgcctactctagtcagaggaccttggtgattatggctaaatctggttgggaaatcagaggctacaagtagaggactcctatattataaggatattaaaaatcaggaagaaatgtatctaaactgcctagtacatagcaggtgcaaaataaacttttttttctcattcgttctccatttcatgtgccttctcagtggatcctcatattaaccctttaaggttgatgagggttgttttcattgtatagattttttaaattgtggttctggaagcttaagtaacttacccaataccacagaatgagtgacaggctttattcaatctgccatcagtctaattcctaagttcatcctctgctcattatacctgagctcccccaaatgtggggttggattttaggtaatacttgccagaagataggaagttcgtagacacagcatgaagtagaaatcaagagaatgagaaagttgcagctttgcacagtgggacgagcatgttgttgaaactgcactaacactagtccatctccctttttggaaaacaggaatcaggctgtaggttcagagccttaggatctggaccatgaagatttttagtcctctgagagcttgagtacaaagaggataagacttcagcaatagtctcatctgcactgggcagggaagatgtcaggggaatgtacacctacctgagtctagttctattactagcatttattaaattctctcttgtttgttatatttttacaaaattggtaatattattatcacaaaagtggtatgtgtgtaatattatgttgaaattgaaatttgtgccagagcaccaagatacaactaatgctgcaattcaaactgaggcagtggatatacagaattacaaaagaaatagctgagaatcaattataatcttggatccttcgcccagacctaagacatagaaatgaggaagaggatgtagagggtcaggatttgtgaagagatctctttggtgagaactgatgaggtgctgtgtgccctcctcaagtgggttgtttacttcatcacctcaagcctggtgaggtgtcttccttagaatcagaggacatagaacactggggcctgcctcatgcctaagaaggctgaagtggcctgtggctgcattgggatcaagctgccatcccagactgtgggaaaggatgtgtgagggtttctcatggatcagataaaacccacctgggagaaacagccagtctggaaccattttaagttcttcccagggtgcccttgggagggtaacaagacccttgggtgtggactgctagaatgagacagggataagggggacagactggagcaccgagaagatgcgctgcctgaattaaggaagctttagtgaaggatcccacacagggccctattcaaagaaccaatgaaagtatcagtaggagatgaaatgatggaaagagatgagggaaaggggaaagaagaatatttgactgtgcggggtcagtgagtcatacatatacacacacacatacacatgtacacacacatacatatacatagatgcattttttggtagattgatgttttattttgggggataaaataagctaaaatacactgacagctagaatataggtcagtttgagcagctggccttgagcaggttgactagtgtcatcaaagcaaacaatttcagttatttgcagattttccaatcaactggcagttcagctctggaacatatatgaccaaatgtctctgaataatgtctgctggtatcccttccatcagcacctccacctgagtgaggccacagctctactatttctcttatcagaatttttcacctgttcagaaggctatcgactcgacaaactttagagactttgtaaattccctaaatgtcgtatcacaaaacagtaatcccatggccgaccgtcccacacaccttcagtaattccagtcaggggcaaacatttttaatttagctgttctttctagtcattacctccatatactaaatggtatattaacattgcttttactgatttttaagaaaatcaaattctgacatctgttttctggctatggcagatgaggatttaactctgttacaccactcctcggcccctctcccctatattgtcatataactggcattagataagccaatgaagtgtttacattattaagactatgtaaatgttgtccattacaaaccaagtaatatactgtgaatagatttcttaacaaatgtttattttccctagggttactaggaaacgtttttttttttgcagtgtcttccttaaaatatcctgctttaatctatcctagacagatagatactctgtctatcctttatccctgaacctcccaaagtgtggagtataacctttaggcaatactggtcaaggacataattgggaccaagtgtggtggctcacgcttgtaatcccagcactttgggaagctgaggtggaaggatcacttgaagccaggttcaagccagggctggttcaagaccagcctggacaacaaactgagactctgtctctacaaaaaactaaaaataagaaaattagccaggtatgatggcacacatctatagtcccagtttctcaggaagttgaggtgggaggatctcttgagcccaggagttcaaggatgcagtgagccgtgatcatggccactgctctccccaaaaggggaaaaaaaagacataattggaggagattcagggctactgcattatgtgtgaatcagatagggaggaagctggtagctggtccctttcaattctcttttgatcctcatgtccttcttaagaactgttattttctaagtcttgattcattccaacggtttaccctcctgggggctgtccttcagcttcttccacctatttcatcagtgactactcttctcactcctttatcttctacagatatgttgaactttcattcagcatttcatttactcattccacaattatttatttatgtgccaggcattgcttactgctctaggcatctgaaatgcatcggtgaacaaaacagcattctgttggagaaaagtagacagtggagaacaaaaacataataaagaagtaaatatctgggtgcagtgactcatgcctataatcccagtggctttggaggcttgaggccaagggttcaagaccagcctgggcaggatagcaagaccccatctcttaaaaaaagaattagccaggtgcgatggcttgtgcctgtagtcccagctactcaagagtattgcttgagcccgaaagtttgagactgcagtaagccatgttcaccctactatactccagcctgggtgacaaagcaagaccccaactcttaaaaaaaaaaaaaaaaaaaaaggaaagcatatagtataagcgataaatcccatggggaaaaacagaaaagaatgttgggtaggaggagcgcagagccatttgggtgacttcactgcaaagcaagattcatgtaaagacagaggaagtgagggattttgctgtgtgagtggctggggaagactgttctaggcagaggggtagagaatgcagtgaccctaagacaggagcgtggcccttccattctatacatgttgaatttatacttttagagatcattttattcttgccaggcacagtggctcacctgtaatcccagcactttgggaggctgagacaggtggattgcttgagctcaagagttcaagacaaaccagagaagcatgatgaactctccctctacaaaaaatacaaaaaaattagctgggtgtggtggcaggtgcctgtagccccagctactcaggaggctgaggtgggaagatcatttgagccagggaggttgaggctgcagtgagctatgatggcgccactgcactccagcctgagcgacagaacaaggccctgtctcaaaaaaaaaaaaaaaaaatcattttattctcatttagttaggtaaaatgtcctgaacctggggagacagaagataaacccaagaggtagtctgacatcttgaacctaaagtcttagttttagttctttgaaaccataaggtgggcaggtgatatctttgcttttctcttttcatttgagaacctataggcatttgtatgtttttttcttttgatttttacagattctccttgtagtaggaaactcttaatataatatctcctttgtaaatgaaaaaaatgagaatcaaaaataatatgattctggttgggcacggttgctcatgcctgtaattgcagcactttgtgaggccgaggcaggcagatcacaaggtcaggagattgagaccatcctagctaacacagtgaaaccccatctccactaaaaatacaaaaaattagccaggcatggtgggacacgcctatagtcccagctacttgggaggctgaggcaggagaatcgcttgaatccaggaggcagaggttgcagtgagctaagattgcaccactgcgctccagcctaggcaacagagtgaaactccatccaaaaaaaatagtaataataatatgattcacccaagcaataaatgacataatgacaaagagcatacctcatatgccctgattctatttgctttatctatccaatctttgcatcccattctatcaccattaccattttttttttttgagacagggtcttgctctgttgcccaggctggaatgtagtggcatgatctgggcttagtgcagcctcaaacttccaggctcaagccatcctcccacctcagactcccaagtaggtgggactacaggcacatgccaccatgtgctgctaatttttttttcttttcttttttttttttttatagacaggtcttgccatgttgcccaagctagtctcaaactcctggactcaaacgatcctcccacctcagcctcccaaagtgttgggattatagggatgagccactgtgcctggccaccattacaactttaaacataaaaaatacatagaatgttgaagaaggaatagcattttcattttactgattgatttattttcaacaaacgtgcgtttatgcaacaaacatttattaagcgtctaccatgtgccaggaagtgacctagatattcggaccatagtagtgaaaaatggtagacatttattatcaatttttattttattattaagatagacatgtctcttcttataaatttgaattttaatggcaactgacagacaatgaacagattaagtaataaaatcttcaaggggccttgtagactttgataaatagtctaaatttcagtctaagtgaattggaacacattggaaatatatcaattagaatgagtattggctgcatataataaggacctagctagtgtggcttaaatttatttattattaaatgtattgtatttatgtatttctcatgtaaaaggcttgcctcatcactgggactagtatggaggcttcatgatcatcagggtccttggtccaaaacagctgctgaggctccagccagcatgtttaatgccagaaggagaaaagaagccaaaacatgaaaggatatcccctcccttttaaaggatcttctaaaagtcctacccagtatttcctcttacatcccattgatcagaacctactcacatgactatatccagttgcaagggaagctgaagaatgtcgctgtctattactaatgagaaaagggacaatggagattgagttgggaaaccggcagttcctgccacagagatctgaatcatgctttttaaatggtactgccttctctacagaaagagattgaaaaggataggaatagaagggagattagttttttgcagttgtccaggtaaaattttggtaatggactgaggtggtgctgtagtgaagatggacagaagacgatgaattcagatatgtttttgggtatggtcaacgggactttctgatggactgaatagggaagggggtaagaaaaagaaaataatcaaggatcttgcgcaggtttttgtcttgagaaaatggatatatgacagtgatgcttactatgttaggaaaagttgtaagtgggtataagtttctggaggagagattcgagagtttctgtttgaatcatgttaattttgaaatgcctattacacattcaaatggcagttgccaaggtggtatttgaatatatgggtctgtagttaaagtagatgtcgaggcttagatatataaaatggaaatccattagcatatgaatgtaattaaaagtcatgggcagatgaaactgcctagggagaaattgtgaaaggagaacggagcccaggaccaaactgaggtttaccaacatttagaatgttggtagacgaatagtagccaattaagtaggcaaccaattcccttataacacacaaaacaatgtgtgctaaaagaatcagtgaaaagggagagtggtcacttgtattaaatgctgctgagaggtaatcaagtgcagacaaagatgtagcctttggatgtggcaacatggtggccacaggtaactttaacaacagcagttttagagaagtagggggacagggtcataattcaatatattcagctgctagtcactaaggaatcaataaatagtaatctaggagaagaggtggccaaattgatctctgtgcagtacaataaggactatgatacaggtctgcacagggttgacgggcacacaggagttggggtacttatctatggaggcaagagcacagagggctttcagaagaaggtggtaacttcttagatgttcaaactgcatctataagatgtatggagtaatgcattagcctgggagccagaaaacctaagttctagtcctgcctccaccactaacagatgtatgacctgagacaagttcattcccctctctgggattctttcttctgcctgaagggagaaatggctggactagacaagcctcatttgttttctgttttaagatcattatggaattttctaacctgttcaagtctgcttagactgaggtttttaatttaagattctctgcccttcagttaaccttttggggtatttcatttaattatctatatttctccactggaaattgatgtcactttcttcaggtttaattcatagtttttattgcagaataaatgagttaggataatgttattagctatcacaaaccccagcatttctgtggattaacacaagagagtgattatttcccccttatgaaataatccaatgcaagtgttgaccaatggctttgcatgcagttagcaagggacccaggctcctcccaacttgtgggtttgctatccttcaggttcttagaattacttgctttcttgtggaaagagaaggcagagaagacacataaccatcttagcctagaggtgacatatattacttctgatctaattctattgtgagaactcatcacgtggcttcacctaagatacaatggggactaggcaatgtggtttctggctgggcagcaacaactccgaaaagggaacaagagtcttgggtagacagcagatatctccactgcagagaacatttcaatgacccatacaactcatttgtttattttctagctgaagaaaagcttatcttgtccaactcagagattcctgagacatctgcattttttcctgaaaatcgcaggtagaggcatatatcattgtttaggaagtagagcataaataattgtcattaaattcagaacactattagaatcatttgtctggccagtacttttgacctcttagatgcaagtgggaaactttggggggtatgcatggtgagtttagtcagtagtatccacactaggttttattatcctgctcttttgtttttaaagatattttattttatttatttattttttcaagatggagtctcgctctgtcacccaggctggagtgcaatgccacaatctcagctcactgcaacctccgccttctgggttcaagtgattctcctgcctcagcctcctgaataactgggactacaggcgcctgccaccacacccggctaattttttgtatttttagtagagacgggatttcaccgtgttagccaggatggtcttgatctcctgacctcgtgatccacttgccttggcctcccaaagtgctgggattacaggcatgagccaccgcacccggcctaatttttatatttttagtagagatggggtttcaccaggttggccaggctggtcttgaactcctgatctcagatgatccaccagcttcggcctcccaaactgctggaattacaggcgtgagccaccgcgtctggcctaaagatattttaatatcaaaagtgatactgtataagttactattatttatttctgcatatggacagtcctgaagaaataagagaaaagatcttgaatttctttgaccacgttttaacaaaaatgaagacatctgacgaagacattatccctctggaatcttgccagtgtgaagaaatcctagagattgtcatcttgcctctggcccaccattttctggctttgggagaaaatgacaaagccttatattacttcttagaaattgcatctgcttatctcatcttttgtgataactacatggtaagctgtttctacccagaccacctccaccctagagacaattcatagaacatagagccagaaggaagctccagcatgctttctgattacttcacgttgtatattcccgacagcacccctttccactgaaaatcacattgcttagaagggaaatgatctaagattgagaaaagagaattggaatacattgcaactagcattgtaaattatttaaaatattgccacctttagaaacttgccatgaattgtctacctgtatgggaggtaagggggcacatctcattcccaaaatgatgcagagaggactctcagcatagtcttcctcaagtggcatttaccctctgttaagcctaaaatacctgtgagcacaaaatacctgtaggtctttggataagtgcaattctggttttttgttttgtttttgagatgaagtctttgtcacccaggctggagtgtagtggcgcgatctctgctcactgcaacgtctgcctcccgggatcaagccatcctcccacttcagcctcctgagtagctgggactgcagacgtatgccaccatgcccagctaattttttgtgttcttggtagagatggggttacactatgttgcccaggctggtcttgaacacctgagctcaagggatctgccctccttggccttccaaagtgctaggattacaagtgtgagccactgtgcccagccaattctggttttaatattgtgatccccaaagaggctctccctgcctttgtcatcatgcaatgtgtgctagattattacacataccattagaccaccaaagcactagtgaatgtttctctagggtaattataaataaggttccagggcactatgcccatagaaatgaggggatttgatacacatgatgaaataaacagaattcattgttaagtaagttggaaatcactgagctgaatacaggtaaatagatgcctttagatacttcagggcctttgatatgctgagatatatatataaatctgttcagaggacacagaagggtaaaggccaggctaggctgaagcatactgtgtttctcaaacttatttgcccttagatctcttttcatggagcagctggctgggctaaccttccatgaactcacttgaggaaatgtctttctgggcccttgcttcatctgacttcagccagcttcaggaagagcttcatagaccttccataatttacagttgctactggtcacagcagcctaatcaaccctcctaccttagatttatataaaattataaaattaaactgttaaaaatgtcactaagttcctgtccttgaaacatttatgttaagaatgaaagtctcctgcatatttcatgcacatattcgaggtgatgatggggatgtagccaatgagtcccaggaggaggaggcttaggtagccctgggggccaactttctaaaacctatgcataccccgtttcacttgacaagaagacaatgattagaagcacagcctcagtgcaaggtcccagaatgtgacatttgtaccccctctcccatcaaactccagtgggactggggctggtggccaactcatcatgtctccctctttttttgcctcccacacatacccaacaggatgcatgagactgggagatactgcctcaccttattatattcttcaagtctgatcttaccttggtgtgcacacgtgctaagatttgcctaatgatgttgggaggtgaagctgaagtgatgagagttgtgcagggacttacttcctcatccacctcccaaaatgaccctggcaaaggaagtgggggtgattcataattcatttaaaaactgaagaccaacttctcacagatgtggggatgctgttcaagggaagtggatgtgttgttgggaatagggaggttggggatagaattattgagaggaagaaactggcttgagggaaacttcgggtaaggcaacctagatgatagtgtgaagaaaggtggagatttccagattcattctcttgatggagtgatccagcagacaaaggtaagcatgaaggtgagatctttacccatcagctcctgtctggaatttggaagcccattttaatcagtggagctggggatggaagtggaggtggtaactgaaatggctcctgcatctcttacttcagtagagtctggggcaatggcccttctgtgggctcaatccctgctgaatcaacacttttctactccttgggctggttacaggcatacatgtatttgaatgaaggacagaagttgctaaaaactctcaagaaggacaaatcttggagccagacatttgagtctgccaccttttacagcctcaaaggtgaggtaagaaaccattaaagacttgaatttatctgttatatatcttaggcctttccatagaagtagaagtcatccctatactttctacaccctcctcccatctcttgccacagacttctagccaagactctagaaactcaaatccctgggctccaacctcctcaccatggcttaccagcaagatcttccctgtcttccaggtttacatctttttttttttttttttttgagagggagtcttgctgtgttgcccagcctggaatacagtggcgtgatatcggctctctgcaaattccgtctcctgggttcaagtgattctcctgcctcagcctccaaagtagctgggattacaggcatgcgccaccacgcccagctaatttttgtattttagtagagatggggtttcaccatgttggccaggctggtctcaaactcctgacctcaagtgatccgcccgccctgacctcccaaagtgctgggattacaggcgttagccaccgtgcccggcccaggttgacacctttatgaaatatttttgttacaatctctaaaaatggacctgaatgggtaaacattgtctcagaggtagacaatgcacaactaagatgctaaatcctagtcattcaaccacccttcatgcatatatccaatagacattttctattatgccaggcacaggaagattttgtttctggtccataaattaccttttttgataagaatccccaaaatatggattgttgggacctactaattaagttagaatcatcgttttcctcttttcctctcttccctcccacctccctgtaggtctgtttcaatatgggccagatagtgcttgccaagaaaatgctgaggaaggcactgaagctcctcaaccgaatctttccttacaacttaatctccttgtttctccatatccatgtcgagaaaaacagacactttcattatgtgaatcggcaggcccaagagagcccacctccagggtaagggaaggagctggggagagcagactgtttagtctcactccccagagaggcctacacataatccaagtcagcccccaaagcctggcctccagggggcacaaggactcctgtttggctctgaccattcactggggagggggcgagtgtgggaggtgctcccataccagggttgccacaaagtactttacaggcagtttttgccaaagggaattttgatgactcaaacataagggacctcgttgtaaggtaagttctagggtccgtcctaactcatctagccctttaacccccatggccatccgtgttctcattggatggaacctgcaccactgctcctgggacctcagtcacaagccctcttccattaggtgctaagacactgggttttgccccgccccaaagaaaaatagcaagccctgaagacatttgccaaaggacaaaactcccacccatctaggaatctcaatagggatatgggttacatggggggtatccgttggtcaaaattgtactgttaagatttgggcatttcaatatatataaattctacctataagataactataataataatgagtgggaagaaatagtgagtggagaggtagatgaaataagcatgttgctagttgttgaaggtaggtgttgagtgcattttgctcatcatactcttgtttgctgtgtgtatgcttgaattattctataataaatgttttcaaaaatattccacctatctagcaattcatggcaaaggagatgcctccttgttgggtacctggagagctgacagaggacacctcttccatcttgggggagctctgtagctatattactataggttctgcctaagatacaaacatctattcctacgagcaagctactacaactcttttgcaaccccatcagaaactgccttccccagcttccaaacatgttcctttaaatgtagggaatcctgaggtgaaaaggaaatgtaatggagctgagctcctgtgcacgttggaggtgggctcctgggaaaacctggctgtttctggaaaccccaagaggaagggctgggagatgttcagcagagatctctctgagaaggcagtggtctttgcattacacatagggttgcaggatgcctcaatttgaatttcagataaacagtgaatactttttttagtatacatctatcatatgaaatatttaggacatatgcattccataaaaattattaggtttaaaattcaaacttaattgggcatcctgtattttcatctgctaaaacaggtaatttacacatttcacattttgtaaaaggagtaagaagtacctgcacaaagggaaaaggtagaaaagtgttgaagaagaaaaaactgaggagctgttggcttaaaatatccacaggtcaaaaggttctcatctcaaaaatgagtatgacatggaacaacatttaatgtcagagtgtccatgaccctcacgaatgccctataagagattttacccagggctgggtgttgtggctcacgcctgtaataccaacgcttagggaggctgaggggggcggattgcctgaagttgggagttcgagaccagtctggccaacatggtgaaatcccgtctctactaaaaatacagaaaaaatttagccaggcgtggtggcgtgcacctgtaatcccagctactcggaaggttgaggcaggggaattgcttgaaccagggaggtggaggttaaagtgagccaagatcgcgccactgcactctagcctgggcgataaagcgagactccgtctcaaaaaaaaaagagagagagattttaccctgtccatgtttcctaagaacctttaaaaaaaatcatttccacatcataatttagaaagtttattttgccaaggttgaggacacgcctgtaacacagcctcagtaagtcctaacgacatgtgcccaaggtggtcggggcacagcttaattttatacatttggggagacaggagacatcaatcaacatatgtaagaagtacattggtctggaaaggtgggacaacttgaagcaaaggcaggaagttgggagggagcttccaggtcacagataggtgagacaaaagttgcattcttttgagtttctgattcgcctttccaaaggaggcaaatcagatatgcatctatgtcaaagggcagaggagtgactttgaatagaatgggaggcaggtttgccctaagcagtttccagcttgagttttccttagtgattttgggggcccaagatattttcctttcaaaatgcaatagttaaaaatgctcattttttggccaggcgcagtggctcacgcttgcaatcccagcacttcgggaggctgaggcaggcggatcacctgaggtcaggggttcaggaccagcctggccaacatggcgaaaccccatctctaccaaaaacacaaaataattagccagacatggtggtgtgtgcctgtaatcccagctactggggaggctgaggaaagagaatcgcttgaacctgggaagcagaggttgcagtgagctgagatcatgccactgcactccaacctggacaacagagcgaggctcaaaaaacaaaaaatcctctttttttttttttttgtaaactaaaaagtacccaagacaggtatcaatcaatctgtaagtttattttgccaaggttaaggacatgcccagaagaaaaaaaaacacaaaaccacagaaacagtccctgtttgagactgcagtatttaaaggggaaaagtgggctggaggaaaatgagggagggcgtgataataatccacatgttgcaagagaataggagcagctaggggaatagtcaattatgtattgtctcacactcagtaaataggcacttaaggtaggataaggcagacatagagtagctacccgtgcagatacttaactttttatctgtagctgtctgctaaggaacaaaaggaaaggcaacttcttgcatgactcagctttcagcttaattttttccttttggcatagtgaattgggatcctgagtttttattttcctttcacacctttgttgagctgagaagtagttcctgaaagcagtgtgcaatggagaaaataatacattgggcttttgggctggaggtagatggagtttgaatcctggcaccaccacattccagctgtgtgtctttgccttaattacttaacctgagtctcaccttcctcaaatgtaaaatggagtcagttattccactcttttcttacaggattgtcatcagaatcaaatgtgatgaataatatcaatgtgctttttaaatagcttcatttagcaattacctgactcaggacagatgctttacataaattatcttaatcattataaagtaggtattatgattcccattttacaatgaagaaaatgtgctccataaaaattaatgtgcttgtttgtcagtcatggagacaggcctcaaattcaagtcagttttgattcccaggcccatagtgaggacaccatgtacctgtgctcccctaaatcatggtaatgatgatacctttcatgttccatttgtgtttaccttatccaataggaagaagaggctggcacaactttaccggcaaactgtctgcctttccttgctgtggcgcatctatagctacagttatctttttcactgcaagtattatgcccacctggcagttatgatgcaaatgaatactgcactggaaactcaaaattgtttccaggtaggggatttttgtagctgctcctttaagtttctgaatttcatttgggaagaaaagcctagtgaaagccaattaggattcaaaattctgaggatataataatagaaggctttctgattggcttgttttgacaaggccagcagttctcaaacactttggctccaggatcacttcacactcttaaaaattattgaagatcccgaatagcttttattcatatgggttgaatctattgatagcatataagaaacaaaagtcgagaaaattctaaaatattattattattatttttgctggttttttttgagatggagtcttgctctgtcacccaggctggagtgcagtggcacaatatcggctcactgcaacctccacttcccgggttcaagagattctcttgcctcatcctcctgagtagctgggactacaggcatgcgccaccacacccagctaatttttgtatttttagtagagacggggtttcaccatgttggccaggctggtcttgaactcctgacctcaagtgatctgcccacactggccttccaaagtgctgggattacaggcgtgaggcactgcacctggcctaaaatattattttaaaataaagataacaagcctattacatattaacataattaccattttcattttttaaaactctgttccgcaaacaaaaaatgggaaatgtggcattgtattaaatttttgccaatattttaacatctggcttcttagaagacaactagattctcacatctgcttctgctttcactgttgcagtatcacatatgttgcctctggaagactccagtgtatattcatgagagaatgagggtgaaagagaaaaatgttaaaggataattcttttttaaaaagatagaattataactgataacaaatatggaaagtacacatcaaagattttatttaactcactgagttgactcaatcaaaattagtaagattggaaccaagtggttccaaggagaatctgtttaccaatggatacaaaacttgtctagtaacagcataataatcacttgtattccactgaatatttacatttctatgaaaaacaaatcatatcacttatattaatatcagttttctgcaacatagttgtaagatagtccaaagaaaaatagagataactttgattagtaagctagataggatccccactaagttgtgtttttgcccattttaaggtctttcactatttttcctgtcacaaataatgcctggatattagcggggcatggtggctcacgcctgtaatcccagcactttgggaggctgaggtgggcggatcacgtgaggtcaggagttcgagactagcctggccaacatggggaaaacctatctttactaaaaatacaaaaattagctgagtgtggtggtgggtgcctgtaatcccagctactcaggaggccgaggcaggagaattgcttgaacccaggaggcagaggttgcagtgagatgagatcacaccattgcactccagcctggatgacaagagcgagactccaactcaaaaaaaaaaattttttttttttaaatttaaaatgcctagatattatggaactagctttgacctcatgtggtctctgaaaaggtgccacggatccctagggctcccaggatgaattgggagaaccactagtctaggtcataaccaaagaagcctttgactggatgaagaagatatcaggagacatgatcaagaaattattaagctaaatcaaactcatctaatgagagtgaccttgctcctttataaaagtacattaaatcagcaggccgggcatggtggcttatgcctgtaatcctagcactttgggaggccgaggtgggcggatcacaaggtaaggagatcaagaccacggtgaaaccctgtctctactgaaaatacaaaaaaaaaaaaaaaaattagccgggcgtggtggcgggcgcctgtagtcccagctactcgggaggctgaggcaggagaatggtgtgaacccaggaggtggagcttgcagtgagcagagatcactccactgcactccagcctgggcgacagagcaagactccatctcaggaaaaaaaaaaaaagtacattaagtctgggtttcttcctcctggagtcattagttgtcaagaattaagggaaggggtcaagtagcaccaaggagctactgttggaggagcttagattcctaacctggagtctgtcctctacattagttccttttggtgaatttaggctggctctcctagaatacagaagtatttataaagcccatcaagattgacccctgcctatttcccatcctcttctagctctgtaggccatgaagtagccacaagcccagccatattggtcctcttttggttcctcaaacacagaagtttaatcccatctgtcactggatgtttcctctgcttggagggaactggtcatggccacccattcactttctaacttgtcactctgttttaataggtattattaccatttgacaatttcttgtttgctcctgcattggttcttggtctctctcccttaccagtgtgtaaatcccttggaagcaaggacctcttcagctgtcttgttcacatcctaagtttctagaacatttgcagttgctcaagaaatttatatggactgaaatacttctccacacttggagctatatcctaagaattgtggtagagttggggtggggaaaataaaaagtcaggatagaatgtgaaccaagacatttgtcatcaaggtggctgggattgaaagcaaagaagcgctcccctcagtgctcaaaggcaggtgagggactcagcatgggagaatggaaagaaccagactgagagccagagggtggtttccaggactccgcctatctgcagtgtgaccactgaaaagccgcataaacaaggagctttatattttctctgtaaagtgaagcagttggacctccattctcttggtccaaatccaagaggtcctaggctttattacagccttggatttctcgtgcccaacacttctctcttcccccaccaccatttctggctatccttaccttctggtagcattatctggaacatgttccaaaccagaaagaaaggaattctctaagactgatgtggtttaagtatccagggacctgcctataacacagaatttgtaggctgcttattttgtcccatctgaggaattccaagaaaaaagcctctactctaaaacacttccccgaccccaatactcccaccactagagatactttatttttcctgtttgtatttttcaaagtagtttacatgtattattttgtttttgtatatataataaaactgcttctttagaaggaacccttttctcctcactattctctaagcatgtatactctgaagcaactttatctttttaaagagttgtttagagtaaccagtttctcttaaatctgcaaattagatttatttgtttgttcgtttttgagaagggtctcactcagtcacccaggctggagtgcagtggcgtgatcatggctcactgcagcctcaacctcccctgctcaagtgatcctcccaaacacctcagcttcctgagtagctaggattacaggcttgtgtcatcatgctggctacttttttttaaaatcttttgtagagatcaggtctcactatattgcccaggctgggctcaaactcctgtgctcaagtgacctctcgtctcagcctcctgagtaggtaggactacaggcatatgccaccatgcctggctagtttttgttgttgttgaaacagggtctcactattgtgcccaggctcatctggaactcctgagctcaagcaatcctcctgcctcggcctccagaagtgctgggattatagatgtgagccactgcacctgacctccaaattaggtttaaaactagtccttatttaaaaaaaaaaaaaaagccaaacaaacaaaaccaacctttctttcttttttgttaaattacaaaaattatacatgcttgttataacaaacatcacagaggtgcataaagtaaaatctctcctcccacccccaacaaatatataactactgtttacactttggagtgtatccttgcagcctttttgctctgcaattatacatctaatatgtaagctattgcttttatttttcacagaaattaaaatttttatatttcatttaaggactacatgggcaaggggccatcaagcttatcctgaatgactcagtaaacaggtagcagaaacccaatttgatttctatttctaagcccatggcttcggccaaatgtccagctctattcccaaacttaataaacaaacatttactggcagacattgagtgatgttcctgagctttctgctttgcgttctgcctcactcttcctccactctgccatttcagatcattaaggcttacctagactattcgctataccaccacctggctggctacaaaggtgtgtggttcaaatatgaagtcatggccatggagcacatcttcaacctccccctgaaaggcgagggcattgaaatcgtggcatacgtggctgagacactggtcttcaacaagctcataatgggacacctggatttggccattgagttaggtaagggctggctgggcaagatgggacatgaggatacaaggaatgccccacaatatactggaattgttttcttcccaggctcccgagcccttcagatgtgggcactgctccagaatcccaaccgacattatcagtccctctgcagacttagcagatgtctccttctgaacagcaggtatttatcttaaagcattttccaaaattagggggaggaggccgtattattgagtattctgggttcaactttagcctagtcctagggtggggaagggagtagagtttgcagtaagaaaatgtaactgatagtagtcacccttttttcttttttcagacagagtcttgctctgtctcccaggctggagtgcagtagtgcaatcttggctcactgcaacctctgccttccgggtttagacaattctcctgcctcaacctcccacgtagctgggattacaggcaacgtgccaccacacccagctaatttttgtattttttagaagagagggggtttcaccctgttggccaggctggtcttgaactcctgacctcaagtgacccacccacctcagcctcccaaagtgttgggattacaggcatgagccactgcgccaggccttgtcttttttattttaaacagaattctttgccttgcatcatctctaatctggttgctctggccagtgatcagagggtagtcagacagtcatcccagctgtgggaatcaggcctccacttctgtcaggtggagacaaagggaaaagtcttccagggaggcaaatggccagagaatagcaaccaggactagaggtcaaggccaatttgctctgactctggtcaccctgatatagaggacccaggaaagaacaatttgaaaaaagagccaatttgagattgaggttttagtcctggataggggtgtgtttgaaatctgtttaagaggtatatttggttccgaattactgagaaggaccaagactagaccaggaagggactttactgaacctcatcctatccactgctttttttattcaatagctttgggggtataaatggttttcggtcacatagatgaattttatagaggtgaattctgagattttagtgcacctgtcacccgagcagtgtacacatacccaacatgtagtcttttattcctcacttccctcctcccctcccctccgaggccccaaagtccattatatccactgcttttttttttttttttttttgagatggagtttcgctcttttgcccaggctggagtgcagtggtgcgttattggctcaccacaacctccgccttctggtttcaagcgattctcctgcctcagcctcccaagtagctgggattacaggcgcccgccaccatgcccagctaatttttgtatttttagtggagatggggtttcaccatgttggccaggctggtctcgaactcctgacctcgtgatccacccacctcagcctcccaaagtgctgggattacaatatccaccactttttaatggccactaccttttcttttccatagatacccgcaattgatccaggtgctggggcggctgtgggagctttctgtaacacaggaacacatcttcagcaaggcatttttctattttgtctgcttggacatcctgctttattctggtaagtgtgggtttgggatgtaaaagaacttgggggtgttgatacctgtgctggtgtggtgtggcagctctcaggttggggctttgggaccactaggtttctggctggtggacttacagggcagggatggagagaggctggttgtgtgagctgaagcactgtctagcaggtgccgagattgtaaaggcacggcaagaaggagaattaagtctgaaggaacctgatggatatgagctgccagttaaactgtcagatcaatttgcacctaagtgatagtggctgactgtcttactatgtgccttttaccaggggtttttaacttttagcaggatgtacttagagacttcacgctttagaatgaaggactagattgcttgaggtgagagttccaggctggtagctattggtgatttggaaaataagttacttcctgataaccttcaagtgacaccaagtaggtcacttgaagtgtacacactaaaccacaggaaccaacctgaattgttttccccacatgtgatcttgaaaggggatgcagacattgccatcaacaaaggaagcatgtgtggagagacagagaagtcctaggctgcactaaggccaggaaggattagtttaaaccccacacctgcctggtcggtactgtggaactgtagtatatatccataacactccccaataggtaggactcagcaaacacagggcaatccagtcatgaggttgttgcaatccacgggaccctctggattcatacaataatcagaggcaactctccctgcagtgggaaattcaactgagagtgactaggctagaaagatgatcacccacacctactaataactctcacccattcctctctctcttaggttttgtttatagaacatttgaagaatgtttggaattcatacaccaatacgaaaacaacagaatcctcaagttccacagtggactcctcctgggactttattcctctgtagctatctggtaacaatgtgtggcatatcactaaattcccaaagtgaaaatgttgaatcccaaggaagagttcttgaaaaatcttttagaaagtattcataatttatacctgagacagcttaagggtgtcagaggatatttacacagagagacatgttagggatcaactagttcatcccccttggccaaggacagaaaagtaaatttatctcaattacatccatgcaataaacatttatcgcaaacatatcatgttgtggtgatacagggataaataagaaaagattgctttcttcagaggggtgctggggtttgaggaagactaatgaatagcaccacttgcccacccggcacctgcccatatctaatcacatggattgacaaagccaatgttggaagacatggcttatatcttcacgaaagcgggcttcgtaatattgagcactggaattagacttaacccattcagcagcaggcagttctggaaaactgtaggtctactcacatggaggcaggcctcttgtagcagagagatcagtatcacactccctgttggcttcactggctctcaagatagagagagacacggactgagttatacttgcccaattcatctcccaaatcaccagcaagatctctccttatcattgaaagggcaagtaaagcggggaaagagttctggtgctttgcaccaaatagaggccccttacatggaaggaaatttcaggagtgaggaagcagcattctccccgcaccccattaactcattaagcctaaggctcaattcctttaacctactacgtttttaactcagttaagcatgtagctattatggtcatacccttaaggaaggagatgaatgctaaggttctaaaatgggtcagaacagaacattcattaaattatttccatgactatccccaagactgaaaatcgccccctattattttatttcctatcttaattatatgcaaccgtatggtctatcagaggtttgtgatgagactaaatgacaatatgaagacattcctatataaaatgctacaagttagaacagctccaaattggaatagaaatccaccccttccttctttctgagacagtcttgctgtgtcacccaggttggagtcccgtggtgcgatcgcggatcactgcagcctcgccttcccaggctcaagtgatcctcccaaacacctcagcttcctgagtagctggagttgcaggcacataccaccacgcctggctaattttaatcttttgtagagatgggatgtcgtgatgttgcccaggctggtctccaactcctgggctcaggtcccgtctacctcagccttcccaaatgctgggattacaggcatgagccactgcacctggcaagaaatcccctcttattattaaaattaatgaggagaaattaaaatccaaaaattgattactcttgccaattaaagttcaaaatcaaataacttaccaatgtgagttaaaggttaaggaatctaaagtccagaaatcatccaaatttatttttcttgtctatctcagcaggagaattttttaaacagctgtgtcctaggccaatgctgctcagactttagtgggcataaaaatcacctggagggcagtcggccagctctcggggtgctgagccaggcgggctaggcgaggcgcgggctggccccgcccctctggccggccccgcccctcaaggccggctagtccccttcccagagacttggctaggcggccggcgctgcggcgccagcagccctgtggtggcgacgacgatggaccaggacccagtgggccctgtggaacgaggagaagccgtcgcagcctcgggagctgcggccgccgcggcattcggggaatctgcggggcaggaaattaagggatccaaaaagctgagtcatggtccaaaaggaaacgttgatgtcaggacaaccatagccaaattttatctcaaggatgagtaacgaaagaggctttgaaacgtagaactgggagtcataggaaaaaagaagaaagtcccaaggagagtcatccactttgttagtggcaaaacaatggaagaatacagcacagatgaagatgaagttgatggcctggagaagatgttttgcctactgttgatccgatttggctttaaatatttggctattagaaaatcatgccgggcgcggtggctgacacctgtaatcccagcactttgggaggccgaggccggcagatcacctgaggtcgggagttcaagaccagcctgaccaacatggagaaaccccatctctactaaaaatacaaaaaaattagccaggcatggtggcgcatgcctgtaaacccagctacctgggaggctgaggcaggagaattgtttgaacccaggaggcgaaggttgcggtgagccaagatcgcgccattgcactccagcctgggcaacaagagcaaaacttgggtctcaaaaaataaaaaaaaataaaaaataaaaaaatcataagcaggccaggagcagtggctcacgcctgtaatcgcagcactttgggaggctgaggtgggtggatcacctgaggtcaggagttcgagaccagcctggccaatatggtgaaaccgtgtctctactaaaaatataaaaaattaggcaggcgtgatggcaggcgcctgtaatcccagcgaggcaggagaattgcttcaaccagggaagcagaggttgcagtgggctgagatcgtgccattgtactccagcctggtcaacaagggtgaaactccatctaaaaaaaaaaaaaaaaaaaaatcggattttctacacagaaaatattcaaaggattgtaccatatactctgaaggtagttccaaatgcaggtagaatattaaagaggtatttcatgcaatgtaagaattgttggaataaatgtcttatttttaattactttgaagggttaaaaaaaaaatcacctggagagcttgttaactcagagatgccacacccccagagcctgtctgattcagtagacctggactgaaccagagaacctgcattaatgagaatccaggtgatactgatgatgccagtctgtggactacattttgagcagtactggcctaaatcatctctctttggtattggaacaatttcttcaagccccagaatccacagctccaagtgtctgatctccctcactttttaatttaaaaagccaaagtggccgggcatggtggcacagcctgtaatcccagcactttgggaggccaaggcgggtggatcacctgaggtcaggagttcgagaccagcctagccaacatggtgaaaccccgtatctacttaaaatacaaaaaattagctgggcgtggtggtacacacctgtagtcccagctactcgggaggctgaggcaggagaatcacttgaacccaggaggcagaggttgcagtaagccaagattgtgccattgcactccagactgggggacaagagcaagacttcgtctcaaaaaaagaaaaaaagccaaagccaaagagttcaatggtggctaatattacctgagtgtttccaaggattctattcatctcaagtcatcaaaaaaatttattatttccttgctctgtatcacataatttcctgcttttttagggagtgtgaagcaggggtaggcaggagactacacacttccagagacccaggtaaaggaagctgcacatccagagagacatttcagaaagccagcctattcctaatgggtgatactgatttttcttattctcttgtggtaatgcaggtatgccagacttcaggaatgggacaacttttacaaattttccaatagagctaaaaatcttttgccaagaagaaccatgacacttacttactatgacggaatatctaggtacatggaggggcaagttcttcaccttcaaaaacaaatcaaagaacagtcagagaatgcccaagccagtggggaggagctactcaaggtgaggcctattctccagtttccagtataaaatatgccttaaatggatctctgtctacttcctgtgctaattattttctcattatagaattcatatatttttataatagaagtttttgaaggcacttccccaaagtaagaaagaaaatataaattgcccataaccttactactcagagataagtactttttgtatattgagatcccacttttcaagtatttttctgtgtgtgtgcatgcacatttctctattttgtaatttgctattaaatatattatgaataatttcctgtcattaaattgtttttcacatcacgatttaaaaggaagcatggtactttatcttacagatatatgattgtatggcctaattattattggatagaacttttctgtatgattttattgctattgctgtgataaagcatcctggtagacaaatcattccacacgacaatttaaaaaattcaaatatgtattaagcatattaatacaagagtgctggggcgcaagagtgagcaaattaaacacctccaagagtttacaacctggcatgggcaagcccccaagagaataaagggctaaatctctggtgttgggttgacacgtttgccttgttcttgtaaacactgagcacaggtgtactagttttctattgctctgtcactcattaccacaaagtaaacagcttaaaacaacacccacttcttaacagagcctccctttgtcacccaggctggagtgcagtggcgcaatctcgactcactgcaacctccgcctcccgggttcaaacaattctcgtacctcagcctcccaagtagctgggattacaggcacgtgccaccatgcctggctaatttttgtatttttagtagagatggggatttcaccacattagccaggctggtcttgaactcttgacctcaagtgatccacccacctcagccttccaaagtgctgggattacaggtgtaagccaccatgccaaggccaaaacaacaccacttcttaactcacagtttggcgggtccaaagcctgggtggtctggtctgggatctctgcttaggagatgtatttacataagtagacataattgaataattgaacacattgttgctgttattttgaacaaactgtcatcttttagaataagaaaaggaaaatttttattttacctccacttactccttcttcaatgctttctttctttatgtagatctaagtttctgaactacatattttccttctctctaaagaatttctttaacatttcttgcaagtcagagctattagcaacaacttccttcaattttagtttgagaagtctttattttgtcttcaattttgaaggataatttcactgggtaaagaattctagggatttttttcctgtcaacaggtcatggcactgtcttcttgcttgcatggtttctgaggaaaagtgaaaggcaattctttttttgttgttgttcctttatagaagtcccttgggcttctttaaaactttttgtttttctcttttttttgaaatggagtctcactctgtcacccaggctggagtgcagtggcgtgatcttgactcactgcaacctccacctcctgggttcaagcaattctcctgccacagactcctgagtagctgggattacaggtgcccgccaacatgcctgactaatttttgtatttttagtaaagacagggtttcaccatgttggccagtctggtcttgaactcctgacctcaagtgacctgcccacctctgcctcccaaagtgctgggattacaggtgtgaaccaccgtgcctgacctaaaattttttatctttgattttctgtagtttacaaattatatgcctatgtgttggggttttggggcatatatcctacatggtgttctgcgagcttcctggatctgtggtttggtgtttgaccttaatttggaaaacatttcagtctttcttgcttcaagtatttctgatgttactttcctctttcttctccttctgatatttctattatgcatctagtataccttttgtacttatcccacaatccttggatattctgttatggtttttcttttctagtctttgctctcttagcttgtcagttttgtaggtttctattgatatgctcttgaactcagagattctttcctcagcggggtcctgtctactaataagcctgtcaaaggcattcttcatttctctcacagtgtttttgatctctagcatttattttttgttcttaggatttccatctctctgcttatattgctcttacatgctctctactttattcattagagcttttagcatattaatcatagttattttaaattcccagtctgataatttcaacatccctgtcatgtctgcttctgacttgtgttttcaaactatgtttttgccttttagtatgccttgtaatttttcttgatagccagatatgatgtatcaggtaaaaagactttgtctaaataagtctttagtaatgtgatggtaaggtgtgaggagagggaaagcattctacagtcctatgattaggtctcagtcttttagtgagcctattcctctggactaagaacttcacaagtgcttttcagtcccctcttccttaggtgggacataatggctagaactgggtttagttgggtattcctcttccccaagatcagttagactctagtaaaacccctggaggttaggctctggttacatagtttctcctgagggcacaccttgtttagaaaaacggagtactctggcatatttcaaaatggttccttttcctcttcctctgctgaaagaatgagagattttttttcctccaatatttactgagagatcctggttgagcttctggaggtaaaacacacaaaactgtgggggctcacctgaaggtgtttggggtttttttttgtctaatttttgttgttgttgttgttggagacagagtctcactctgtcgcccaggctggagtgcaatggcgtgatctcggctcactgcaacctccgtctcctaggttcaagtgattctcgtgcctcagcctcccgagtagctgggattacaggcacccgccatcatgcctggctaatttttgtatttttgtagagatggggtttcaccatgttggccaggctggtcctgaactcctgacctcaggtgatccgaccacctcggcctcccaaagtgctgggattacaggcatgagcccacgtgtggcctaatttttttttattgtgatccaaatacacatagcataaaacttaacattttaatcatgtttaagtatgcagttcagtggtatgaaatacatttctaatgttgtgtatccatgtctgccctccatctccataactctcttcatcttgtcaaacaacaactctatacccattaagtgtatgtttgttatatttagttggtttattgtgttgtctaagtcctctgtgtcttatcttttgtataattgttctatccattattgactgttagtgaagtctccaactactattatagaactgtctatttctacctttaattttgtcagtttttgcttcatatatattgacgatcttattggatgcataaatgtttataattgttatatttttattttaaaaatataattataaaacaaatgtttataattgttatatatattttgctgtatttaaatttttattaatatattattctttgcctcttgtaagtttctttctgatttaaagtttattttgtctgacattagtatagccacctttattctctttgggttactatttgtataaagtatctttttctatcttcactttccatttatttgtgtctttggatctaaagtgagtctcttttagtatgtaattagatcatgtttttaaaaaatccattctgccaacttgtttttttgttgagagtttaattcaatttaaagtaattactgataaagagggacttgtgtgtatcattttgctatttgttttcaatatgccttacagctttttcattcctcatttcctgaactagtgtcttattttgcatttaatttttcatagtggaacatttaagttctttccccattttcttttgtatatattctatagctattttccttatggttaccatgaggattacatttagcatcctaaagttaacttcagtaatgcacaaagaactccactcctttaatagcttcccacccctttcagttgttgatgtcacagaattacatttttgtacattatatgccccaaaacataaatgaataattattttaaatgatcagtctcttcaattatgtagaaaacaaactgtggagttacaacccaaagttacaatactactagcttttgggctactaaattttaaaaacgtattaatctcttaaaaacgtagaaaacaaaacaagttacaaactgttattacaataacacttaattgtccatgtatttacctttgttgagatctttatttcttcttagagctttgactgtcctttcattttaccctacagggctcctttaggtatttcttgtctttctttcttttcttttctttcttttttttaaggcgtgggcattttttggaagaaagtcctggtggtaattaactttgtttttgattgtctgggaatgtcttaatttctcccttatcttcgaaggacgcttttgctgaatagaagactcttggttgacgggtttttttttgtttttttaatattttgaatgtattggcccactgccttctgacctctaaattttcagatgagaaatctgctcatgatcttattgaagatgtcttgtatgtgattagttgcttctctcactgctttcaagttttgtgtctttcacttttcaaaagtgattatatttgtctcagtgtgtatctctttaagtttatcttacttggagtttgttgagcttcttggatgtttatattcatgtcttttatcaaatttggaaagtttttaaccattatttcttcaaatattctttctagtcctttctctctctcttcttcttcagggacttccacaatgcatttattggttcacttcttggtgttccacaagtcccttaggctctgttaacttttcttcaatcttttttctttctgttcatcagactcaataatttccattgtcttatcttcaagtctgctccctgtttaattctgcctttgaatccctctagtgatttttttaaattttagttattgcagttttcacctccagaatttctttttggtatatttttaggttttctgtcactttactgttatttccattattttcatacatcaattacttgactttatccacattttcctttagttctttgattatctttagagttgtttaaaaatctttgtgtaggatatctgccattaggtctttttcagggacagtttctcttgatattttttcccccttgggatgagccatgctttcctgtttcttggtatgcctttttgttgttattattggaaactagacctttgaatctaataatatcacagctctggatatcaaattctccctcttccccagggttttctgggttttgttgttgtttttgttttttattgttgtaggctgtctctatgccaaggatcagcctgaggtgcaaacttaaggtcttcccagatcttttctgagcctgtgcctttccctaggcatgcacagtcactttctaattttccttttataggcagttgcttttgaatgtcctagtatttaatgtctggctgtcaaggtggtggagggtgggtggagaaaaaaataaagttgggggaggaaagggcaatagccctttaaatccactggaagtcacttcaactggagtgggaggggcttgcaatgacggggagaggtgcaacaatgactgcctacctcttccatcagaagcagcaattggtgatcagagcacagatccctgatatctcagacagggtcctttttgcccacccttgttcccacaagttgtacgcaggttcttcaggagcatgtgcacaacaactgtctgccacaggttttgaggctgggggacaggcagctgtgctaagagctgaaactgaaattaacctcagtttaccatccaagccttcctctggtatttacaagccttcagtagactccagagttctaaaatagttacattctgacagattctgccagtgtaatgatagtctaggtggggctacagatagttggtacttcctactctgccgtctctccagaatcctcttctccctagagtttttaactcccagaccggtccagtctgagtttctagcaattcatcaattacagttcaggtttttctagcctggcactggttcccacagtggtttccacttgtgagtctccatctgtttgtctctccagtcttaggggcagcagtttgccctgtgttctcacttctcttatggatccaagaatagttgttgatcttccagtctgttcagctttatttatttatttatttttgagatggagtctcactctgtcacaaggctggagtgcagtggcacgatctcggctcactgcaacctctgcctccctggttcaagcgattctcctgcctcagcctcctgagtagctgggactacaggcgtgcacgaccatgcctggctaatttttgtatttttagtagagacggagtttcaccatgttggccaggatggtcttgatctcttgaccttgtgatccacccacctcggcctcccaaagtgctgggattataggcatgagccactgcgcccagcctgttcagctttttacttgtttctaggaccaagtggttatttccaagctccttacatgcagaaatggccaattttttttcctaatttttcaacaattaacttgtactgccttaataatcataataatcaaaataattttttaaaaaaagttattgcagagaagtaatgatgggatctctcaggtcaattcctgatctcagtggaccatggtggctactctgcctgacatttattgtcttatctccaatacctactgtgtatgtctctataatgtattttctcacttgattgcttaaatccttgaaatgttcccaaatcatctgtgaaggaaataacttacagtcaaggacccctgtttaattctaatatactgttgtgggttttttttctttagaacttggagaatctggtggctcaaaataccactggccctgtcttttgcccaaggctctaccacctgatggcttacgtctgtatattaatgggagatgggcagaaatgtggcctcttcctgaacacagccttgcggctctctgaaacacaggggaatatactggagaaatgctggctgaacatgaacaaagtatgtatcatcagctagcaaaccggggtggcgatgctcacccatataaagaagcccagaagcctactgcctggttaggtttcaccaggctgccattaacaaaatatcttagactgggtcattgatgaacaatagaaacctactgctcagttttggaagctggaagtccaagatcaaggctctggagattcgctgtctggtgagggtccgttcctcacagatggtgccttttgctgtgtcctcacatgtcaaaaggatggaaaaagaaaatttgctccctccagcccttttatgagggcagagccctcatgacctaattaccttccaaaggcccaactcttaataccattaccttgggggttaattttcaacatatgaatttcaggagatgccaacattcagaccatagcagtcaccataggcctttctggattcttaccagaaagggtgacatgtccatagttcaggattgtgagcttcctcttcccctttaagttctcatggtctctctccctcatccaaatcccccttagcatgccctctctctgcccttctttgtggccactttccactttgtgttacatctgtctgcgtgtctttcctctccttgagaatgtgaactctttgaaagcaaaaaccacacttagtgcctagcacagagccctatactcagttttgttgaataagtgaatgaatgtatgagtatatgtgtgtatttaaagagggctgtgtcagtatcctagtttggacagcaagattcgtttttgtctatgggttcacatggtttttaccaaagatgttttgccttgtttgatattggactaaccttgattacaaaagtcaagaagcactaatgatttctttgttctgtttctttcctctcaggaatcatggtactcaacctctgagttaaaagaagaccaatggcttcagacgatcttgagtctcccatcatgggaaaaaattgtagcaggcagggtaaacattcaggatcttcaaaaaaacaaattcctgatgagagctaataccgtggacaatcatttctaacatgtcaaagaaaaaagattttaataagcactatgtccttgtgattatctattattgacctttctccgtggctggcccactccaggttcctacataatctcttctgttccagacacagaaacagacatgttgatttcttctctttctggagggcctacaagggtcaggagtgtcatggtttacttcttcctaatgttacaaaaaattgcttttaccattcatgttgttttagcttgacctgtttatttcagcccatgcaaaactgtatcatattacaaattattaatctcaagatggtatgacatcgtgtgttgcaaaagacatgtttctagttagtatgttaactgaaaatacttatttttaaatgtccaattgttaagtcttttggaggtagcacaatattacaaatagcaaacatttgtcatggtctacaaagacagaattagaaaagatacatgtttgtagggcctgactgcagcttccaaagccagggtgatgtcttagcccctctaaccacatgcatcaaatatcaaataaaattttaatatcagataaatatgtttaatataaaataaagatcaagttttaaaaattaaaa

SEQ ID NO: 416 - DNA, 23169 bp, Homo sapiens
  source 1..23169: mol_type = genomic DNA; note = NC_000003.12:c53882160-53858992 ACTR8 [organism=Homo sapiens] [GeneID=93973] [chromosome=3]
atcccggcagtcgtggctgcagcgctgaggcgagaggttggtgggtgtctccggccataatgacccaggctgagaagggtgatacggagaacggaaaggagaagggcggcgagaaggagaaggagcagcgcggcgtgaagcggcccatcgtgcccgcgctggtgccggagtcgctgcaagaggtgcggctctggctgggttggaactctttgcccttgcttgggtcctccgctgccaggcaaggggcgggaggcggcgggaggcttcgagtcccccttgcaggccccagcccctggtggggggagtgcggaagcggtcgttcttttccgggtggtggcgcgccgggacgccgagggctgggaggtgcggagcgccaggagccaggcggagcccccgcagggacaccgctccgatctcccgcacgccccaccgtctggttgtgtgcgctcctgcccgggctctggcctcagcttccccgaccataaaacgaccacggtgataaccagccgcctcgcaagttgccgtgagggttaaatggtggcagatagagtttaggaccaggctggctcactgggagcgtcagcctgtgcttgttaagggatagtttggggtccaggctttttcctttgttaaggaaatctcagataatggaagtcatttcaagcttaaaagcaaggaaatggtggacatttgtctaaatatatattaagagcttgtgtatcaaaaacaacactattagaccaaactaaactaaccagaaaaaattatttgcagtagcgtgcctggcagaggaccttagatgtatacacatacacaaaaccttactgatcagtaactaaaacagcattcacgtaggaaaacgggcacaggcagtgtacaattcacagaagaaatgaggcataaactgctcagaaattcatgtaggacatctctgatccagcttccttaccggtagatgggttaaggataatacctaactagtagggcagctactagttagttatcactagtatgacagtgcctggcacaccgtaagcccagagtggccattactgttgcacaggcctggtttctccatctgtctagttgagaaggctgactggatggtctgtaagggccttgccagatccttccctctaggattctcccactctgtggggggtgattaggaggagagaggtcacacttggagataggacaacaggtatcagagcatggcatggaatgggcttgtgcagagggcagtattgggcactcaagcaagtacctcctccatccccgacagtcagggagggtttcttcaaaggaggtgaggtgacatctgtttagagtcctgaaggtgattaggagctaaccagagggaggagggaatctcagggaagaagaacagtgtggaagacacttgtgccaacagaggatgtgaagtgttggaggcccagccagtagattaggatgtctggagttaaggaaggggactgaagatcttagcaggggccatatcatgagggtcgtgtaagccacagagtctgacctcttgtgaaggcagtggatcacgttgaaaggctttactatagtaagagccaacattcctcgaatgcttcctgtggcccagctctgagttacatgtataactcatttaattctcacagtaactgtgagttaggagcttcattcagagcaaggaagtggcagtctgaatttgcagacagatccgtgaattcagagcctgggcccggattctatagcaacatttcttcagtcacataaatgctcaataactgtatgttaatttgtagtggacaatttttgtttcatttatttaaacaaatatttgttgagctatgtactataactcaggtcaagggaacataataaacaatgagtttgtgtttaggtagagagcggtaattggatacttctcaaagaactttattgaattattttgatacctttgagtcagcttcttagtttagcttgttatgtgtatgttgtttaactttgttacctgcatattatttacaaagtcacacatctatgttttatatctgcagcaaatccagagcaacttcatcattgtcatacatccaggttcaacaactttaaggattggtcgagccacagacactcttcctgccagcattcctcacgtcattgcccgaagacacaaacaacaagggcagcccctatacaaggacagttggctcctaagggagggactaaatgtaagtcaaaaacgacctggagagaaagcctaaggttgtttccctgggagggcttagacacaagtacaccagaatcttaaagaaacatcttcatagctttgctgtgttttaaaacattaataatgtcactaatttttcatcagagctagtgactttagatgtaaagaattagttacaacaaaagtaagtctttcagggtgaattgagtgtggatgaaggtgatctataatggaagacacaaaatcatcactcacagtaatacattcaggtccttgttaacaggcttaaacttatggattaagccatatttaaactgtaaatatctctttcagatacttacagtttaagtcaataagtcaaactcttattttcaatccattagcaaattagattgttacaataagcacttattatggtcttagattaaccataatttcaaggcaaaaaaaaaattttcttgcagtaagcatctactttatcctatgttgcagatggtaattatcaggaaaattctttgtgatcaatgataaatctatatattacatcataatccacattttactttgaagttttaagtcaaggatagttttgggaatgtaaagtttctttaattctgatagtaggccttagggttccattttttagtgtaacaagcagactctacgtaagtctagttgtaagtttaaatataacttgctgatataagagtccgcacttcattatttatctttggatcttataattctactttagggagtacgtttaagaaataaaaatcaaaagaaaacatttctgtaaagatatttatgggcattttctttatactataataacgagaaccagtaagtttatggcttaaccaaaaagtttaagccttgctgatcaacatatgaaggaatgtgtcattgtcaaaactgtaaacataagaattatataattgtatggaagagtctctgaaatattttttaaacatgaagtaggtatgctttgattagtgctgtgagaaattttatgaaaaatcacttgaaaattttgcatatagttgttttatagtgagggctgcttttgacttatttataataaaagattcctgggaattctttttttcttttcttgagacagggtcttgctctcttcttcaggctggagtacagtggtgcgatctcggctcattgcaccttccacctcctgggctcaagcaatctttccaccttagtctcccaagtagctgggaccacaggcctgtgccaccacacccagctaatttcttgtattttttgtagagatggtgttttgccatgttgcccaggctagagggaattcttaagagcagtacatgtgataaagattaaggaaacgctacttgttgatgaaggagcatttccaaagattggattaaattagtagtttttgaattgctttgtcttctcattaaatcctttgtactgctcatctttcattttttccccagaaaccagaaagtaatgaacaaagacaaaatggccttaaaatggtggatcaagcaatatggtctaaaaagatgtccaatggtacaagacgcattcctgtgtcccctgaacaggttcgattaactcttcagatttattcttttatcaccactattggtatcataataccattcacatgttcttcctataccactatgcaaatacaagatgggagttccttaaaaaggaagaaaacccctcataaccacttaaagaatacccgagtcagtgttacaaatgcttaggcaagccacataatttataaggtggtggtaggcaagttgatggaagtttatactttacctgagaaggtgtgattccaggatcttggtgggaaactgttcttactacattcttcaatttcatatgataaaccaatatgataggaatggacaggagtctgtattacatataaatttgaattcagctttaagcagcgtttagtgttaattttggactggctgtgaatcacagcctaggtgttaaaattgggggaaaaagaaccccaagattgtaaaaaggacaagagaatccttttgcagccagtcaatattttgccaaatatttgtgattaaaatttgccaatgtgtctagtatgtgagagagaagaaaaggagacccttatgttgcccccgccttgaataaattgagataattttctgatggtttttcttttcaggcacgctcctacaataagcagatgcgacctgcaattttagatcactgttcgggaaataagtggacaaacacatctcatcaccctgagtatttagtaggagaagaggtaagaaacttctttacaatagaatgaaagaaggggaagctgatcctcctcctaaaattcatttacgttgccacccagtcctagttgtttcctagcgttctataaccctgctttgagtaccagatagtcacaccgactcctacttcactctcaacatttctcacattcagcaaacgttagttagatttttggatatgaatccagaaaaccttgagagaaaagttttaacaaagtactcatctccctcctccttttctaggccttgtatgttaatccactggactgttacaatattcactggcctatcagaagaggtcagttaaatattcacccaggccctgggggctctcttacagctgttctggcagatattgaagtaatatggtctcatgcgatacaaaaatacttggaaatcccactgaaagatttaaaggtgagctaaaatcctcagttatttggattgtttttaagattcttggtcaatgaaagtacacgttaccgagttgtttgtaatatagtgtccttcttgaaacattcttgaccttcagggtgaggattcttggtggcatgaggatgtcttttcttcttcacttaattcccttctggtgctttttttctttctctgtttctttggtgtctctattactcgaatcagcaagcttgctcatttttgtcttctctttggaccttactgacacatcagttgtcttatttttgattttacaagtttttaaaaatttcaaggaaaaaaaaacacttgagcattttttttttccttataaaacccaaaggatagtacagaggtttgagctttaatctgggtgtgtaaccgtagctgctactcctttggagggaagtctctctaaaaaggagtgtgaatttgacctgactagacttgagtgctaacccttttatctttgttcttctttttagtattatagatgtatcttgttaattcctgatatctataataagcagcatgtgaaagaactagtgaatatgatactaatgaagatgggtttttcaggtatgtctgatatcccagtgaaacctattttaaatggaattttctttctttaatgacagagttaatcttatttactgacttatttatttatttatttatttgagacagagtctctctctgtcgcccaggctggagtgcagtggcgctatctcagctcactgcaagctccacctcccgggttcacgccactctcctgcctcagcctcctgattggctgggactacaggcacccgccaccatgcccagctaattttttgtattttttagtagatacagggtttcactgtgttagccaggatcgtctccatctcctgacctcgtgatcctcccaccttggcctcccaaagtgctgggattacagacgtgagccaccgcgccgggcctactgacttatttaaatgcttattctgaaaggatcagtgttcctcagatgccctgcccagaggtccctaggctccccgcttcagctgattatctgttttgggatctttaccgtgctacagctaatgactactctgccttttcttttccccccccagggattgtggtccatcaggagtctgtgtgtgccacctatggaagtggcttaagcagcacgtgtattgtagacgttggggaccagaagacaagtgtatgctgtgtggaggatggggtgtctcatcggaatactcggtaaggaacttggaaggtggcattccctgtttcctcttccctcataatctgttcaaccgtaaataataagaaatcacaggttaaaaattataagataaccataaattcaaaagtctgcatggtaaaccagcaagattatggaagtgcatattctagcaaggctaaaactaaaacgaatcattttacccttcccattggaacttcttaataggaatttacatcagcagcccctgaaagtcctgggatgttttatgcgctttcccataggggaaacgtaaacagtagcttcgtgtctttagctgtggtttggcatagagctactaatcacatccttatagcagagctttatttaggcaagtcatgtaggagaaaatcgaccttttcaatctgaattctctggccagtgttttgaatatctgcattttttgtcatagtggtgttctgcgggtgagtaactttatgatgatagacaggtaaagaaaataactatcaggaccagatttgcagcttgtccttcttcaggcaagcctaacatatgtaagcacactcaggtaatgcaggtatgggctctctgaagcattttgtgctccagagatggcttcttgctgcccctcaggatgctttcattcttcccgtcctccacattaggtagtttgagtctttaaaagagggcttaaatcgtccatgagaaagggtcatctgctgcctcccgccccaagttctagtacattctaaaatccattttgagttatttggctcatccattgttagaatatccaatgccacttgttctcaaagtgtggagaaaatgctggacccaggtttcctaccaataaaataatatagcagctgtcttcccaaattgtagaaaccttcagttagtagacagctttctctaagctattctcccataagtttgtcttatattgtcattgctgccttacatgctagtgagtgtagaccaccaaacaactgtcatatgataaacacatattgactgggaagtaagctggatttaatgggtgagtattgggtttctcagatacattttgcaaacatcatgactactgtaggtgttccccactggtttttgctgaagttccttttctcccttcttccatccattcattctggcctttcaacatacatttcttgaaacttgctatatatcactgtgtttaatggacatttttgtttgttttttgtgtttcttttttttttttagatagaatcttactctgtcacccaggctgcagtgcagtggcgtgacctcttggctcactgcaacctcttcctcctgggttcaagcaattctcgtgcctcagcctcccgagtagctgggattacaggtgtgcaccaccatgcctggctaatttttgtatttttagtagagacagggtttcgccatattggccagctggtcttgaactcctggcctcaagtgatctgctcatctcagcctcccaaagtgctgggattacaggcaggaaccaccatgcccagccattaatggatttcttcaaacaccttttgcaccttcttaaccaacagattaaccatctacccttttctcttaactttaggctttgtctggcatacggaggatctgatgtgtcaagatgtttttactggctaatgcagcgagctgggttcccttacagagaatgccagttaacaaataaaatggattgtcttcttctgcaacaccttaaagaaactttttgtcatttagatcaggtgggagcagaatcaatattgctgattatttttgtttctaggaaaaatttaagagatttaaaagatacttaaaaatgtaacagcattggctgggcacggtggctcatgcctgtaatcccagcactttgggaggccgaggtgggtggatcatgaggtcaggagatcaagaccatcctggctaacacggtgaaactccgtctctaataaaaatacaaaaaattagccgggcgtggtggcgggcacctgtagtcccagctactcgggaggctgaggcgggagaatggcgtgaacctggaaggtggagcttgcagtgagccgagattgcaccactgcactccagcctcggcgacaaagcgagactccatctcaaaataaataaataaataaataaaatgaagtaacagcattataatgcctttttcaacccacgataaagcctgcaggtgaaagcccttaaggagtgagagttttttgctaaagtccgagcagtgagggtgtgtcttaggctcaggaaaagtttgatttttttagggaacaagtttagcaaatttctctgtctcatcctgataaaagatgaagataaacctttaggtgtaaggaagatagtaggtaaatatgtaagaacagacattttgttaaatgttataatttgaagcactttcttaatattgcaaacaatcaatgtttaatcattgctatatatggattggtatcctttttttgtttgagacttgtttttacttttttcaggtaatctaaatattaaaaaattggggaaacaaaaatactgtaaatttcccagttactgagggaatttgcttattgatttgggtcattgttgtactaatgtatgttgataatggagaaaacaaataatgcaaacagtggaaattccagaaatgttaaataggggaacaaagtacaacttaattcctattttactaaattatagtgtgagtggtacaaagctgtaggttggcctttttataggtgatatttagatgatggtgaggctgaagcataatttgaagagtttacatgcattcttactgattcactgacagcatcttttcctggaatcaggacatctctgggcttcaggaccatgagtttcagattcgacatcctgattctcctgccctgctttaccagtttcgattaggagatgaaaaactgcaggtaacttataggtatctgtttccatgggtagaaagaaagttatccaggttcaatcaaactgagagaatatgcccttgctggaaacattgtgagatcagaatgtcaactgattgtagattatccactaaaccaacatttaagccactggtatagactagaatggatctgaagaatatctttctatttagcccctatatgatgaggtgttaattagaaagaaaggtatcattcttactaggaaattatgaagtagattttgaggtacttgatatttgctttgagatttctctcatatggtgtcatatcacccatctggttggatgatgagtgagttttctggcctatggtgcaccagagaaataatgccactcccgaaagagaacattgcccagtctaacttagggaatctgatctgccagttttgtttttagaagaacagaatttagtggatcagtttttttcaggatgcagtatcttttgttgatcactctttttcttcatgtacaggctccaatggctttgttttaccccgcaacttttggaatcgttggacagaaaatgacgactttgcagcacagatctcagggcgatcctgaggatcctcacgatgaacattacctgctggccacacagagcaaacaagaacaggtccgtagcaattctggtaggagaagagagagttttgtccctgaaggagaaatttgtccagagttaataggccattgtaatcagttctatcttccagcataataacactgatatagcttttagaattgtagatgaactgaagtctgagtttaaaatctggaagacatatttctctattcagcaaacattaattttctgaatgctagtccatacatttaaaagttaatgacactttccttttggtgtatatcatttacttacattatctacttctgaatattttttcagtagtattttcattaaaatctcacctgttacttaattttgtgaaagatgtgtggcatagccaaagagctgaattcctttgttgaaagtggatccccataatatgatgtctggtacaggggcacaaattgaaggtcttgtctgctaatgaaacagtaccagctcatgatggagactagattttctagtctttgttcctccccagaggcaggcatgaggtggactcataggatctgaaagtaagaattccttaacagtcatggcccatgaatcccactggaatactccatttaaaaactcagggcacggggaagaaagtctgtctgcactggtatttcacttttaaaatctaaccagtgatgataaggttctgagagctaccctgcctaccagcagctaccttgctttggaatggtcaaagcatcttcatctgtgcaccgtctctcattcctaagttacctgggaatgggtgctgggcagttgttgtattgctgtgtggcttttgttttatagtagtagggtagggagggatctagctagacaacatcaatagtgttctgttgttgtaataccacatacttgattgtccttttgatttaaagtctgcaaaagctactgctgaccgaaagtctgcatccaaacctattggatttgaaggggatcttcgtggccagtcctctgatcttccagaaagactccattcccaggaggtagatttggggtctgcacagggagatggcctgatggccggcaacgattccgaggaggccctcactgcactgatgtccaggaagactgccatctcgctgtttgaaggaaaagccctgggcctggataaagccatcctccatagcatagactgctgttgtaagcacatctggggagaccgggagatagcagtgaaacaagatagcagttaaataaattggttcagtctaggatatacttgtgcagtataacatattcattgaaaagtgattaagcgcctacttggcttgcattgccaggtgttgggaatacattaacgaagtaggatgggtttatagcctagtggaagaggccaaaataagtcagattattacacaaatgtgaaattaccactggcaggccactactaagcagtcagtaccctttagataaactttgtagcacctgccagtggtactttcacatttgtgtaataatttgaggaatttcacatagaatctttactcactaggggatggtatggaaggtgggaggcagggaaagcttccttgaggaaggcagaccttgagagagatgtaaaggatgaaaggggtcagttagcagtcacagatggggtagaggaagaagcctgtgaagacctgtgtggctgggaagcagggtgtgaggatgaggctagagaagcaggggacgaccacccgtagtggatcttgtgggtccctttaaagattttatttatttatttttcagagtctcactccattgcccaggctagagtgcaatggcgtgattgcggctcaccacaacctctgcctcctgggttcaagtgattctcctgcctcagcctcccgagtagctgggactacaggcgcacgctaccatgcccggctactttttgtatttttagtagagacagggtttcactatgttggccaggctggtttcgaactcctgacctcgtgatctgcctgccttggcctcccaaagtgctgggattacaggcgtgagccaccatgctcggcctcctttaaagattttgatcctaatcctgcaagtaggattgcggtggcgtggcaacatgcctacatttgtgtttcgtagggttcccctggctgcagtgtggagggtgggctggagggaaatctttgagaaggctattgcacttgctcaagcaagaggtgttggtggcttggcctagaattatggatgtggagaaaaaagcatggaggatgtcaactgtcttttcagcatctgacgacaccaaaaagaagatgtacagctccatcctagtggtgggaggtggtttgatgtttcataaagctcaagaatttctgcagcacagaattctcaacaaaatgccaccatccttcaggcgaattattgaaaatgtggatgtgatcacaaggcctaaggtaggttgtttcattgtgcaagttggactgtatgcaaatgaaaccagccttgtatgtggacagatcaaatcctgggaggcatgggcttgtgtctgaggagttcttgagggcttagggcaagtggaaaagttaatttcagcaagccatagatgtggtggaaggtgctctggcctaaggtactggatttctgctgctttcccctgccgtgctccccaaactagcatgactgaattccacctttgttaaaggatcaggtggggcaaggggaggaccaactgctctcaagccctgccagccagaacagctccattttaatctcttttttatattaaggatctccttctgctccctggaccagatgatctttaaggatctttttggtttgaactatcttgaaaagaaagataaacccaggaatttagaaatagattttgtgtgttttattaaatctcactgacaattcctggaaatgttcctatttctttttaatcctgagggagggattgtggggatctatttattccactcaaactgcgaaataagtaagtcatttatttatatatgttcctgtgtacagggtaaatagggtatttgtgcaatagtagtaaatagtagcatcttcagttataaaaatttaaaagttttcttggctattgaaacagaaagatgcctgtagttcataagtcctactgtctttttttgagacggagtctcactctgtcacccaggctggagtgcagtggcgcgatcttggctcactgcaacctctgcctcccgggttcacgccattctcctgcctcagcctcctgagtagctgggactacaggtgcctgccaccacgcctggctaattttttgtatttttagtagaggcggcattccaccgtgttagccaggatggtcttgatctcctgatctcgtgatctgcccgcctcggcctcccaaagtgctggggttacaggcgtgagcctgtatttaatcctgctgtctttaatacagggtgaaagcctggcttactaggtattgactcagcagggatttttctcggccccatattcaagtaaatgattgagtatatgtcttatgtgattaggctgaaatgccttcatcccttctgtaggacatggacccccggctgattgcatggaaaggaggggcagtgttggcttgtttggatacaacacaggaactgtggatttatcagcgagagtggcagcgctttggtgtccgcatgttacgagagcgggctgcgtttgtgtggtgaatggggaggaaatgtcactgccgaagaccaaaaacaagcttcttggtataaaagactcttacagaatatgtgtattgtaatttattgatctggatgcttaagtgtcatggacagtaaatgaatttgaactttatgttgaggacatgacattggtttgaaaatataaactgcttttgagcagtttagtcagggcatttgagaataaataggaactttctcttcagttgtaaactctcttgccctctctcagggtctcataaactccccagtgatgtaaacgttgctattgaaggttctcatgtggtgaagcccttcatttaagttggcttgaatctcatcagcaggcagcctcatgcaaccatgagggatagtatgtgacgagggagaactgtccactcatgccattttctctcttgtctagtatttcattaggatctaaagttgtctgagttaaatgcacttatgtgactcatgtgtcctcttagaatcccaaatagggggaaaaagttttggtggtttttgttttttttttcattttctgttggattacagaaaaagaatgggacccattcaggtctcgatttccaaaggtaaagatggaaggctgggcagactggcttttgttacctgacatgccgtagggtgagcttagaggaagaaagaaaacaatttttatttggccaaaacagaacaaatgctgaaaaggaaatcttgtttttttcctaaagccaaatagaaatgatttgggtataatttaagagtccttgtgttgtacagatatggtgactgatgtagttattaatactaccaacttagtcatcaagcctcaattttcctttacctgaaggattaagtgaaagcttttggagttcatgatgttcagtatgatcagttaaccttaacctctgagcatcctgaagcaaaatctaaataatgcagctattaccactggtggtccaggctctggtgaagccctctgagcccaggaggaagagaaagcattgtccagaggtaggaacacagtctgggagcccagagctctgggaggagtgggaaaatgctgcttcctgctgcttgcttctaggcacctgcttccgccatctcacttaccatggctagagatgggggtgagactggggaaggacaaaagcagggaacagataagtgatggaaatcagaagggaatatagaaagaactctggatgtggagaaatgccggtacctgagcattttgtatcaatgggagtaccctctgtaactgctcagtaggttacaaatgaagagtccaccagtattagaaacaatttaaacttgccagtaccaactgggatgtgtgccttcaatttgaaaattgtatgttttattttttaaatttgttaacagcattaatttatagagtattgatgtcatttatgtttctgaggtgtttcaacacaattttggatcagctgcctgtttgcaaaaacataatatatttctgttaaacagttcttcacctaacagcatattgctcttataactggtagagctgtttcaaaggaagttggtttctggtccaagttttgacctaaaccatgtccatcttctattaccagcacttacaagcactgtgaaaactgatcatgacaaataagtaaaatttgctacattaaacatattgcctcagccattactaagcgtccacttgtaaagctggacacagtttttactttatgcttcattttgattttttatccgtaagacataaattagaaggcatgaggtggccctttaaggataatctgcaaatatacacattttaatagtcatccatctgaaatcgatccacattccagagaagattcagtattgtgctgtgtgaaataagcattcccagaaaaaaaacatttatgctaataatacaacataacctctgcattaaagaaaaagatgcttttaggccaggcgccgtggctcacacctgtaatccctgcactttgagaggctgaggtgggtggatcatgaggtcaggagatcaagaccatcctggctaacagggtgaaaccccgtctctactaaaaatataaaaagttagctgggtgtggtggtgggtgcctgtagtcccagctactcaggaggctgaggcaggagaatggcgtgaacccggaaggcagaggttgtagtgagccgaggtcacgccactgcactccagcctgggtgacagagtgaaactctgtctcaaaaaaaaaaaatttaaaaaatttaaaaaagatgcttttagaagagtaaaaagttggaagacaaaatgtgcatcttttatgttctgtcattctgtgggggttttttcgtttgtttgttttagacagggtctgctctcacccaggatggagtgcagtggcacaatcaccgtttactgcacccttgacctccagggctcaagtgatcctcccatctcagcctccctagtagctgggaccacaggcttacaccatcacactcagctaattttttaaatcttttgtagagatggaggtctcgctttgtgacgtagcctggtcttgagcgatccttttgccttggccttgccaaagtgctgggattggaggcatgagccactgcacccacccctgttttttatttaagtaaaccattataataactcatttataaaaaggttacttcaagagggctttcaacttaagaattattttcattttgaacatgaaaagttaaatagtaactaagaaactgagaactctgacagtgacctctaataggtaactttaggcaaaagtagacaagtttgtgggtattttgttgttcatgttaaaaggcacctgtacaagaatcaagatatgaatctagtttgtagagggaaggtcttatgcaaataccaaatcatacaagtggttacacatataatagatcatttggtccagtaaaagtgggttcagcttgtttattccctacttttgttatcttaaaaacaatgattttttgcatgtaatagaaggtttttcacttaagatgctattgagtgaatcagtgaggggttcttagagttagtattcattaattaaacatagaatattagctaaacagttctgggtacactgcaatgcatggtctatggaagactagatgtttggctgaagatgctttattgttgcattatcaaaatggttatagttttcaattaaaactgtaattgatttctatgtataaaacagctttgaagttgtaaatgtagtttccaatcgttagttaatgctacattagttagcaatatttgaaaattttattggtataaaatgttttaattactaaggctgtttgtaggctgcatagtaagcttcaggatcatcacacgttttttccctgtaattggtgggataggaagcctttaaggtctcttgcttctcatgggtgggctacaaggagcagcagccatcgtggcaggcttgtgatctttttcctgctgacacctgctgcttgacatggagaagttctgcacagaaagcagtggcatccttcatgaggtggtacttggggcagacactgagagcattgtaatcgtcttttgtatcaatctctctaaagtagaccaccacgtatttgtgcagatgaatctggcttcttagatcactgcagaaaaggttaaaggcaagggggaagaggtcttgagagttctcactgggactgccctcgctcttgccacaggtaccatcgcacacactgttgacgtcattggaaagaaggaagacgactttgtctgctgccttcttttgagtggcaagccactgcactggacccatctctgctattttctttttctgccacttttcaaggatgacctcacttctgcaatggttttgaagaaattcagtgaagtaacaaattgtgtgatggaaacatatttcagatgggtaaaccacaagaaccttaatggggggcagtagtgtggtggtagaaaaggaagtcttcttgatcctttctgtgagaggagaaaagcatttgttatctgtgaacagcaaacagcaggctttcactctgtaaaccatccctgacaaatgatcccttgctagagaatgtcagctgagcaccaagggccttgttagtgacagcaaggaaaaacatcctgatgttccttttgaacacatcacctgaaacacactgatgcttaaaccttaacttttttttttttggagacatagtctcactctgtcgcccaggctggagtgcagtggcgtgacctcggctgactacaacctccgcctcctgggttcacgccattctcctgcctcagcctcccgagtagctgggactacaggcgcccgccaccacgcctggctaatttttgtacttttagtagagacggggtttcaccctgttagccaggatggtctcgatctcctgacctcgtgttccgcccgcctgggcctcccagagtgctgggattacaggcgtgagccaccgcaccctgccttaaaccttaactttttaaaccttattttaaaagcagtattttctaagtccctctcactaaaacaatcctctcaaccaagccttctcttttcagataaattcatagaaactttaggtttaagatactttgttggccaggtgtggtggcttacaccaggaatcccagcactttgggaggccaaggctggtagatcacttgagtccaggagttccagaccagccagggcaacatggcgaaaccccatctcaacaaaaagtacaaatattagctgggcttgatggcatgcatctgtggtcccagctactcaggcggctaaggtgggaggttcacttgagctcaggaggcagaggttgcagtgagccaagatcacaccattccactccagcctgggcaacagagtgagaccctgtctcaaaaaaaaaaaaaaaaaaatactttgaggtgtgtgattgtaacctcagtacttttagtgctgtatatgaacagggacacttgacctctgcacttcacattttgagtcgggtcaattaggtagttgcttgtactgtcttctacctgcaggtggtagagtttctttatagttcccaaagttaagtggcaccccttttcagcccctggaacttaacctggaattctgccctatacggtgctgtaaaacaaaccatgtttgaaactactgtaacgaatacaggtcagacagcatccctaaatgtaagaattcctgaggtccaggtgcccctgtggctttcttagcttagaacatggagttaatctcattttatttacaacatcacaaatgactcaaaggatgcatttgtatttcctttcctacatatggagaagaggagtttttttaatagctctgccttgagctgagtatgtaaatgctctggtttctgtattcaaatactccatgttttgaagttagcaaagcccttagagagtacagctgacccttgaacaacacagtggggaggggcaccggccctgcatgcagttgaaaatctcctataacctttgattttcccacaacttaacttctaatagcctactgttgactggaagtcttaccaataacataaacagccaattaacacatattttgcatgttatgtgtattatgtgctgtattataataaagtaagctagagaaaaaaatgtaattaaaatcatgagaaaatatatttactaattcattaaatggaagtggaccatcagaaaggtctttattcttgtcatcatcttgttgagtaggctgacgaggaagaggaggaaggggttagtcttgctgacttaggggtggcagaggcagaagcggtggaagaggaggcaggagaggtgggcgcctcagtgtaactttacagaaagacatcataatttctggcttttttgctttttcatttttctaaaaatatttgtatatggtaccaatccttcctccaccacttgctttaggtttaatgcttgtatcatagaagggtctgtgttacaaaagaagtgaaaagcagtcttgactaatcagaaacctgccagattgtttaatgtcgatttgttttctgatgctgctgcttctgtgtcgtcttcatcatcacctcacactgatggggaagcactcgtctccagcaggttgtcttctctttgttcctctagtgtggttatctgttagctcttgaatttctccaagatccgtatcttgaaacccttcaccccccaccttttttgccacatctacaatctctttccttgattggctctgttgtaaatcctgtgaagtcatgcacatcatctggacagttttctcctgcaggaatttattgtttcaggcttgatggctttcatggcttgctctgtcacaatgatggcatcttcagtgatgtaattcttccagacttccatgttgttctctctgttggtgttctcgtccatagtgttgacaatcctttccataaagtactgtgtgtaatgagccttgaaggtccttatggcctcccaatctagaggccaaattatgatgtgtttgggggcaaggagaccactctgaggactttagtgttgaactcatggggctctgggtggctgggggcattgtccaatatcaaaagaactttaaaaggcagtcgcttcctgggaaggtacttctgacttcagggacaaagcatcagtggaaccaatccagaaaagttttctcagtgtccaggccttcttattgtacaaccaaaagattggcagctggtgtttatcttttcccttcaaggccagggggttagcagctttatagataaggccagtcctgatcataaacccaattgcatttgtacaaagcagtccagttagcctgtcccttcctgccttaaatcctgatgcatgcttctcttccttactaatcaatgtcctttgtagcatttttttcccagaagaggacactttcatctgcactgaaaacctgttcaggcaggtatcctttctcctcagtgattttcttaatggcatccgggaactcacctgctgcctcttggtcagcagaagctgcttctcctgttatcttgacagtttttaagccaaaccacttttaaaaattatcaaaccatcctttactggcattaaattctccagctttagatgcttcaccttccttttgctttaagttgtcatataatgactttgctttttctcaaatcatattagagtctacagatatgcctttcttacagcaatcctgcacccacataaaagctacattttcaatacaagattaaaaggtattctgcaaaatgtgcaaggttttcatgtctgctggtgtagctgtagtgatggcttcatgaatttttttcttttttgactatggtccttacgctggattcatttatcttgaaatggtgaacaatcacagctgcagaccctcaatttatggtacatatcaagcaatttggctttttttcttgtaatgaaaaaaaaaagttttttttgctttttttcatgacactgcttcttgggagcactgccagcattactagtggcacttcgtatgggtcctaaggtgttattgaaggtttacgatattgcactaaacacgaaaaataccagagaaccactggagatactttttactgtgatatgtaatttactggagacaggaactgctcgtttggagatggttagcatcacagggtgttttaagtcgatacttgcaacccttgagctcaccacagtagcaacaggaggtggctaggaaattattcacagcaggacagtacgcactgcaattaattgtatgcagttatgatttaataccacatctttatgctcacgtttctctcaactgtgaatggtgccatgtacagttggtatgtgtgtgtttaagttttgataaatttttaacttttaatagttaaaatagttaactattggtatggtaggaaatgataaagtagactagtatctgtatacattttctgcatttatgacatacctttttcttcatttttttcaatattttaattgaaaagttcatccgagtttcatctaagttttttcaaagtgatacaaatctccaaaaaattttccaatatatgtattgaaaaaatccaggtgtaagtggctctgcgcagtccaaacctgtgttgttcaagggtcaactgtgtatgaatccaagcgaaagcttttcttaacacctcataagaactattttttaaaaaacaggaactagcatagagtaaccatcacaggtaaagtgtaatttgttatcagccatcttttgcccatttcagtactggtagaaggctcaatggtaaaaataaaaacgggacagtcagaagatctggaagtcctgaccctgctttcacctggcatgtgtaatccagtcatgctcgtatcagtctctgtaggagcacttgaaggtattacataaatgctatctaactctgggaaacgccaacatgtgattgcctccagaggaatcttctttaaaaaaaaattcaaaatgttatttccttactaggatgtctttaaagaattataacccttaccgtgcctccacattagatagatccctgccaccagcacccatgtggccaccagcagagacagcaggaggagaggcagccagcctcccggcttgcttttgtctggaaaaaacaaagcttattcacctttggaaaacaaatccacacttatctcttaatttaaaaactaagacttggtatactttatagaggtttatttattttttattattttttagttttgagacagagtctcgctttgttgcctaggctggagtgcagtggcgcaatctcggttcactgcagcctccgtctcccgggttcaagcaatgctgcctcagcctcctgagtagctgggattacaggcatgtgtcaccgcgcccagccactttgtagagatttagatccctttaaaaccatcagtcagaagctctttagagagtctgccaatcatatctttttccctagagtgtgcaggtcttgcattagattctcaaaagggatatgggacccaggaagttaagaacagtcctaaaatctctttggcttctttgtcctgatatgcaccggcattttcacagtaggaactagggtttctgtccagtttttttggttctttaaggaattaatgttattctgggtacaactgcttacatacatagcacatatagatgacatttttacaggccgtcttgttagactgacatacatggaggatagtgccacccgcctcacaagaacatcaggtaagctcaggcacagagtgcccaggaatctgtaaggcttcgcccacgcacaagtcagggctgccagtcacctgggttgtcttcactttatttggctgcgtctaatgacaccttccaacttttgaccccacccctggactgttgtgtaaacattgtatttctccatctgtaatgaaaaagctaacacatctctaactccagagacattttccagaacatgctgttctcaggcactagtgaggcggtaccattattcctcatttgttatccaaatgttggccatgtgaccacaccaaaagctcatcctgggccactgagactggtaattgaatcagaatatagtgaaatattcattctcatatatacccagccatcttacatctttggcttttttcagcagatccttgtggcactcagaacatccattttgcactgtgtatttttttcccttctgtgtatcctgctttgtaaagagtcacgagtggttttacaaataaagcctgttcttactcaga

SEQ ID NO: 417 - DNA, 38840 bp, Homo sapiens
  source 1..38840: mol_type = genomic DNA; note = NC_000006.12:106629578-106668417 QRSL1 [organism=Homo sapiens] [GeneID=55278] [chromosome=6]
agtgacaattaaagatggctgcgcccatgtaacatcactagcgaccggtgacctctttttcccccttgcctggctcctgtggtggcaggctgggcacgaggaccatgctgggccggagcctccgagaagtgagtggaattggcccgctgaggcccccgggagggcggaaagtttaacggacttcgttgacaaagagtccctgggccttaccacgcatcttggcccacctcgctgcttcctctagaactgagtgggggataagtacctttcgattcttcgggtgtactcgccgtacccattcaggagttaggaccttagcagggaaatctctgcaccgcggatctgtagggtggtgaagcggcttctcaccattagacatttgctctggtgtaggtcgggatccggatggtctcggagtgggctttgccaaagggggcttgcggggccacttcagtctctcttctgtccccgacacttagctgcagttgtcgctaagaagcccggcgaaactgtagtttgcaaaattcaaatgagtaatttttggcttttttcaaagaattcgttctctaggatttacctaccactaagataccagtgatttcctaacccgtgtctccatgtcctggacgtcgtgtttgaattctagactgtatttgtgaatgctttctgggcagttcttctaaatgtcacataagcaccctcaaattcactttaatcggtgttgaagtaatcattgtaacaggacttacctctcaacccccgtcttaaaaaagctctggtatttctgaattcttaatagactctttttaatggcacaactattatctcatttgcctttagattcttcctcatctttcatatccaataaatcactaagccctcttcattctatcttgcagatatggctggaatctgccctcttacgttatttctgctgttatagctttaattcgggtctttttgcttcctggttcacgtcactcaaccttagaactgtctgcaggcccattgctatcagagtcacataaagcacctgttgaaactaaaactatgccccactctagacttaattagagctgtgtggtaagttcgggagtatggtttaatggaggctccaggtgatttctggtaagaagtaggcgctgatgacctaaactgccttccatcttcctttttattccaccctagaagttgtcgttttgtttgtttcccagctggcagcgtggaattataattatagatagctgtaatatataatgagaaattgaaatccacaggctttaaataatagttcttcccccaaaatacattattatgttatcattttaaattgcgtcgaatcaaatttgttctttaaaaaataaatatgcccggcgcggtggctcacgcctgtaatcccagcactttgggaggccgaggcgggtggatcacgaggtcaggagatcgagaccatcctggctaacacggtgaaaccccatttctactaaatatacaaaaaattagccgggcgtagtggcgggcgcctgtagtcccagctactcgggaggctgaggcaggagaatggcgtgaacccgggaggcggagcttgcagtgagccaagatcacgccactgcactccagcctgggcggcagagcaagactccgtctcaaaaaataaataaataaaataaaaataaataaacagacaacacccaaaacttgttttaaaattaaatacaacctataaaaatatgttatttcctttttctgccttttccactgtcaatctaagtaacagaaagagactctaaagaaaatatttattttggagtagcaatgcaatgggaatatgtgtaatattgtaaactatgtgcctattcaagaaggttgaggcaagggatgtttttaaagacagaatgagaaggattacttaaattattttgaatcagttatccttggccacaaggatcagtcacaaaggtggcatcagtccaaggttggatggccagttgctggacagacattcttacagaagtactcgtgtgtgtggaaggttgcaatggcctttgtgcaaggttgtgttttttgcagtcttatgattgtttttaaaaaaaaattttaatgggtacatagtaggtgtatgtatttatggggcacatgagatattttgatacaggcatacaatgcataataatcacatcagagtaaatggtgtatccatcacctcaagcatttatcatttctttgtgttacaaacgttccagttatactcttttagttatttttaaacgtacaataaactattgttgactgtaatcacctgctgtgctatcaaatactgtatcttattcattctgtctaactatattttgtacccattacccatccccacttcccacccctactactaccctttcaggcctctagtaaccatcattctactctacctccacgaggtcaattgttttcatttttagctcccacaaataggtgagaacatgggaagtttgtctttctgtgcctggcttatttcacttaacataatgccctccagttccatccatgttgttgcaattgacaagctctcgttctttttatggctgaatagtactccattgtgtacatgtaggacattttctctatccattcatctgttggtagatacttagcttgctttcaaatcttggctattgtgaatagtgctgcaataaacatgagagagcagatatgtctttgctatgttgattttctttcttttaggtgcatatatacgtagcagtgggattgctggatcgtatggtagttctatttttatttatttatttttaattattttttttttagagatggggtctcactatgttggccaggttggtcttgaattcttggcttcaagcaatcctcctccctcagcctcccaaagtgctaggattacaggtgtgagccactgtgcccaaccagtagttctatttttaggtttttaaggcacctccatactattctccatagtggctgtagtaatttacatttcatccaacttttctccatcctcaccagcattcattattgcctgtcttttggatagaagctattttaactggagtgagatgatatctcattgtagttttgatttgcaattctctgatgatcagtgatgttgagcacattttcatataccagtttgccatttatatgtctttcttttgagaaatgtctattccaatcttttgcccatttttaatttgattattggattttttcctgttgagttgtttgaactccttatatacttcggttatcaatcccttgtcagctggagtgtgatagttcttcttatcaggcattcatgcgtgagaaccctctcttcttgaccttccttggctccatttgtcaggattttaacacaagtcactctattttgattttgacaactgtcatagctccttaagtgctaccttttttagtgctacttctctctggtgtcattgagttagccattgtgaaaaacaacttttgccgcatggggggagaaaagaactatttaggagagctgacccaggggaaaatccagaggttgccttggcatgattgcttttactttatcactcctttaacaaatactgattaatgcctagcatgcaaaatatttggtggttatttccccagctctaaaactaccttctgtctactttgtattttttccacatcactgtactgttgccctaaattctaccaattagagattaattaattcatacaaattatcttttaatttaattctcttttaaatatgtacagatgcctgggaaggttgaacaatttttccacccattgttgtaaattataacagttcaaatttcttcataataccttaattgagataatcagttgaagagggggaaatttgcggggaattagggagaagggctggaaatgatggcagcaatttgggggatgtgagtggaagcttatggtaacaggagtcctgggaataggcacaaaaaggaggtaaaatgccaaataggtaaaattcccatttgtaaattttacccaagtacattcagaaagggggaggaaatctcacttttacctttgtcttttgtggcatgatcccagtgtttctaggagtgaggcaccaggctaatattattaatcctaaagtttaaagaatgatatattcatttggcttcttggagcttcaactttagaaaaactaatcattgttctatagggaaatcgattctaaattttaaacaactgttattcattcaactaacatttagtgagtacctctgtgttccaagtactggggggtagcattaaagacggacagaagctcctgcttcctgaaacctaacttttttgtgtggaaacgcagccattaaacactttaaaaaaaaaaaaaagtaaatgatataatttcaggtagtatgagtactatggagaaaaattaagtagatcatagtatgagaactagttgggggagctggacattttagctagagtggtcagggaagatttctctgattgagtgaataatacttaatagagaccagaagggcatgaagggggaacactgggcagatctgagagaatagtgttccaggcagatggaacagtaagtacaaagaccctaaaacaagagcaagcttaacatgttcaaggaatagcaaaagggccaatatgcctggagagaagtgaatgaggagagcaatgagagaagaggttagggagacaggtaggagccaaattgtggagaacctttgaggccacagtagggagtatggattttattccaagtgtaatgggaatcttctggaaagttttgaatctgtggacatgatctgagttaaaattttaaaagctccttcagatgactcttaagggaccatgatctttagaaaagcaagtaataaagcacaaagactgaccgggtgcaatggctcacgcctttaaacccaacactttcggaagctgaggcaggctgattgtctgagctcaggagttcaagaccagcctaggcaatgtggcgaaccctgtctttacaaaaaatacaaaaattagctgggcatggtggtgcatgcctttagtcccagctgctcaggaggctgaggtgggaggatcacttgagcctcggaggttgaggctgcagtgaggcgagatcacatccgtgcactccaggtttggcaacagagcaaggccctgtctcaaaaaaaaaaagcaagaaagcatgaagaccaattagaagcctgttgcattggcgagataatgggagtggatattgttttttaagtcagggtttgcagatgttttggatatggggtttgaggaaaagagaagaatcaaggaggatacttaggttttgggctagggcagttggggaaatgtgacatcaagatgggaaaaccttaaagggaacatgtttggaaggggaaggttatcaagagttttgttctggatgtgttaatttttagatgcctcctagatatccaagtgaagatatcagttaagcaactagatacaagagttcagagctcagaaaagaggctaggtaagaggatatacattggccagagtgtagaagataattaaagctatagggccagatgagattacctgggaagttgagtgtaaaaatagaagaagacctaaaattccaacattttggaggtcaacaataggaagtaaagccagcaaaagagacttgaaagaatgcccagtgagacaggaggaaaaccaggatggcatggtgtcctgaacacagagaagaagtgtttcaaggagggagtggtcacttgtgttgaatgctactaaggagtactataaaatgagggctggtgctgaccagtgggtttagctatgtggagcttgctggtgatcttgatacgcagtttcaagaagcaagaaggcaaaagcatgaatggactgtgttaaagagaggatgagtacccatcactggaacactcagccctcaagagctctcctgtaccttcagcacttaccaaggcaaactttttttaaagaccattcttttctggctaggcacagtggctctcgcctataatcccagcattttggaaggctgaggcgggcagatcacgaggtcaggagttcaagaccagcctgaccaacatggtgaaaccccgtctctactaaaaatacaaaaattatccaggtggtggcacacgcctgtaatcccagctactcaggaggctgaggcaggagaatcgcttgaacccgggaggccaaggttgcagtgagccgagatcgcaccactgcactccagcctgggcaacagagcgagactccatttcaaaaaaaaaaaaaagacagttcttttcctaagtgtacctctaatgctgtctgttaagttaattaaaatgtctccacttcattacagagaaataaatgccaaaatgtcttgcatagagaataattatacaggttgaacatccctaatctgaaaatctgaaatgctccaaaatccaaaactttttgagcaccaacatgattttcaaagggtgtgttcaaaggagatgctcactggagcattttagactggagatttttgggttagggatgctcaactggaaagtatatagtgcacatagagtactccaaagtctgaaaatatccgaaatctaaacacttcttgtcccaagcattttggataagggatactcaccctgtagtatagtaagtagttcagagcatgagttttggaaacaagatgagtcctcggttgaatcccagctctgctactttttttttttttttttttttaagacggagtctcgctctgtctccaggctggaatacagtggcacaattttggctcactgcaacatctgcctcccgggttcaagcgattctcctgccttagcctcccaagtagctggaactacagatgcacgccaccacgcccagctaatttttgtatttttagtagagacggggtttcaccgtgttggccaggatggtcctgatctcttgaccttgtaatctgcccgccttggcctcccaaagtgctgggattacaggcatgagccaccgcgcccagccagctctactgctttttagctatgtgacctcaggtaggaacttcagtttttttatctgtaaatggagataataatagcttctcagtgtggatgtaaagattaaatgatatattaagcactgaggacaatgtctagaactaagtactagctattattaacattaattttgttacagggacaaaattactaaattatatgtatttgcatttttcccttcctttactttctaagaagagtggttcctgagcaagattttaaaatttttctaaggaggtatattagttgtctatggctgcataaaaaattactataaactttgtggcttaaaataacataatctcaggatctcacagttttctgggtcagaagtcagggcatggagtagctgggtcctctactcagggtctcacaaggctgaaatccatgtgctgcagttgcactgcaaggtgttgctagggctagagttccatctggagctccagccctctcgacctcgttggtttctggcagaattcatttcctgtggttgtggaactaaggtccgattttctgctggctgtgtggatagtaaagtaagtgagctgaagggctggagacatgggatggctggagttgacattttggagatcaaacggatgttagtaatgatgtatatagtctagacagtgaccaggagagttggcaactggggtgaggtgaaggaaaagcttgtgcaaagtgagatcaaagaactgaaaaatcagatgttggtgtacatggacttgaaatatgatgtgaacaagggagaggataggagcaatagtaacaaagatgacagtgtgctagccagcaaaattgtcaatgaatgaaaagtagtaccaggaaggctataggtcagcatactggggagcgtggtgtcatctcccaaggcatgtgctttgggtgagcggaatgtttgagagaagagggaagagaagcattgaggaacaaggagatcatctttcccctctcccactctggactctgtggtatgtggtaggtaggcactaaacaggagaagcagcggctgccagggaagacctagtttccattagagaaaagatgtgccagagagagaattttttttcttttaacgaaaacttaaaagttaacttcgttttatattcagatttgacacctgcagttttgtcctggggaactgtatatgtgatttatgtttcctgcttcttatgctcagtccatttagctgattagcatctttgttttcacttctcttctccacttcccttattgattttttttctcaaatctagagttcctaaaaatggtcttaatgcaaatcggcaccatttaaagtgaatatcctagacaatcttatttcttgctgttcaaccacaattgtaacaccttagcttttatccttataccagtctggaagcagcttgaggattgtaggcattaggggacttgagaggagtcaaggaaggagagaaagtggcaaatgcagttttcctcattgttacaacttagccatgggatgggcctgcctacgtatatttgtctctctagctctgggtttttgttagttctaactctcttccacccagcctactaccatctttgttcttcccattccatatacatgatgttaaaacgcactgctctcttttattccttctagcttctttcttctagagggtttacatttctttttttttcttttttgagacagagtttcgcttttgttgcccgggttggagtgcattggcacgatctcacctcaccgcaacctctgcctcccgggttcaagcgattcttctgcctcggtctcccgagtagctgggattacaggcatgcaccaccacgcctggctaatttcgtatttttagtagagatagggtttctccatgttggtcaggctggtcttgaactcccaacctcaggtggtctgtccatctcggcctcccaaagtgctgggattacaggcgcgaaccactgtgcctggccaagggtttacctttcatacaaaccattagacgaactctctcttcttgttactataaaagtcacttccttaaatcggaccttgctgccctccttatccctgcagcagtcctgcagcctccccatggaagtccttttcctcttgtcggtgagcattagggatcctcttgatgacctcttcccactgcttgttgcatttaaaaccctcagccccaagaatgccattgcgttgatgatttactcagtagctaagagcagatcatttggagattttcccctcaaatgcaaacttctgttgctttatggaacacgtgaaaacactgtcaacttggaggacaaactaagcttccaatagagtagagatagaaatggtgaagactgtatattatgaggtcaccttgtcctttactatttgtgtgactttgggcaaatcactcaaggtttctgagcttcagtttctttatctgtcaaatgagataaacagtacctaacttgtgtggttatttgtgtgttttgttgtttttttttttttttttttttttttttgacagagtctggctctgtcaccaggctggagtgcagtggcgcgatcttggctcactgcaacctccgcctcccaggttcaagtgattctcctgcctcagcctcccaagtagctgggactacaggcacgtgccaccacacctggctaatttttgtatttttagtagagacagagtttcaccatgttggccaggatggtctccatctcctgaccttgtgatctacccgccttggcctcccaaagtgctgggattacaggcatgagccactgcgcccggccagtgtggttgttttaagggttaaatgaagtaataatgcatgtaaagcaacagtgcctggctcttggaaaatactcggtaaatactattccttcccctattctccttttctctcagctcccatctaattcaattatcttttcataaaatctccaaagttttggtgtcatcttttacttattgttattcatcccttttatctgattagtaagtacatgttattattacttcctacaggaaatattagacactcatcactccatcttaggccctacttcctgtcaatatacactggtattcactacttcccagtcactttcggtgcagtttttttttaactccttctttaccagccttcccaatgtcttccctaaagacagaatttcagaaaagtttgtttttactttgcctttgaacccgtattttataagcatttctcttaattcatagtgtctcttactcgaactccacaataggtataaagatcttatttagagagccataaaaatcctgcaatgcctcgtccagttcacttctctttttttctctctggactgcctgtgttgcagctaagctaccctctgtacagaatctgccctcagccatccttcacccatgctgggcctcaactccccctggacaggatggtttacctaacttactgccgttgtttgtacagcctgactttgaaaccaaaagttggctaaggagaagaatgtcatgtcctccacctgtcctcaagctgatcagtgcatcacccttcatccactacactaagtgtagaggtaataggttctcttgattttgaacccaagcctcactttaaaatgttatacttagccactccatctccccccacccccaccaatataacaattgaaacttctgcagactcagtaaaaggtttttgaattgtatacactataggtttctgcggcactgaaacaaggccaaattacaccaacagagctctgtcaaaaatgtctctctcttatcaagaagaccaagtttctaaatgcctacattactgtgtcagaagaggtggccttaaaacaagctgaagaatcagaaaagagatataagaatggtaaattgcttttaactatacttaattgttatatctccagagaagtttaattgtttgtagcagtctccatttggcaagtgaagctttaaacataaaccatagccttatttaaagaacttgccatgaggataataaaaatgagggtaatggctatgtgatgcttcataatgtccaactgtattaatttctgccataaatttgttttctgaagaagtatctttgccaaaaactagtagttactgtaataacatgtattcatgtatctttatattttaaactatctcctttatcactcttttggctttttaatgcaggacagtcacttggggatttagatggaattcctattgcagtaaaagacaatttcagcacttctggcattgagacaacatgtgcatcaaatatgctgaaaggtaaagtttaactgatcagagcattgataattttataaaaataggtatttttcgctttaaggataataaagtaccaagataatctcagactaattatatctttgaaggaaatatttagaatataatatcatgtttttttactatttgctcttttagaatgcagaatttttctttagaggtcagccagcttaatgaatgctatctcagaagttttcaaaaattctattaatatttaggaagactcagttcaataactaattaccaactgggtgcatacctgtagtcccagctacttgggaggctgaggtgggagaatcacttgagctcaggagtttgagtccagcctgggcaacatagtgagacctcatctctaaaaaacgaaataaaaaaactgattaccataaacgtactgtataacctctaccttcagctcattgataacatgggaataagtatgaactggctatcatcaatacccttctgtggatgacgtgaggattcattaacatctactgaccagttattttttatttcctgattcctctatctcttgtagcacagtatggcaatgcttagatttattctttagagtttggtcaaaagaaagcaggtttatcaagatatttggatcctaggaagaaacagaaatagaaaaaaggttattcagagtactagacgctaaaaataatattctatgaggaatatgccccaccttcctctaatatgcagactgttgttaattattttggaatatacgctagagcttttcaatagctagagaaaattttagttgaaaataaagatctatttctactggaaatacataaaaattactgtgtggtataacatgagaagaaaaaatcaagtacaatgagcaaaatagagatttactatttcaaaaatactgggtacatctctgactatcatgcaatattttgtagaactaactggtaaagtcagtgtttttagattataaaaatagtgaaggcacagactatctttggaaaacatacattagcagtagaaaaaaattactggaaggaagtacaactgattatttaaattaggaataattaatacatatcactatgaattgcttaattgcagtttagactcttgattttttgttttttgtttgtttgtttgtttgtttaagacggagtcttgctctgtcacccagagtggagtgcagtggtgcgatctcgggtcactgcaacttccacctcctgggttcaagtgattctcctgtctcacctcctaagtagctgaaattacaggcatgcaccaccagacccagctaaattttatatttttagtagagacagtgtttctccacattggccaggctggtctcgaactcctaacctcaggtgatccgcctgtcttggcctcccaaagttttgggattacaggcgtgagccaccccgccccgccgactcttgtttcttacatatgatttacatgttcgctgttttgtttcctataaaaaggtaactggccttttggcgggaaccaccatcatccagtaattcaccaaaatgatgaacacaaagggaaagaggagaggcacccaatatgtgttttctaggccttttacaaaacagggagttgtttgccatgtacatgtgaacctataagaaaggtgatgtggacatcaagggaatgggtattgttcaaaaaggaatgccccacaagtgttaccatggcaaaactggagagtacacagtgttccccagcatgctgttggcattgttgtaaacaaacaagggcaagattcttgccaagagaatgaatgtgcatattgagcacagtaagtactgtaagagccgagatagcttcctgaaacgcattgaggaaaatgatgaggaaaagaaggaagccaaagagaaaggtacctgggttcaactgacgtgccagcctgctccacccagagaagcgcactgtgtgagaaccaatgggaaggctcctgagctgttggagcctattccctgtgaattcatggcataataggtataaacaaataaaagacttctggactgtaaaaaaaataatagtaactaaatttttttcaggttatataccaccttataatgctacagtagttcagaagttgttggatcagggagctctactaatgggaaaaacaaatttagatgagtttgctatggggtaagtaaaattgaaatcttctcttgagtttcttctgtctgtgcctttattttcactaaatgtagttacctaaaaggattgaggatctaatgccagtttcttagtccctctgtgagattatgttatgttgtttaatagatatatagtcatctctaattttgcttttggcttgtatttccctgatgactaataatgttaaacatcttttcatgtgtttattttgccatccctatgtcttcatcagtgaagtagcttttcaaattctgtgcccattttttgaaattgggtcatcttattattgagttgtaagaatcctttctggctcatgactgtaatcgcagcactttgggagtccgaggcaggtggatcaactgaggtagggagttcgaggccaacctgaccaacatggagaaaccccgtctctactaaaaacacaaaaattgcctgggtgtggtggcgcatgcctgtaatcccagctacttgggaggctgaggcgggagaatcgcttgaacccgggaggcggaggttgcagtgagccgagatcgcgccattgcactccagcctgggctacaagagtgcaactctgtctcaaaaaaaaaaaaaaagaattctttcatatattttggattcaaatccattatcagataggtgctgatttgcaaatattttcttcaagtctctggtttatctttttattctctgaacatgcctttcaaagagtaaaagttcttaattttgataaagtccagtttatcaatttttttcttttttctcttcttttcattcttttttttttttgagacagagttttgctcttgtcatccacgctggaatgcaatggtgcgatctcggctcgctgcagcctccgcctcccagcttcaagcgattctcctgactcagcctcccaagtagctgggactacaggcatgccccaccattcccagctaagttttgtatttttagtagagattgggtgtcgccatgttggccagggtgctcttgaactcctgacctcagatgatccacctgccttggcctctcaaagtgctgggattacaggcatgtgccaccacgcccggccttcttttctttctttccttttgttttcttcctttcatatagacagggtctcactgggtttcccaggctgatctcaaactcctggactcaaactgtgctcccagcttggtccagcaaagtgttgggaggcaaaagcaactgtgccaggcccattttttcctttattttttaaagatggggtttatctgtgttacccaggctggtcttgaactcctggcatcaagtgatcctctgacctcatccttccgagcagctgggactgcaagcacacatcacctcacctggctgaatttttttcttttatgattcatgtgtcctaagaaatcttttttgtttgtttgtttgttttttgttttttgaagcacagttgtgctcttgttgctcaggctggagtgcttggagtgcaatggcacgatctcggctcactacaacctccgcctcccaggttcaagcgattctcctgcctcagcctcccgagtagttgggattacaggcacgcaccaccgggcccagctaattttgtatttttagtagagatggggtttcaccgcgttggccaggctggtctcaaactcctgacctcaggtgatctgcccgcctggtctcccaaagtgctgggatcatagacgtgagccatcgtgcctggccaagaaatctttacctaacaaaggtcacaaagaattttttcctagaagttttatagtcttagctcttacatttagatctgttattcacttcgaattagattttcgtatatagtatgaataaagtccatttattcaacatatggatgtccattaactccagcactaataataaaaaagattatccttttcttgttgaatgatcttaggtttttttgtcaagaatcaagcacattcagtaggtctgtttctggactctgttgcatctctgtttattccagtgtcacaccatcttgattattatagctttatagtaagccttgaaattatgtagtaagagtcttctaactttgttcttctttttcaaaatcattttacataatctagatctgttatattctgatatgttttagaataagcttgctaatttctacaaacaagtttaatgggattttgattgtgattgtgttgaatttatagatcaacttggaaagaatcggcatcataatacatgtcttctcatacattttgttttactctggaatgtttttatgatttcctgcatataaattgtacatataatttgatttattcgtgtgttttatgtttcttttctttttttttttgagacagaatctcactctgtcacccagactggagtgcaatggtgcaatctcggctcactgcaacctctgcctcctgggttcaagagattctcctgcctcagcctcctgagtagctgggactacaggcacatgccaccacgcccggctaatttttgtatttttagtagagacagtgtttcaccatattggccaggctggtctcaaactcctgaccttgtgatccgcccgcctcgtcctcccaaagtgttgggattataggcgtgagccaccgcccccagccatgtttcttaatgctatagaaaattgtatttttttcagtttctaattgtttattgctagtacattgaaacataattgatttttctatattgaccttttatcccatgaccttgttaaagcttgcttattagttctagttgatctttgtggattctgtggaatattttatgtagcaaattgtgtagtctacaaatagagttagtcttatttcttcttcttgccttactgcaccagtgagggccttaggtgcaatgttgaatagaagtggtgagagcagatttccttgccttgatcttgatcttagggaacagcagtctttcaccaaaagtactttatacttacccttttatgacacttgtcacatttgtaatatttgcttggtcattgttctctgtttcatagaaacaagagtccttgcgtgtatagttcagagtggtatatcttggaattcattatatatatgttgaatgaactaatccatgagagtatatttgaacaaaggctttcaggaaattgccttcatcagctgatcaaaattaacatcaccagtgagggtgaagtggacgttatgtgcctccagatgtaattgtctgaggatacaatatcacctatgtaatattccagctgagaatgtgtaagctgactctaataatggggaaacaaaagataaatccaaaatgagaaccattctattaaaatatcatatgaaaacaaaaaaagggctgtgaaaatcttccaggataagagataaagaaagtaaaacctaacatcataaaactcaagaaaatgtaggggatgctgggcctggtggctcatgcctgttatctcagcactgtgggaaactgaggcagtaggattgcttgagcccaggagtcctagatcagcctgggcaacatagtgaggccctgtctctacagaaaaaaaaaattaaaaaaaacagggaaaagtattagtgaccttgaattagtcagagttcttttagataggacacatgaagcacaaatccacttaaaaaattgatagacttggccgggcacggtggctcacacctgtaatcccagcactttgggaggccgaggcaggtggatcacaaggtcaggagattgagaccatcctggctaacacagtgaaaccctgtctctactaaaaatacaaaaaattagccgggcgtggtggcgagcgcctgtagtccccgctactcaggaggctgaggcaggagaatggcatgaacccgggaggcagaggttgcagtgagccgaaatcacgccactgcactccagcctgggtgacagagcaagactccttctcaaaaaaaaaaaaaaaaaaaaaaaaaaaattaatagacttcattaaaattaagaacttctgtactttgaaatatgctactaaaaaagtgaaaacgcaagccacagactgagagaaaaatatttgcaaaacatgtatctcagaaagaaccgatatccaaaatacatagaacatttcacacctcaataagaaaacaagcaaccctatttttaaaaaatgaacaaaagatttaagaagacgtttcatcagagattaaaacatagttgacaaacacatgaaacaatgcttaatatcgttgatcattagtggaattcaaaattaaaatcacagtgagcttgggcacagtggcccacacctgtaatctcagcactttgggaggccaaggcatggtagtggatgcctgtagtcccagctactcgagaggcatgagaatcgcttgaacctggatcacttgaaaccgggaggcggagcttgcagtgagccaagatcatgccactgcactccagcctgggcaatagagcgagactgtctcaaaaaaaaaaaaaaaagagagagacaatgataattaaatggaagacctgactctagatttgatccaggaaggagataaaatgccataaagtactttttttttttttttttttgagatggagtctcgctctgtcacccaggctagagtgcagtggcgcgatctcggctcactgcaagctccgcctcccgggttcacaccattcttctgcctcagcctcccgagtagctgggactacaggcgcccgccaccacgcccggctaattttttgtatttttagtagagatggggtttcaccgtgttatccaggatggtctcgatctcctgacctcgtgttccgccctcctcggcctcccaaagtgctgggattacaggcgtgagccactgcacccagccaaagtacattattgaatcagttgacagaattgaattacatacagtagattcgataaaagtattgtaggccgggcgtggtggctcacccctgtaatcccagcactttgggaggccaaggcgggtggattacgaggtcaagagattgagaccatcctggccaacgtggtgaaaccccgtctctactgaaaatacaaaaattagcccggcgtgatggcacgcacctgtagtcccagctactcgggaggctgaggcaggagaattgcttgaatctgggaggcggaggttgcagtgagccgagatcgcgccactgcactccagactgccagtagagcgagactcgtctcaaaaaagaaaaaaaaaattattgtattgatattaatgttactgagattgataactatactgtgactgtataatgtgatatccttattgttaggaaatacacactaaagtatttagggataaagggctatgatatacatgtaagttacccttaagatacccttaagtttctatcatactttgtgtatatatgtacatatgtacaaacgtacacagagcacacaagtagtaaagcaaagggataaaatgttgaccgtaggtatgtctgggtaaagggtataaagtgctttatatgttatttttatttttgcaatttatctgagaataaaatcatttcaaaaatttaagttattagcattccacttgtaatgtttttcatagaacttctggttcagaagttcttaactgtttgaatgtaacccttttcagctggaagaccttgattcacaagggaaatcatcttcagttgaattggatgatcaaaagaggcaaaatcttttcttagcagattagctttgtctattttctaccacaaatgctcttccttcccatcctccgcaactgtcaattaatgaaagctacatctgaacaggcttcccacctttttcaattcaagctacagtgggttcttaaatgctcaatgagtgtcagaagcaaataatatactcagaagatgaaattttcacataaaatgaaagttttactaaggtatcttgcttcacttcgtcatcagatctgggagcacagatggtgtatttggaccagttaaaaacccctggagttattcaaaacaatatagagaaaagaggaagcagaatccccacagcgagaatgaagattcagactggctgataactggaggaagctcaggtgggagtgcagctgctgtatcggcgttcacatgctacgcgtaagatgcttttctctatctgtattttaaaacccacccaaatacaaacagtcataaactgtatccagcaatagagtagttcatatcctggtatttttctttctagtgagctatatgtgctcaaaggtatatcaaaattatatcttgagttgcactcaactgtacagtacactatgtatatttaatacttttaactttaaaataacaaatttttctccatagtatctggttctcttaaaatatgattttgtggatcttgcagaataaagcatcgaacataaatgaacttcattgcatttcatttttaaataatttgagtgtgtgctcactgattatacaaatatttagggactaacatacaatggctttagttgagtgctgctgaactaaactgttggtaatgtttatccttcagcaagatcaatcttttgaaaaaaaagaaaaaatgctaatatgtattaataagatattttaaatagtgttttcaggaatctgcaattaaaaatgtacatcagtaagtaaagttttttcaagcttgttaggtgctgattctgtttatctatcatactttgtatttggtaagaatccattgatcatattttcagttccatttgtaaagcatttcttaactacccaaagaaaagaaagtaaatatggctgttgctgtgtttatcagtctcaatttaatcaaaatgaatgtgtttctttagtaatagttttgtattttatctccccttaattatccattaaaactaagttctttcacacacattgcaatccataaatcatttatatttttttagagctatggagatgtgagttctacagattttttttcagttttcctaaaatcttattaacaagtaaaaccatttcattttatctctgtgaaattttatagcattgcattaatattaatgtgagttctgacaagttaggactgcaggattaggtgctttttttctgtcctcatcatcccacttagtgttcatctttctgaatgtgctttttagtagatggcattttgacacataattcctatggaaatgtaagttttacttttacatagccgtcagtgaatgctaataagaaaatgtatcttttaaaattgtgaaagcaacagtctgattttgtagcttaacttgacactgtaagaaaggaaatctaatttgcattttctgtagggcacaagtgccatgttattgttaggagcattgttcagtccaaagcttcactttaaatataagcaacagaagtacagaccaaaaataacttcagattgaatgtatctcaaactgtaaagtgttctgcttttgtttccttatttttgatttgtttacccctttttgatttgtttacccctttttgatttgtttcttttacaatagcttttaaaataggaagattcctggagtactgtgcagccactaaaaagaataagttagagcactatgcaatgacatggaaaaataaccaagataaattgttaagtgaaaaataagttgcagaacccatttctgttaaaagtaacaattgcataggtatatatgtcagtcattgcatggaagtactgcatgtctggatgaatgcatgtcagaactggtaacggttattgtgggggctgtgattctaagagtaatcttactttatacatcatatagttatataatattttaatttttatagtagatatgtactgttctacagcacaacttctgttttcctgaaatggttttttaattgtggtaaaatgcacataacataaaatgtaccagcctaaccatttttaaaagtacagttcaaaagtattaaaaacatgcaatcagtcttcagaacacttttcatcttgcaacgctaaaactgtgtacccttcaaccctctcccagccctggtaaccaccttctactttgtgtcttatgaatttgattactctagttatctcatgtacgtggtgtcatgtagtatttgtctttctgtgactggcttatttcatttagcataatgtcctccaggtccgttttttgtttttttaaaataagaacaacacaaactctgtaggtaactgggtaaagaaatgaacagtcactttgtagttgagtaatgcatgtataaataagtgtgcaaaattatttaaaatgcacattaataaaaactttttggttatcacactaacaattttaaaaattactagtactcagtgacggtactgaaactttaaaacacaatctgactcactgcaactagggatataaattggcataatctttctgacaagtaatttgacagcatatatcagaaacttatgtgcactaagtctacttcttggaagctagcctaaaaagtactcacacataagcaaaaatttatgttcagagattttcataacaaagttatttattaaatagttattctagttagaaacaacgtaagagtttaaattattaaacatctcaatccatgattctaaatggggtgggtagcaaagggctgtatctgaatttctaggaggggcgtatttagtctgtaaaagcatactgcaaaattgccattaatttgatttgttttcaatatcaacatcagaagaaagtgcaagatttatatgtatattgaaaggagaatggactttaaaataccaggaatcacgaatttatatgatggaatattacatatactttacattttcaggaattttaatgacatagtaaaaagctaatgttaaaaaagggatggaaactcatgattacagaattatctcaacggtgaaaaaaatgcatttttaaaaagacttgaacttaatatgccaaaatgttaacagtgttttcctctgggtattggaatattgagtacctaaagttttctgtactttatgaattctctgagatgaacatgtgttacttttgtgtaatcagaggaaaatacagtttaaaaatatacaattgaaagggtagattccaaatataattagagatatatcattcttctaaagataattccatttaaattccagggctttaggatcagatacaggaggatcgaccagaaatcctgctgcccactgtgggcttgttggtttcaaaccaagctatggcttagtttcccgtcatggtctcattcccctggtgaattcgatggatgtgccaggaatcttaaccagatgtgtggatgatgcagcaattgtgttgggtatttatataattctatatcatttgcaacagcttctctataaaacaatatatctgtcattcataagtattgctccttacaggtgcactggccggacctgaccccagggactctaccacagtacatgaacctattaataaaccattcatgcttcccagtttggcagatgtgagcaaactatgtataggaattccaaaggtaactttttcctttcattactttacagaaatactgtcaagtccaatagagagcacagacttgggaggcggattgggtgggtttgaatctctgctctgccacttttattaatcatgtgagttgagtatgtgacttaatctcttttagctcaatttccccatctgtaaaataggaataataaaaatactgacttcagagaggtttgtgaggatcaattagacagtcatgttaagtctgtaaattgtttctgtaatgggcaagatagcaaatattttagattttgtggaccatgcagtctttatcataactgcttaactgccattatagtgagaaagcagccacagacaatatgtaaatgaaaaagtgtgtctctgttccaataaaactttattttcaaaaaccagctggcttgtcacatctggcctatgggccatagtttgcccatccctaatgtaaagaaaggactttagcccaaagccacaacttgcatagtaatgcctcaaaaaatgttaacatctttactgttattattattactactgcatctattacagtagcaattgagtaatgaatacatgaatgttataatgttaaattactaaccttttaaaaatattaagcattgcaatatattaatactttaaatcttttaggaagataagttaccctgcagaataatgaagtttcacaacctcagcactgttggtgtttggggctggtaattgtttgttgtgggagactgtcctgtgcattgtaagatgtttagtagcatccctggcctctacccctacatgcaagtagtaccccaccaccaaaaccacaatcccacaaccaaaaatgtctgcagacattgtcaagtgtctcctggttagggaaaaggagacaaaagtaacccccaggtaagaccactgctatagagaaatactaccttatttaaaatcttccattaaggtaatatatgtaaggccaggtgcgtacacctgtaatcccagcaccttgggaagccaaggcaggaggatcgcttgagatcaggagtttgagaccagcctgggcaacatacagagccctatgtctacaaaaagttttaaaaaaattgtggggtgtggtggtgtgcacctgtggtcctagctgtttgggaggctgaggggggaggattgcttgagtccaggaggttgagactgccgtgagccatgattgcaccactgcactccaccctaggtgacagagcaagaccctatctcaaaaaaaaaaaaaaaaaaagaaggcaatatctgtgcattctttttaagcatttatttatagagagcataggctttaaaacagacccagtttgaaatcctagaccctctacttacctgctatttaacattaggaaaataacttcttatgtcaagatttttcattaacaaaatgaaggattataatacctacatcacaggcttgttaaaagcatgagatgagagagaatctttgaaaatcatctaacaggctgggcacggtggctcacgcctgtaatcccagcactttgggaggccgaggcgggcagatcacgaggtcaggagatcgagaccatcctaacacagtgaaaccccgtctctactaaaaaaaatacaaaaaattagccgggcgtggctgtgggtgcctgtagtcccagctactcggaaggctaaggcaggagaatggcgtgaacccaggaggcggagcctgcagtgagctgagattgcgccactgcactccagcctgggcgacagagtgagactccgtctcaaaaaaaaaaaaaagaaaatcatctaacagggtacctgatacatgagcatttaacatatatgctgatatatgctgatatgctgttaggttcctgatacataatgagcatttaacaaatattttccccaaccagatctccaatctttaatgttgttatatccagatcataatatctagtactgtgctttgtcataccataaacactctgaaatggatttagtctttctagctacctaccagcaattttatcctattttctaatgtattaccaaaggtcctgaagtacagatttttataaaatcatctatacagatgaagtacaaatttttataaaataatctatacagttccaattttgtatcttgactttttgctataaggaatatcttgtaccggaattatcaagtgaagtacagtctctttggtccaaagctgctgacctctttgagtctgagggggccaaagtaattgaagtatcccttcctcacaccagttattcaattgtctgctaccatgtattgtgcacatcagaagtggcatcgaatatggcaagatttgatgggctacaatatggtaagatggctgggttattttatttttaaggtagttgtcgcaaacatttgaaaagttcacttattagtgacaaaaaagttaatgcttgagataatgttagtgattcagaaaagttcatcagtgaatcattttacctttgtcattttagacttgtacttacactatttgtcataaatatttgtgtatgtttggtttgcttctcaggactgtgaataactcgaagggatagtatcttgttgtcatatgctcagtcccgctaatgtagagctcaataaatgtttgaatgaatgaatgagggagtgaacaattggagtttctttcttggttcttttcttttcttctctctccatgaccagtccatcagtcaaaaggcagatggggaaaagaaaccattaagggcaactccctaaactttagtattggtgacaaaaatgtgaatctaaataagccaggcatggtggcgcatacctgtaatctaagctactcaggaggccgaggcaggagaatcacttgacaagggaggcagaacttgcagtgagccgagattacaccactgcactccagcctaggtgacagagtgagactccatctcaaaaaaaaaaaaaaaaaaagtgaatctaggcctgattttagccaaaactttactgactttacttcctttcaagtaatgtttacccttttcttgttttcaggtcacagatgtgacattgatgtgtccactgaagccatgtatgctgcaaccagacgagaagggtttaatgatgtggtgagaggaagaattctctcaggaaactttttcttattaaaagagtaagacaactcatttaggaattttcttcattcttgaaacctcaagtaacatgtctcttatcaggtcttataagtcaaggtatttagtaaagaaacaaaatctttatgatttgaattagaaaagacctgtttatggcacttttgggtcctggtattcaaaaacaaaagaaatgttggtactttagctaaatgattggtacagattacaggcagtcctccatatctgtgggttttgcaaccttggattcaaccaaacacaaatcaaaaatattcaaaaaataaaaaataacacccaacaataaaaagtaatacaaattaaaaagcaatacagtgtaacaactatttacctcgcatttacattgtattagatgttacaagtaatctagggataattttaaacgtgcaggaggtgtgcataggttttatgcaaatactacaccattttatatgagacttgaatatcctcagattttggtatccacaggggtcttggtaccaaacccccaacggacaccaaggaatgaatgtaagtaggaagccattaaggattttaatctcattaaatgtcctttgggtattaccacattggtttattgctgttagagccttaagcagagagttgtattgtctcttgaaaaatgtattgaatcaacttagtttttccttgtattatgtatgtctttactctaaaaaagaattcagaatgactatgactcctccttcaattgtcttcattatgagtttattcacgatcttgtgaacaggcttcatcttctataccaccaagtgtgtctaagaggacatgagaagtgtgaaaaagcaagattggttattgtaatgaagagcttcttggagtttttctccatgccctcaagggcagaaggcattttattcatctgcgtatcctctcagggccgatagttagaattactttttatttttgagacagggtctcactctgtcacccaggctgtagtgcagtgaagtgatcgcagctcaccgcagccttgacctcttgagcttaagtgatcctcccacctcagcctccctagtagctggaactacaagcttgcaccaccatgcccagctaatttttgtattttctgtagagacgggatcctgccatgttgcccaggctgatctccaactcctgggttcgagcaatccacccatctcaacctccaaagtgcaggtgttacaggcatgagccaccatgccaggccacaggattactttttctaagaatactatttgaggccgggcccagtggctcatgcctgtaatcctagcactttggaaggccgaggtgggcagatcacctgaggttaggagttcgagaccagctggccaacatgatgaaagcctgtctctactaaaaatacaaaaattagctgggcgtggtggtgggcacctgcaatcccagcaactcgagagactgaggcaggagaatcacttgaacccgggaggcagaggttgcagtgagccaagatcgtgccactgcactctagcctgggcaacagagtgaaactccatctcaaaaaaaaaaaaagaatactatttggttatgttccagattaaaagactgttaccatattgaccagatgcttgtaatgactttggagtaggaaaacaaaaggaaataattttctaagtgaaaacatttattaagctaaagatattacttttgccaaatattactgattagaaccatattgtttatctcagggcacaagttgatgaattatataggtcaatgtaacagcataaaaagaaattgaaggagagaagtcagaaagcattcctcatgatcaccatttgggggttctgataaaaggaagttaaaattactgctggtatccctagctcctgagtcagtgccaagttgggtcaacttgggtagacaaaagtgataggaaaaatgggattcggaatactttttttattttaaaaagtcaacttatgtgccaggaagagtttatttatttatttttgagacagagtctcactctgtcacccaggctggagtgcaatggcacgatctcagctcactgcaaccctgcctcctgggttcaagcaattcttctgcctcagcatcctgagtagctgggactacaggcacacgccaccacacacagctaatttttgtatttttagtagagatggggtttcaccatattggccaggctggtctcaaactcctgacctcgtgatccgcccacctcagcctcccaaagtgctgggattacaggcgtgagccaccatgcccagccaggaagagtttatttttaattgacataaatatttacttatgtaacacatttatatctaccttttgctatttatcttctgtttgtcccatctgttcttttttcttttaaccttttcttctgcttttttttctttaaatagtaatttttctcttaaaaagatctaaaatgagaaaaatagtgtcatttatatttacctacatatttagtatttctggtgcttttctctctgctctagagatataaatttccatctggtataattttgtttttacttgaagaactttctttaatatttcttgtagtcctgttggcagtgaattctttcagctttggtttatatgtagaactctttattttgcttttaattttgaaagatattttctctgggtttaaaaatgtaggttaagctgggcacagggtacactcctgtagttacagctactcaggaggctgaggtgggaggattgcttgagcccaggagtgagagcctgcactgagctataatcgcaccgctgcacttaagcctgagcgacagagcgagagcccatctctttaaaaaaaaaaagtataggttgcttcttctttctgtactttaaaggttttgtccattgtcttctggcttacatagtttctgagaagtctgttgtcattcttatggtcattcctctgtatatgatgtatctttttttcctctgattttaagattttctttttatcattggttttcaggaatttgactgtgatgtgccttggtgtggttctctgcatatttcttcttctgcataggggtttgttaagcagctttgatctgttgggttatagttttaatcaaatttggaacattttggctattatttcctcaaatattttttctgtcctccatctgtctgggactctcttcacatgtatattaatctgcctgatgttgtcccacagctcacagacactacattctttttttttcccccagtcttttttccttctctgcttccttttggctagtttccattactgttttcagaatcactgatctttttttctgttatgttgattctttccagtacattttttatacattatatttttttctctagaagttccatgtaggtcttcttatcccttcaatttcttcattattttatattttcttctaccttcttgaacatatagaacatatttaggctgcgtgcggtggctcacacctgtaatcccagcactttgggaggccaaggcgggtggataacttgaggtcaggagttcgagaccagcctggccaacatgacaagaccctgtctctactaaaaatacaaaaattagctgggtgggaaggcgtatgcctgtaattccagctactcgggaggccaaggtacaagaatcacttgaacctgggaggcagaggttgcagtaacccaagattgtgccactgcaccccagcctgggtgacggagtgagactctgtctccaaaaaaaaaaaaaaacatatttatagtaactgttttaatgttcttatctactcagtattccatcatttttgcatctgtgtgtattaatgctttttccctctctggttatgggtcatattttttgctgcttttcatgtctgtatattgtgaattttacattgtcatttgctagacttttgttatattcctttaaacagtgttgggctttttcccaggatgcaataaaggtgcttggaatttgttggctcttttcaaggcttcttttaaagctttgttaagataaatccaaagcagcctttattccagggctaattttactttactttgaggtgatgctttgatgctgcatatatttgagtctttcgctttggctgttcgaaacacaaacttatttccgtccctgtttgagctctaggaattgttcagtccactgctctttggggattgtttccccagccttgggaatttcttctcatgcactcatagatcagtactcagccagagactcaaggaatctccctgcagatctgttgagctctctctttgtgccactcccttctattcagcaccctgctttgcaaattctagctgcctttgcctccttgaacttcagatctctgtccctttaacttaccccccaccccacatactgtttagcttcctctctggaatgaggcctgaaaactgcccctaggcattaagctggggaaatcaaagggcatatctcattttcttttcttttctttttttggagacagggcctcacttggtcacccaagccggagtgcattggcatgaccatggctcactggcagcctcgacctcccaggctcaagctcttctcagcaaccctcaacactccccaccccccccgtgaagctaggactactgtagttttttttgtagagacaggatctccctgtgttgcccaggctggtctcaagctcctgggctcaaggaatcctacccccagccaccccacaggcatgagggaccacacctggcctggcttacttcatttgtttctcttctctcacaactttttctcctgaatgtctgttgcctaatgcctgaaaatggtcatttcatatattttgtccagttttctagttgtttaagaaggcagagtgtcttagttctttttttttttttaatcccctattctgagaagcagtcttagttcatttttgctgctataacagaatgcctgagactgggtgatttataatgaacggagatttactggctcacagttctggaggctgggtgggaggtccaacattgagaagccagcacctggtgagggccttcttgctatgtccacacatggcagaaagcaagggtggggagaaaaagagggagagaaagggaaagcacatggggggctgaactttccctcttagaatggcaccaatcccactcaagagtggagttgttatggcccaatcacctcttaaaggccccatctcttaatactgtttcagtggcagttaaatttcagcatgagttttggaggggacaagcattcaaaccatagcacagggtaaatcccatctccattactctatcttggatggaagcagttcttcttctgagccatatttaaagtaggaagaaatttaatagaaaacaagtatttgttttgttttgttttgtttttttttgagacggagtcttgctctgtcgccaggctggagtgcagtggcgcgatcttggctcactgcatcctccacctcctgggttcaagagattctcctcctgcctcagcctccccagtagctgggactacaggcgcccaccaccatgcccggctaaatttttttgtatttttagtagagtcaggatttcaccatgttggtcaagctggtctcgaactcctgaccttgtgatccgacgcctcggcctcccaaagtgctgagattacaacatgagccaccaggcccagccagtatttgttctttataaaattcaggttttggaatatggtgtttaaaccacttaggtgttgtcagtgtgtaaattatatgtgatgcctgcattggtctctctgtagacctggtggtcaaataagagtaaggacctatgatatttctgtaccactcttttagagtaaaacatatttcacgtttttatcgtattttatttggccctcagtaaaactggagcaggtatatccatttttactgttgtggaaactgttgtggaaaagaatggttagttctttttttttttttttttttttttttttttttttttgagacggagttccgctcttgtttccagctctccacgctggagtgcaatggagcgatcccagctcactacaacctccgcctcccaggttcaagcaatgctcctgcctcagcctcctgagtagctgggattacaggcatgagccaccacgcccggctaatttggtatttttagtagagatggggtttctccatgttggtcaggctggtcttaaactctcagccgcaggtgatccacccacctcggcctcccaaagtgctgggattacaggcgtgagccactgcgcccggcctagaacagttcttgctagcctctcctaacagcttcagaagaatctaaaggattttttttccttttctttgtatcattgatttatggttactcctatgtctggctttttctttagtctttttagtaaaataagcattcttgaatttcacatttctacccctgggctatacctatccgtaaaatacaaaattcaaatactgcatagtctaccgctgtctatcttagtaacctttagaaagccatttgttgctgtgtactttactttcctcaccaatgaatattctggtttaatgatggccctggagttattaatattttgagattataagtgtagaattgcatctactagtgaattctgaattcggattgattaatttatatatacaaacttttagagtggcaacacagtggaagagaattcatttttatgttaagaatcttaatggtgcctcctcataaaagccaagaatccagtggttctttttttttttttttccctaaacaatgcctaaactctttatttaaccaaccagtatttctggttttcttcctgatgcaggattttaaaaccttagaagtctataaatactgcattcagactttccacatcaagagaaaggggcccagggcagaagatgtcaggccccaggctgttttggggtgggaaaagtggcaaagatttctcaacagtctgtttcagttttctaacttaattgaaatgcctttaagctctgcttcatccccaaactttcccctatggcgtctatgatagaaaaacactcctctctcatatacgccccaccactggggagccagggggaagggaatgggcattacacaggcaagccaaactttttattcagccagaaaatggaaatccaatggttctttatcaagcctaatgtaagataattgattaaaagaaaaatacaaaaaatccttaaaaacatcacctacttttttcccacagaaactatgaaaattattttgtcaaagcacagaaagtgagacgcctcattgctaatgactttgtaaatgcttttaactctggagtagatgtcttgctaactcccaccaccttgagtgaggcagtaccatacttggagttcatcaaagaggacaacagaacccgaagtgcccaggatgatatttttacacaagctgtaaatatggcaggtgaggattcctcaggaacattctgattttcttcaaattcttaggcaggtaccctggtcttcaacttaagattctagctagatggtttccgaaaagcaaaagtctatccttttggaatgcttaggagtgagtgtgtgtgtacatgtattagtctgttctcacactgctataaagaaatacctgagactggataatttaatttaaaaaagaggtttaattggctcacagttctgcgggctgtacaggaagctgagcagcttccacttctgcgaatgcctcaggaaacttaaattcacagtggaaggtgaaggagaagtagccatgtcttacatggcccagcccaagcaagagagaaagggggaaggtgctacacacttttaaaacaaccaggtcttgtgataactcactcactatcacgagaacagcaccaaggggaatggtgttaaaccgtttatgagaaaccgtccccatgatccagttgccttccactaggccccaccttcaacattggggattacaattcaacatgagatttgtgtggggagacagatccaaaccatatccgtacacttgcatgcactctcaccacacacacacaaacacaacacacttagtagttttttttaacttttattttgaaaaattttaaacccacagaaaagctgaaaaagtggtataatgaatgctgatatgcccttcacctggatgtaatcttgttaacattatatttgctttgcccttctcttcctctttctacacacccacactcaccacacaaacaactttgtttttacctgaatcatttgaaagtttcagatgtcatgacacttcacccctaaattcttttgtacaaatcttataaggataaattttcctacagaaccacaattccattgtcatacctaagaaaactaacatgattgaagaataatttaaatatggtttatattcaaattttctcagttctaccaaaagtgtcttttataagttgtctttcctcctgatatattacattggtttatggtatctttttaaaatctagaacaatcaccccacctctcttttttctttaaaaccacatcaggctatgctataatttttgtttcaatcatcaaacataatgtagaaaacttaagaggaaaaggaaagtctattacatttacctatacttttgcttactgtgttcattcttccttcctgaagtaccaagattctttattttgtcacttctgtttagagaaatttctttagcctttcttttagggtaggtctgctgatgaaaaattatcatagctttccttttgagaatgtgttgatttccctttgatttttaaaggttatttttgctggatgtagaactctggttcaacagttcttatctttagcacttaaaaaatgttaagagcccagtccacttgtgctgtaagatgtcccatccataatcaggatttgtcagattgcttcctcatgattgggttgagttaaacatttttggtagaagtactacataatcttcatgtcaggaaacagttaatatcagtttgtctcacttttggaaaccaagttgatcacttcgctaaggaagtaactgctagatgtttccttataaaaaggtacatttttccttttatcatttttttaagcaatttctggagtaatattttgagaccatgtgaatatcctattttccaattatcttgaacccagttttagcattcattgatcatccttgaaatattagctagagaattacaaaattctggctttactaaatctgtcattccttctacatttattagctagcagtattctctaaagaagagccttcctttttttctttaattcaatgtattataagcaattactgtcagtattgtttttgatggtcaaattgccttaaatttggccaataagagccccttcaagttatatgtatcctttaaaactgtccccattttaatttttgaaaacttgttttattgtataacaagatggtctgggattttgtactttctctgcccaaacctggaattaaaactaccctgagctaatttctcatctaatggattgccaaaaattcaaaaactgaacaacacactctgtctgcaaggctataggtggaagttcaaaatggtacaacttctttgcaggggaattttgcaatatctaattacatatgcatttgtcgtttgatgaagcaatctcctcctcatctaagaagatttcaagaataccaaaaaaatacatacacaaagtaattctctggggcattgtataaaatagctaaatattgaaaacaatctaaatacccaaccacagaagactggtttactcaattatggtaaaaccaagtaatggagtactatacagcaataagaaatgaatgaagaaggtttctgtgaactgatacagaatgatttccaagatatattgttaagtaaacaaaacatagtacaaaagcattatatagcataatatttttggttgttttttaaaccttatcctgtattgtacttattagcactggaaagtggaagaggtctctgctaattagggtggagaattaatcacctactgggtttccttcttttcccaggattgccagcagtgagtatccctgttgcactctcaaaccaagggttgccaataggactgcagtttattggacgtgcgttttgtgaccagcagcttcttacagtagccaaatggtttgaaaaacaagtacagtttcctgttattcaacttcaagaactcatggatgattgttcagcagtccttgaaaatgaaaagttagcctctgtctctctaaaacagtaaacatatcttacaaattaaaatgacttttaggctgggtgcagtggctcacacctgtaatcccagcactttgggaggccaaggcgagcggatcatgaggtcagaagatctagaacagcctggtcaacatggtgaaaccccgtctctactaaaaatacaaaaattagccaggcttagtggcgggcatctgtagtcccagctactcaggaggctgaggcaggagaatcacttgaaccctggaggtggaggttgcagtgagccgagatcatgccactgcactgcactccagcctgggtgacaaagcaagactgtgtctcaaaataaataaataaaataaaataaaatgacgtacagagattctatattctagagagtcaaatggtcttgctcaattcttgtaattaggttcttgttaatacagtcattccatggaattactttttaaaattcctgtgacaattaataataaataacgtgtcagcatttagtaagcatccactaagtgtacaatacttctacaataacacaagatacctgttcctcaaagacaatgcattctgccataatgttcattaaagagtttacagtaaaaataagattagggataaacttctcaaaaattgtacatctgtgtaactaaagcactaacaaaaacatgaatagtccttctagaggtaacttggatagcctaggcaggcaacttatcatgtggtgaaggccgcctcaggggttgttaaaaatgcacagaaacaattgagtgcgattattggcttctgagcgctgagcagagcaggtggaagaggaactttgagcacaggaggaaatgcaaccagtcagggcccagaatcatgcaaatctcaggggtatgcctctctggggaggagctccacttgcagggactccttttatttccctaagaaagagctgaaatgactgagaactttcctttcctccttagagttacaattttacttctgctattccggagcccatgcctagaagccagaacaactccatgttacactgagttcatgctcctatttactgatcacaaatgagctcattaatgtcatcgaaacatttattgtaacctaacagaccatcacagattggaaacttggtagatagcagagcatggtattagtgaaaaaggttcaaaatacacaagtaacatacactctgaaaaacatgcagataatttgctgatgaagcagaagaggggatgcgcatggcaagaacttgccttaccccagattctctatatctcatggtttccttttcctcttgactgtctttacgagtgttttttatttgggaccctcgagcccagagatattaatggatatctgtattcaatatttgacaaaatctaatggaaaccatccatttactcatgataaggcttcatcactggatttctgtgtcttcactagaacaccattgtcatctcatattgatcaggtattttaatctagcacttacatattgttgataaatgaaagctgaattgttacttaataaattcactttgtttagtaaaaaaaaattgttttctaaatatgacgttcatgaagagaaaataatgagtcagaatcatctgcagaaccactggaatgtttcatcgtcacctgttagttttcataaacagttttctgtcctctctgagatcctcccgctcccaaatactcaacctgattaacttcacataaaagtcttatgtgccaggcttagtaatattcctatagattttgactctgaatccctgaaagaggaagaaatccatgagagaaaattgcattactttatagcaagaggaaaccgttttaagttttttaattgctcagacaccacaacatcctagatggaggaaaccattttagttgaaggagcaaatatgatgtcaaaagcaagtaaataaacaaaccgttgccccaatctgtttttatgtaatgaatttaaaaaaaaagagagagagagagagatgggctctccctgtgttgcccaggctagtctcaaactcctgggctcaagtgatctgcctccctcagcctcccaaagtgctgagattaaagacgtgagccaccacacctggccgaaataataatattcaatattatatattcaatgatattattcagtattcaatattatttcaaataatattaaatctcttgttcctgtatctctacatgagctgcactaataatttgaatctggaaattaaaaagtgaaacatttaccgttctcatatactgatacccaactaccatgaaatgatacctaatttgtttttcttttctcttcatttttactcttaatctagtaggtctcattttgccaagtcactgtctgggaatttaagtggcaaatactttctttgtctcagctaattaaactctaaaattattagcaacagaa

SEQ ID NO: 418 - DNA, 3175 bp, Homo sapiens
  source 1..3175: mol_type = genomic DNA; note = NC_000018.10:13824149-13827323 MC5R [organism=Homo sapiens] [GeneID=4161] [chromosome=18]
agagccgcagccgcctagctgggggagaggcccgtccggggctggctctgagcgccgcacggccgtcggatcccggggacgccgggggcccgggctgagcgccgcggcccgcgaggaggagcaccggtaaatagccacaactttctatctccttgagatcctgagaataaatgcaaaatcgcgcttccgctgcatgtggaagtgagcggggcggcagctagcttgccccgtgagtttttaacacagctcgatatgatgtttagtataattgcataatttaccgatatatctgagctggaactcagctgtaacaaatgattgtagttcaataaatgcttagattaccaattttttccttttttatttttatagatttagggggtacaggtgctgttttgttatatggatgtattgcatagtggtggagactgggcttttagtgtagccatcacccctatagtgtacattgtacctattaagtaatttgttgtccctcaccccctccctccctcccaaagtgattacaaatattaatgatgacagtgatgacagaaattctctccagatgtgatctgagtttggagggcaaagggatttttgaaaatgaatcataagagagaaattttgcaacaaaggagtgtggtacatttaaattgctgtttttttttttaaatactgtgctcacgcggacctaataaactatcaagcagacctcatggaattccacataatgcagaagcgagggaaaaataggtattgagggaaaagcagcactgttttcctcaattttaacacgtatgtgcagcctacacttacaaacttaagacagtagcttttaacatgtgactttgctcagggtaacagaccattctggttatagccttacttacagctgtggaggctgaatcctgatgggtctaagaagtgtcaggacaagtgttagggatgcacctgtctgtctgtcttaagggaatacgggtctgggcagtcttaaatcggagctcccttgaggagaatgtcgtgcagtagccttaggaatgtgaacattgggagactggctgggattttgtaggttatgagttggggacacttatgatagtgaacttgagcccaggagagaagccataaaaagtgaaactgtcctgggcacttggaggtgagtgtctctctagtaagatgcatgtgaaaggctgggagctgaaagcaaggagagcagaagaggctggtgaagattctaatctgcgtgtccaggggcactcttccaggtctcaggaacgcaggtcagaatgtgcaagccagctgccgggcacgtggctcacccctgtagtaccagcactttgggaggctgagagagaagatcgcttgtggccaggagtttgagaccagactgggcaacatagggagaccctgtctcttaaaaaaaaaaaaaaaaaaggactgagtgagccgagcccagtcctctgatgcactgtgtcattcatcccctttcttaggctgtgttggttctaggctagctgctgtctttctttggtaggctgctaacctctttggattgtgaatttaaaacatgttttacagtaaatttgctgccaagacaagaggtgtatttctccagcaatgaattcctcatttcacctgcatttcttggatctcaacctgaatgccacagagggcaacctttcaggacccaatgtcaaaaacaagtcttcaccatgtgaagacatgggcattgctgtggaggtgtttctcactctgggtgtcatcagcctcttggagaacatcttggtcataggggccatagtgaagaacaaaaacctgcactcccccatgtacttcttcgtgtgcagcctggcagtggcggacatgctggtgagcatgtccagtgcctgggagaccatcaccatctacctactcaacaacaagcacctagtgatagcagacgcctttgtgcgccacattgacaatgtgtttgactccatgatctgcatttccgtggtggcatccatgtgcagcttactggccattgcagtggataggtacgtcaccatcttctacgccctgcgctaccaccacatcatgacggcgaggcgctcaggggccatcatcgccggcatctgggctttctgcacgggctgcggcattgtcttcatcctgtactcagaatccacctacgtcatcctgtgcctcatctccatgttcttcgctatgctgttcctcctggtgtctctgtacatacacatgttcctcctggcgcggactcacgtcaagcggatcgcggctctgcccggggccagctctgcgcggcagaggaccagcatgcagggcgcggtcaccgtcaccatgctgctgggcgtgtttaccgtgtgctgggccccgttcttccttcatctcactttaatgctttcttgccctcagaacctctactgctctcgcttcatgtctcacttcaatatgtacctcatactcatcatgtgtaattccgtgatggaccctctcatatatgccttccgcagccaagagatgcggaagacctttaaggagattatttgctgccgtggtttcaggatcgcctgcagctttcccagaagggattaagcacaaagtgctcctctctgtggctctgttctcctttgtttgctcacctatgacaaagcgacagccaaggggtaggcgggagtgctagcatcccatttttctctttaccagctcagacatgggcctaagaggctctctctgttcagttcctggtgattatgtccaacatgcaagggttgcttatccactctggggacagtcatgacaatttcttactgtccttttgtgtcctatggtttctactgctcccacccatttctgggggccccatccaccctccacctagcaggcatgtgctcggggaatgcacagcaccctcagtgcaagccagacatgatgaaacacgtattgtgacgcgaagaaaaccgtgatatcgacgccaggtgggattgcttcttctccccagaagcaggtccacactctgctggctgcactctgagctatgcatgcttttcagggaagaaaagagtggccagattctttccatcagaagcaatctgttcatttgttctgaaatgtcttctttgctccccttgcctgaacttttgattcatggcttttgttcataattgtctgaata

SEQ ID NO: 419 - DNA, 81020 bp, Homo sapiens
  source 1..81020: mol_type = genomic DNA; note = NC_000010.11:16436943-16517962 PTER [organism=Homo sapiens] [GeneID=9317] [chromosome=10]
gagagaaccagagggcgaagtgggagggcacaggggagactaaaaaggccagggaagttggcctgccggaagttcccagggagaaggcagcgcgttgtacccgaggtaaggcttcttggagtcagagcaggagccggaactgtgggcccagtaggaagagtggggcccgacggcggaggccgcgcggccagggttcgctgcagagctccacgcgagggtcctgccggaaggaaggattttctagccgctgcgcttgggccctgccgcctctccttaagtgcttgagggacgttgcaaagagcgccagtcccgtgtggcgccagctccctgtggctcgacagcaatgcccgggggcgtcatcgggtagctgtgctaagcctcctttaataagcttttttttttttttttttttagattcagggtctggctctgcttcccaggctagagtgcatttggcgcgatcacagctcactgcagcctcgacctcctgagctcaagcgaacttcctgcctcagcctcctgagcttcctgagtagctgcgactacaggcacgtgccaccatgtccggttatttttgtattttttgtagagagtgtctcgccatgttgcccaggctggtttcgaactcctgggctcaatcagtctgctgcctcggcctcccaaagtgctggcattacaggtctatattttttgacagtttataaaagccaattaccagcggtcatatgtctgagtcctgtgcactcttgcttaatccactctgcagccctgtgaaggattctagtgataacgacaaagctaaggtacagaaaaattaggccacactgctggaaagtttagagatggaaacaaagtttagaggtggagtctttctgactccacagccagtgtgctgttactctcttagactacctcattctttgtacatcccaagtcaacaggaactaaaggtatacccttacataggcagtaagaggggttgctgatttaaagaactttggacccagaaagagtagagccctattctagttctggttccagctcagtgactttctacaagttggttttcttttgctttttttaaagacagagtctcgcccttgcccaggctggagtgcagtggtgcgatctcggctcactgcaacctccgcctcccgggatcaagcgattctcttgcctcagccttctgagtggctgggactacaggcgcgctccaccacacacagctaatttttgtatttttagtagagacggggtttcaccatactggccaggctgatctcgaactcctgaccttgtgattcacccacctcggcctcctaaagtgctgggattacaggcgtaagccaccgcgcccggcctcttgctttttaagactaggtctcattatttcaccaaagctggagtgcagtggtgctatcacagctcactgcaaccttcacttcccccgttcaagtgatcctcccagctcagtctcccacaggtgcacaccaccacgcccggctagtttttattttctgttttttgtttttttttttgtatttttggtagagacggggttttgccattttgtccaggttggtgtcaaactcctgggctcaaatgatctggctgcctcggcctcccaaagtgctaggattacaggcgtgagccactgcgcctggcctgcctgttttctagacacattaaggtgagtggtctcaggccaggcgcggtggctcacacctgtaatcccggcactttgggaggctgaggcaggtggatcacttgaggccaggagttcgagaccagcctggccaacatgtgaaacctcttttcttcaaaaaattagctgggcatggtggtgggcatgcctgtaatcccagctactggagaggctgaggcacgagaattgcttgaacctgggaggcagaggcggctgtgagctgagatcacaccactgcactccagcctgggtgtcagagcaagactctgtctcaaaaaaaaaaaaaaaaaaggtaagtggtctctaggtcgctagtggatgtaataatctatggatttatgaggataagatcctgattttaccatttaatgatattttgggccagtttttttcctttttaattgggcagccctcaaaccagaatagattgagagggtcttccagttttgggtcatatttgctgctgaaattacaaggtagtcaggaagggtctgtttattcaatcaaagatcaataaatgtgtattttggaggtcagtagcggagtatccagccagaaggtggctagtgagacaggaggaaaatcaggacagtggcttttctggagggacttagggaaagatcagtttcactgggcaaatttccccttccctgtgaaggacagaaaataccttcaatatggctaaagtgagaagcatttctgaaaaaaaatgcaatttaatatcctttgaagtgtcagtaaattttgagccaaatagaagcagagagtaagagaacacaaaaatagatcatttagaatctggagaagtacatgaccgtgtactcagtgccaggacttggccataggatccctgtgactattttaagttgagtaagcagccctgatgcaagaattttagagattgtctcagttttaagcttaaagacaaaatgatgaactgtatagcatgagaggagcttggtaaatgtccacctttgcttccatgtgcaaagtgttcatacaggacatacatacatacaggacccattcatacaggaggaatgtttatccttaaatatcttctttttaaaatatttattagtttatttatttttgtagagatggggggtcttgttttgttgcccaggctggtcttaaactcctgggctcaagtgatcttcccacctcggcctcccaaactgttgagattacaggcgtgagccacggcagccagccaacttcaaatctattaaatgccctagtaagccatatagtaataatattgagaatttctgatcaagctcgagtctgctcagtatccctatgaacttgactgaggtagttgttgaatatattttcatacatcaaatgtggctttgttctgttttctttagctgttgtttctagtgtattttcagtggtccaggttttcctaacaagattttttttttttttttgtggcagggtctcactctattgcccagactggagtgcagtggccctatcttgactcactgcaacctctgcctcccaggtttaagtgattctcctgcatcagcctcccaactagctggaaatataggcatgcaccaccacgcccagctaatttttttgtatttttggtagagacggggtttcatcatgttgatcaggctgctcttgaactcctgacctcaggtgatccacctgcctcagcctcccggcatgagccaccacgcccggcccttaataacacttttataacaaaaggcttctcattcatagacatcatctcttaaaaaaaagaaaaagaaaaaagaataagaaaaataaaatatctggttccatttggcataaactggctctgtggttgtacctattttgtcaaaacaataaccacctgagtacaaatacctctgtgcctgctcagcgtgagagctgtgaatgttagccatttccctgtctccttccaggcaggtatgtccacgtgacttgtttggctaacgaaacgcaagtggagtgacctgtgtcacttccaggtaaaactgtgttaaaagccagtgaaagatttgtcacaatcactttccctctgccgcagtgaccatccagatagaggcagtggtctcagcctgggtcatagaggacagtgagcggagccccctgccttcctgtgttagacgtattcgatgagctagaaataaacttttgttgtggtcagaccctgagattcggggatttgagtgttactgtggcctagcctggtcaagcctgcgtaatgaatattatcagataagctgcatgtatgcggggatttctggctctggtttaccagataccttgggagctgtggggagggccctgaaagaggcttgtcctatgaatcatgctccttttactgtgtgggagatggcaggtgtgctgttcccatcatgctccagtctgctttgtgattttaatcaagagtggcaaaaatggcgtttagatgtttaattgcattctgtaagggcagaccatgttaaagtgtaaaataggtaaaggctgtatgcctggaagggataagaatcaaggctttcatttttactttgaaaaacacaatttatatatttttaacaattttcagtgcacttccaagttttccaatacagaggaatgttcgtgggtgagttgtgaaaagatgattcttcccaaatgcagttatcagtggatacatttcagaaattattttgtcactgaaggacatttgaaatgaatcatccgtacttaccattgactaatacgttttttttcaggcagcttcaaagagtattttaaatatgatttcctggctatctgatttcggatctaagagtatcagacttaggttttgctgttaatgtcctaggggcagtgtgttcactcttttattctgagttaaacagaaggcaagccgggagcattgtgctttggacagagctgtgctgcattcttaggggacactggctataaatccagtctccctagaggttaacaatcaaagttctccccttattatagtcaggcgagtgatatgatgatgataaattgcttggacgtgactggcccaagcactagtgtgatgaattatgttgttcggggcatgaccgaagatcttctattgtcagctggcaatgctaagtattggcagtattcataaatagccttttgccaatggtggtctctgctttacatattaaattctctgttttcacaggttgtggttcttagtcatctgtgtcctccactgaattcacttacataatcagcctttttttttttcctgttccctacttattaaacgggtgggatgtgctcacttgtgtatggtaaacactgagttctttcttcacagaaactgttaaaagagtaattattagttctttttactaaatccagagtaatagcaacttatcttgcagtggcttaattgggtaattatttggtgtgtgaagagcactttgaagagaatattggtaaatattgttaatttcgtgctcttttatgtaactgaaagcccattgcgaccacaaaatccttggtgttactgtgtacccacaaaatttctttcctgatgtggcttactattttccaaattatttgtttgttgatttttaaaaacattttttaaattttcataaattctcaaagttatctcatgtttatgccttgacaattcgacatgtctcatctcctacattcttgcatatctgaaaggttagatgttatcagtcttgctctctaacagtttggaggacagataaagcccgaccatgtaattgagaaattgaaataaagatttatttggtcagagcccatgccctgagctgtcatctgattgccatcagaatttgtttaaaagtgttaggttggccatgcacggtggctcatgctgtaatcccggcactttgggaggccaaggcgggaggattgcttgagctcaggagttcaagaccagcctgggcaacagtgagactcccatctctattaaataagtaaataagaattaggttgacttgcatgtgcctggccagctcttttgacagattttcttctcactttataaattcagagcctgcaggccaggcgtggtgtctcatgcctgtaatcctagcactttgggagaccaaggcaggcggaccacttgaggtcaagagttcgataccagcctggccaacatggcgaaaccccatctctactaaaaatacaaaaattagccaggcatacgtctgtaagtccagctactcaggaggttgaggcaggagaatcgcctgaacccgggaggcgaaggttgcagtgagccaagattgtgccactgcataccagcctgggtgacagagtgatactctgtctcaaaaacaataaaaataagatgaaataaaatgtagagcccccaggtgtaattaagggccatttctgtagcttagattagatgaccttgattactcactatgtttgtcttcctagggctgccatcacaaaataccacaaactgggtggctttaacaacagacatttattttctcacagctctggcagctggaagtcccagatcaaggtgtcagcagtgttggcctcttctgaggtctctctctttggcttgtggatggccgtcttcccttttatgcatgtctgggtattgatcttttatagggacaccagtcctattggattgagacctaccctaacaacccccttttaacttaattacttctgtaaagactatctgcaaatacaaccacatcctaaggtgctgagggttcgggctgcaacagacaaattttgcagggagatacaactgagcccaaaatgctccactgcaatagtaatggtctgtttggaagctactgtttttggagttattttctttgattgttaaatttgaccttccaagtgatgactacacatctttggagaatctcctcagttcaggaacttctttttaactaacattacttggaggagagcttaatgctcgtgactttaaacatttatgtaattaggtaaaaagggaagcaacattattaaatgacttggatagagttcatcaagcagttaagaaaaaaatgtacataatcaagcgtaccttgcagtctgaatgacaaacatccaaatatttgctgtaacaactcgcacatatttttaccaaaaatttcctctccgaatcagaaacttactatgatgagtccatgtacttacgtgtaccatcaaaaagggccagaggatcgctagagtatgctgtggtcctatctgctctttctataaagtggtatcttgtgctcatcttgcttaaatatgttgtgtcttacaattatcacgatactatcaactgaaaacagaaaggtctgtgagaaaagatgtgagcctaggaagctaaaaactttttcttttttttttttttttgagatggagtctcgctctgttgccatgctggagtgcattggcgcgatctcggctgactgcaacctctgcctcccgaattcaagcgattctcctgcctcagcctcccgagtagctggaactataggcacgtgccaccatgcccagctaacttttatatttttagtatattttcagcatgttggccgggatggtctcaatctcttgactcgtgatctacccgcctcggcctcccaaagtgctgggattacaggcatgaaccaccgcacccggcctcttttcttttttttgagacggtgtcttgctctgtcacccaggccggagtgtggtggtgatcatagctcacttgagcttctgggctaaagcgatcctcctgagtagctggattacaggtgctcaatacctcaataccacgcctggttttttttttttggacagaggacctacagggaactttattctcgtgcttttgtcttcactggggcactacccctcgggaagaccaggttggctcctggcacagggatgcacctggttaatttaaaaacatttttttttagagatggggtctcactctgttgcccaggttcgtctccaactccaaggctcaagtgatcctcccacctcggcctcccaaaatgctaggatcacaggcatgagccaccacaaccagctagcaaagctcttatattcaaagaaatattggggaatgtgaaggcacagaaggcctcagtttgacattatctgtccatatctataatgcatactatctttgcttctgacgagcttttacaatgttccctcagaatagaataatagggttttttttaatccttaaaagaatcttacgtagtaaattggtagtcagaaatattagagggttgttacatgggtatgtaagagtatataagtaaaacttggggttttgaatgggctgtaaaacacttttctctttaaaactgttttaagtggaaatgtattattgaagctgtgtgatggatgagtaggggttcactacactgcactctctacattagcgaatttttgagaatgtccatattaaaaagtttaaataaaagttattttttaaaaaggagaataaatgagtgaaatatatggcctcctgtgaggcaaaattcgatacctatataagggacacattaaatgaggtatgcatgcctatgttagacaatattaagtcgagtatggttttaactaccaatcgctctgtagaaaagtgttgttgaggctgagcgtggtggctcctgcctgtaatcacagctactcaggaggctgaggcaggagaatggcttgaacctgggaggcgaaggttgcagtgagcctagatcgtgccactgcactctagcctgggcgacagagtgagtgagattccatctcaaaaacaaaaaagaaaattattattgaaacccttatccaagagtagctggaagagtatctttcctagttttggcctagattatttgagacattttttatttatgcttctctggcatatgacatgtctattacttccatgagtcagtgcctttctcccagttagcatttcccaggctctcaggctgcagtgtctccaagctcagtctttgatttcagagcctattagccatggcacaaatccggtgaacacagaaacttacaaagaggccacttgtctccgatgcactgatgcaccatgcgtggctagtgccttctgcccaatgtcttctctgaaaacattccctgctgttgtaggaaggatcctacaggctgacaccaaggaagccatgctgtctcctgggtggtcttcagaggacactgcctcctgaggggctgacatggccaaagcccatccaagtcctctcagcctccatatctaggatgagaagttgtcctgggcctgtgagtctcgctcacatttctgcataagtgtcaggcctggcatagatgattcccttttgctttggtgctgctttgagcttgccccgttatcatttagtaaagtgcatcttcaagagtgtttctctttctcctgtgtgccagatatttcggagcagctcagtgcataagtggtaaagaatttgctatttccaatactgacattactgagactttgacttgcaaccatagttgatcttgaatgttcgggggtggggagaaggctcttacaaatagaggtgcaatgcacgccaccccacccccaacatttttttttttttttgagatagagttggtctgtcgcccaggctggagtgtagcagtgtgatcttggctaactgcaacctccaccacctcccgggttcaagtgattcttgtgcctcagcttcttgagtagctgagattaaaggcgtgcaccacaatgcctggctaattttttgtatttttactagagacgtgtttccaccatgttgatcaggctggtgcagtgccccttgttgatgatcattcctctcaagtgttatcttttcactctttgcctgttagtgtagttagatagagagatcaaactatttcaagttagaagttcaagtttaaaatgttctccatgaagactctacatagtcccatttgtgtattgaatttaattgttagatttgttatatatattaaagaacatatgcagtttcttagcattagaaacatttcatggactgttgctactcgttattgttgccatggtgaggtcaaaacgcttaatttcttaattctttcttttctattttgatagaccaccaagattgtaagacatttttgtttgtttgtttgtttgttttgttttgttttgtttttttgagacagggtctccctctgttgactcggcgagagtgcattggtgcaatctcggcttgctgcaacctctgcctcctgggttcaagcaattctcatgcctcagcctcccaaggagctgggattacaggcgtgcgctaccatgcccagctaatttttgtatttttagtagagacagggttttgccatgttagccaggttggtcttgaactcctgacttcaggcgatctgcctcccttggcttcccaaagtgctggaattacaggtatgagatagcatacccggcctttttttcttttctttttttttttttttttgagtcagagtcttgctctcttgcccaggctggagtgcagtggtgccatcatagctcactgcagccttgaactattgggctcaagcgatcctcccacctcagcctctcaaatagctgagacgacaggcacatgccacacctaatttttttttttttacttttgtagagataaggtgtcactgtgttgctcaggtcaatgtcttgaactcttggcctcaagtgatcctccagccgcaacctcccaaagtgctaagattacaggtgtgaaccactgcactaagcctgtaaaatattttttatgtggaattttcgtaatgcattatgtagtgacaccagtttttttgttaacctgttttcacttctctgtttttatttttgtgttagtaataacttggtcaaaataggtttacattcattattactatataacataacaatttcacattagcattaaggacaattttttataagttgtttctatacaaagaatgatgtattaaattttagaccttttatctataaatatgcgaaagctttgtaagtggctatactatctctgactataaggtcttggtccatattctttacaccatacatcgtatttatatatatgcctgcatatattcatgcctgcatattgtgcagaaccacctgtgaaccagatcctagtcttctcttcctctgtcaactgatcatagggaactccccatgataccattggtgcaggctggggagagaaggcagggtggcaggattggagaccatgggcatttgagccacttcctcacataacttacttgtgtcttcaggacccgttcgagcccaatcacttatataccacttccatttgatgatggaatgctgctgtgtacaccctactttctggttggatgggtcagaaagcactgagttcatgataagcagttcaggtcacatggtgacttgatgacccatagttaaacgttcagtttctaccaaagcccagtaactggccaagagctgtctctcaaaaggacactagttatctgcagaagatggcagggccttgctccaaaatcccagaagcctctgctgtgattcccctatgggagcctgccaagggctccaaacagcatccctgtctgccactgacaacttgggcaccattggatctgctgggtcatatggtccaagtggcagaggagcttgcatagtagcctggacctgttgcagagccttcttctgttctggaccccactcaaaactggcagcctttcaggtcacttgataaatgggtgggagtaacacacgcaaatgaggaacgtgttacctccaacagtctaaataggcccactaagcattgtgcctctttcttggttgtaggaggggccaaatgcagcgacttgtccttcatcttaaaaggaatatctcgacaggccccacaccgctggacccctggacattttactgaggtggaaggcccctgaattttagtcggatttatttcccatcccctggcatgtaaatatctcaccaataagtctggtgtgtttgttacttctcattcactgggtacaatcagcataatgtcatcaatgtaatggaccagtgtgataagtcatggaaggaaaaagcgatcggggtccctctgaacaagattatgacacaaagccagagagatgatatacccttaaggtaggacagtaaaggtatattgctggccttgccatctgaagacaaattgcttctggtgtgccttatggataggaatggagaaaaaggcattcgccaagtcagtggctgcattctaggtaccaggagatttattaattttcacaagcaatgaaaccacatctggtacagcagctgcaattggagtcaccacttggttaagcttacaataatccactgtcattctctaagatccgtctgtcttctgcacaggccaaataggagagttgaacagggatgtggtgggaatcaccacccctgcgtctttcacgtccttgatggtggcactaatctctgcagtccctccagggatgcaatattgtttttgatttaccatttttctaggtagaggcagctctaatggcttctatttggcctttcccagcatagtagccctcactctaccattcagggagccactgtggggattctgccaggtgctaagtatgtctaagccaattctgcattctggtactagggaaattaccacatggtgagtccagggacccactggacccactgtatttcagacctgagctaaaactctattaaaagatgttcttccagctactcttggataagggtttcaacaataattttctttttttttttttttttttttgagacggagtctcactcactccgtcgcccagggtacagtgcagtggtgcagtctcggctcactgcaacctccgcctctttgcttctgctgtccattacagtaacaatgcccaccttgtctttgatggttgagtgttgccacttgccctctgccactttaggatccagttattcccactgcatttaaattttgtagttgagtgactggtgttcccactgtaagatctggcatacaaagaagagcaatcacagagctcttcaaggatgcaggtgctcctctcacaaatctatttcacaaggtattggtgaaggacatatcttctgggccctcccagctgggatgggtaggtctaaagtgactaatccactctagcatcttaatctccctaagcccttggatcccttcctctaccttaaaccaagggaaatcaggcatttctagctcacacacagtgggtcatcttttgattcacatttcagctaaccaaacaaataaactcttagaaccttttctaacaccctgagttgcaacattaaatgcagaatccctgcttagtgggcccaaatcagtaagttcaggctgatccaactttatgttccatccaccattatctcacacccttaatatccattcccatgcctgttctccagatttctgcctatataagtcagaaaagtaaagcaattcttctggaatgtagcgcaccccctcatgggtcatactctgaacctcatctctaggggcctactgggactttagtctagttacatatctagaagcaaacgggtattgggagtgggtcctgaggagaattgacattgtcttgcctggcaactgcctcaggagaggccatcactgttgcctcaggtagtgcatggttaatctcctcagacaaaggtggaaaggctgatggcagtatgggtggaagaggggatgttgccatcactggggatggggaagctgtttcctctggttaaagaaaataaaaaggctcataagagtttataagctcggtgtccccagtttcatctgggtcatcccacatgtccccattccaagttgcagggtcccattcttttccagtcaatgccctcactttgacaggagacatctgatgagactgagcatccacctttcattgcagatcagccactcacatgataaaagcttgtgtctgattttccacaatttcagccctttgtctacaggagataagactctccttcagggcaatcttagaagaggctcagtatgtgcttctggagctggacgttagaatccctgaactcatcctttgctttcattaccttgtccagcgaactaagtagcaaccaaccaactttattgtattccttggttctccacatatggtcaaaggtattatgtacagagtcactaaaccccttgcccctcatgagtggtgaatcaggagtatcaaatgcatctattttgcataactctttaaacagtttgcactaaggactatcagcgttctccatactattagaagtagagtacttagcatttttggatgtcgttagattaagcagtcaactccagaaaccccaaaacgcactaaagaactccatccttaaaattctgtctgtgaccaaaggcccaagagcccctggtaaaccgctggtgtaagtacaagagtccgaaagctgaagaacttggagtctaatgtttgagggtagaaagcctccagcatgggagaaagatgaagtccagaaggctcagcaagcctgctctgtcatcttctcctgcctgctttactctagctgcactggcagctgattagatggtgcccacccagaatgaaggtgggtctgccactccccgtccactgactcaaatgttaatctttgccaacaccctcacagacatactcaggaactatactttgcatccttcagtccatcaagttgacactcaatattaaccatcacaaggtttgagagttaaaattggctaatatgctgggcgtggtggctcacgcctgtagtcctagcattttgagaggccaaggtgggtggatcacttgagatcaggagtttgagaccagcctggccaacattactaaaccctgtctctactaaaaatacaaaagaaagtagctgggtgtggtggtgcactcctgtaatcccagctactcaggaggctgaggcaggagaatcacttgaacccgggaggcagaggttgcagtgagccaagattgtgccactgcactccagcctgcacaacagagtgagactccatctcaaaagtaaataaataaataaaataaaattggacagtagttttctctgcctaattagaagtcagtctatatatctgatgtgttgggagggttattaccccccagaaaaggatttctttcatagatgaaataaaatgaattcgttacaagacattgtggagatgttgctaagccctttaatttttggaaactcagtataattttcatcagttcttgtgaaacttgatttatgctcgtatcatcttccagagtgttggctatgcctgtgtactacctttaccactaattacttaatagtttttctttaaaccaatccactttttttactttagctccatcctaaacaataatatctatgaaatcacaggcttgcaatgttgattactttcttttttctaaaacacattaaaataaataacaacttgtttaaaaaagttttaaatgcccatatatcacctaaaatcagtttgaaccaccagtgggatacacacacacacacacacacacacacatatatatacatatacatatatataatatcacagtttttgaaagcactgaaaaaagccaagcagattattgactttttttgtttttttttttttgagattgagtctcactctgtcacccaggctggagtgcagtggcatgatctcggctcattgcaacctgcatctctcaggctcaagcagtgctcttgcctcagcctcccaagtagctaggactataggtgtgcatgaccacgctcagctcagctaatttttgtatttttagtagagatggggttttactatgttggtcaggctggtcttgaactcctgacctcaagcactccatctgtctaagcctcccaaagtgctgagatttacaggcatgaactactgcgcccagctgtgactttttgttttctctcctcctcctcctccttcttcctcttcttcttctcctgctgctgctgctgatgatgattctccttctccttctccttctccttccttttcctcttcctcttcttcttctacttctacttcttcctcatttattattattgttattattttgagacagtgtcttgctctgtcacccaggctggagtgcagtggcatgatcttggctcactgcaacctccaccacccaggttcaagtgattctcctgcctcagcctcccaagtgggtgggattacaggcatgccctcacacccggctaatttttgtacttttttagagacggagtttcaccatgttgcccaggctggtctcaaactcctgacctcaagtgatctgcctgcctcagcctcccaaattactgggattacaggcgtgagccactgcgtccagccatttcttcttattttttaatataatagagatggggtctcaatatgttgtccaggtggggtctcactgtgttgcccaggctgatcttgaattcctgggctcaagtgattcttcggcctcagccttccaaagtgctgggattataggcatgagccactgcacctggccaggttattgattttttttaacacttatttcaccatctactaaagaataaaattattcttggttaagttggcacaaaattttcagagtagtttctgtagttgtgttgtgattattggaaactaaaaattgtgcatatatacagacacacatatatacatatatataatacatatatgcctagatagtggattatatgaacttttatttgggatatagccagccgttttcagttgcttaggcagtcagcatcacgtatttgaaggctactataaagacaccattattgtatacttgcgcctctattcttactcacaagcagtatgaagaatgataataaataattaacaatctggaacttctgggttgtgaagtatttttatttcatgcatctgttagtaataatctgttgtttatactaagtttatagtaaagtaaatactggaatatggttcatttaagtatggtttgcctaatgggacatcagaaaaaattcatataaagaaagatatcaatggttttcacattccttgtaacaaaatggtctgtctgattttctactatacatatatccctgttcatgtaatatttaaacagatgtgaacaaatggagaagcttctggagaggtcatttagagcccatgtaacatctttccacatagactcatagaacttgtatctggaaggaagcttagaaatcactttgttccactcccttgttttattaatgagaaaactgaggtcctcagactaagtgatttgcccaaatatgtgcttctggcatatcagctgtgtcacatttatgcagttggtaaagttttagcttttcttcctcttggggaaatagtgatatgttcagaaagcattatgtcatcccgtctgtgtctatttttttgtgagggagacaattttttggagtacagtgaaatagcatccacttttattttaaattacagaaattccatggtcaaccaactccacttctaatccatttttgaaatacagtaagttaacattaatttttggtggcacagaacatactttataactactattattcgtataaatacaaaattaacctgccaggcacggtggctcacgcctgtaatcccaacactttgggaggctgaggtgggtggattgcttgaggctaggagttcaagaccagcctgggcaacatggcaaaactccatctctactaaaaatacaaaaaattagccaggcgtggtggtgcacacctgtaatcccagatacttaggaggctgagacatgagaattgcttgaacccgggaggcagaggttgcaatgagccaagatcacgccactgcactccagcctggataacagaatgagactctcaaaaaaaaaaaattaacctattgaattagagaattagcctattgaatcaggaattatttgtgtttctaatatacgtgaacaagagagaaaaacatatttttctaagcaatgtcaagacatataatataatttccatttttatggcaagtaagtatatgtacatttaaacattccaagttcttgatttttaatctacaattatgtctaataacaataaataatagaacaataaatactaatatataataataaactgataataagtactatatagtaatgaaataataaaagctgataatcaaatgtaataaaagaacattttcatattaatgcataatgaaaactgtacgaaataagttacctaaagactaaactggccaggtgcagtggctcatgcctgtgatcccagcactttgaggagctgaggaaggtggatcacttaagcccaggagttgaagaccagcctgggggacatggtgaaaccctgtctctacaaaacatacacaaattacctgggcatggtggtatacacctgtagtcccagctattagggaggctgcagtgggaggatcacttgagcctgggagtcagaggttgcagtgagctataatcatgccactttactccagtctggatgacagagagagaccctgtctcaaaacaaaacaaaaaaaaaatgaataagcagagctgttctcctgaagcatcagaccaagggccagaaaaaagagaaacttctgagcagaaaagtactgccctggccccaatagtttccttggtttgctttccatatttgcaaccgtggcataaaatgattatcacgtgtcagtgacaaattaacaggtgcagtgactcatgcctataatcctaacactttgggagaccgagtcaggaggatcgtttgagcccaggagtttgagaccagcctgggcaacatatcaatacctcgtctctattaaaaataaaaaaattagtgaagtgagatggcatatttctgtggtcccagctactcaggaggctgagcgaggtggatcacttgtacctgggaggctgaagctgcagtgagccacgatcatgccactgcactctagcctgggcaacagagcgagaccctctcaaaaaataaaaagagcaagccaagaggtaaaggtttaacttcatctgatacctaaacaagaactcaagaataaaatagcaagtgccatagagactttacctatgaagtgaaaaataatttcaaaggaaggacagctaattttgtgtttgtaataggtttatactggattgctccacagcttgttggtaaaagtaactttgagcacttagagaacacatctttatacttagtgtgttccaatttaaaaagtgttattactttttttttggaaaccgagcatctaagtaattctgagttctcccaggccaacagaaactgagacagggaaaatgaacaaccatcatccccggaatgctgtgatttgccataaccaagaaggcaagtgagttttcacagtgcaaaagacgttgccagttgttcattcttctgttaatgctaccagagagtacatattctaaatctgttcacctgtgttttgagactcaaagcagctctaaaatacgtacattctttccagtcaagttcacttatccatccatccataaacatttacagaatcctgctatgggccatccattgtactaaatgctgtctgtgatcctgttctcacttaaacattgagcagagatgattctttaagagttatgataatccttctgtagttctcctgtggtgtccccagagaatgccaggagattagaggcccctcaaatgaacacaatatcctgccagtctccgcagtgtgcatcatttgtcattgacatagggtagtcattttgcactgttgttgcaactatgaaaagcaaacaaggagactcttggaagctgggcaatgctgttctgcataggagtttcctttttttctggctcttggtctcaggcttcagaagaatagctctgcttgttcttctcttagcaataaagaacaaggtcccaccttccattctctccactgaaagcagtagaggtacccgcaggggagaagaattttgcgcattacctgttcttgctctcttcttggatagggctgtggctgtgtccattgctagtgtctttggtggctgatatggtttggctgtgtccccatccaaatctcatcttgaattgtagctctcataattcctacatgttgtgggagggacctggtgggaggtaactgaaccatggggaaggtgggggggggttccgccatgctgttctcgtggtagtgaataagtctcacaagatctgatgattttataaggggtttccactttcacttggctctctcattctctcttgcctgctgccatgattgtgaggcttctctagccacgtgcaactgtgagtccattaaacctttttttaaataaattacccagtctcggttatgtctttatcagcagcatgaaaacacccttctttcttcccagagtgaattagtgaatacaaaggcttcagcgagttacatgcgcttcatttctgcctcatagtcattaacgctttaatacgtttaaccctttagttgttttgtttgtttgtttgtttgtttgtttgttttttgagatggagtctcactctgttgcccaggctggagtgcagtggcgcgatctcggctcactgcaagctccgcctcccgggttcacgccattctcctgcctcagcctcccgagtagctgggactacaggcgcccgccaccacgcccagctaattttttgtattttttagtagagacggggtttcaccgtgttagccacgatggtctcgatctcctgtcctcgtgatccgcccgtctcggcctcccaaagtgctggaattacaggcatgagccactgtgcccggcccctttagttgattattaagcatttcttctttaggaaagccgtgtttagttactctcaccgctatgtaatgccagttacttcaaagtactttgtttttgtttttttgagaaagagtctcactctgtcacccaggctggagtgcagtggcctgatcttggctcactgcaaccgctgcctcccaggttcaagtgattctcctgccttagccttcccagaaactggcactacaggtgcgtgccaccacacctgtagtgtggtggctaatttttgtatttttagtagagacgggatttcaccatgttggccgcgctagtctcaactcccagcctcaggtgatctacctgccttggcctcccaaagtgctgagattacaggcatctgccaccatgcggggccctcaaagtattttgtttatcataagtgtattcattccatttacctacatgctgtataaaatttgttataaacctgattaaattgcaaactccttgaagacaggcaccatgtctgctttttctgtctctaaggtagagagggtctgacccaatttattagtgttgtatgaactgtcagcaaacagaaagaaaaacaaaacaaaagaaaccctattatcttgtggaaagaccttatattcaattaaagattgtaggaagacctgactgcaaaatgggttgaacttttgagaagtgaaatgttttgctgctgcccagcactttttttttttaagctctcatatcacaacttggctccatcacaattaatcttatgtggtaatgcagtgacaatgagatgatttctctggagaatctatgctaatactattaaaatgctcttacaatgtcaaagtgattgcagtgtatgcatggggggactgtgcttatgcgattatgatattatagtgatgggcgattaccataggaaactactaattcaaccctgcagggacttgcattatgaagccattagaacaggagattataatgacacaataacttagatgcacattcatgatgtgaaaaccaaaagctaattggaatgcaagtcatatttccgttaaattgtaattaaacactgaaagcaatgcttgtttaaatttgagacagagacgtgcaatccaggaatgaaagttgtggggaaggagtgcatggcgagtgtaagcttagaagtatctagaaaccatttgcaactctgccctttagtatttactgggtgtgaaagctgtcactgaagctgcttctccagatttgctccctctctgctggtcctctaaagcaaccaaaaacagtaccaagacacaagaagcgtgagtccaatttccattcctatcacaaccactaacattgacagcctttttgtttcatttttgaagtgagcataaagcaccttacctccctcaatacaagagactaaagcacaattttttccatgaataataaccttttatatatacaacaaaattagtccatattcaaaatcagacagaacagataagtgcaaagggaaaaaagatttttaaaaagccttaaaaattctacccccagagatgacctatattagcatctctgggtattttctttcagactattctccatgcatagtatcaatgtatttttcttcaaaaatttgcattctacaacacttttaaaacccacttagtgattcttctcaccccttccagtcgcaagatctatttcttatccaagagattccagttgataagttttgtttgttttttaaaggtcagctgaagctggacgattttacgtgtcacttgggcaagtatattttactattagagaatcatacttgcaaaggtttatactctgcatatatcagttacagggtgggtctatagtaaattcttcagattctaccagcagtgctgtagctactccacatttgtctctgtttaaggaatcaatggggcctttgagaaatcatagggctctaatttgttctcaaactgataattattgtacggtttagataaatatcgattatttttaaaaaactaggaacatttaggaactacaggacttgttagatacacccctgcatctgctagttcagatgttttgaggtcacacagcagctcgtatgtattccctcctaattatgactcaaactagttcttgctccttggtctaaatatagttgagtttttgttagtaagtatttgctttgcacttagatatgctgtatatttcagagttatttatttatttatttatttatttatttatttacttatttgagaccaagttttgctctccttactcaggctggggtgcaatgcaccatcttggctcaccacaacctccgcctcccgggttcaaccgagtctcctgcctcagcctcctgagtggctgggattacaggcatgcgccaccatgcctgggtaattttgtatttttagtagggatggggttttttccacgttggtcaggctgatctcgaactcccgacctcaggtgatctgcccgcctcggcctcccacagtgctgggattacaggcaggggctgctgcacccagcccagggttatatttattaccccttcttgcaatgaccaaatgaagaagacaatttaaattactagagtcttatttttctaattaggaaaaggaaagcacactgcagttaaagggcttgtttcgtgtcattcagtgaacagtggaattgagattaggtcttctggtcctgggttagcatagcctcttttttaggctaagatgtgatgttaccttgggttaatacttctttattaacagagacaagaataactaattttgatgttcatagtaaatacctacatagttagtaaaacaaacattggacaagttgagagactgggttctagtttaggctatctgaccttcaaaagattaaggattccattttagcatctaaaaatgaagtcatcaaattaaatgatctccatagtttattccagctcaaaaattctaaagtcaaatagtatttaacattaattgaaatgcaaatatttttattttaagcattatacattttaatacttaataatatattttacctactttaaaaaccattaatctcaatttaaaaccagtccttacttggatgacatttaataatttgacattttttagcagtagatttgtaatttgacttaaactttctttttttatttaagaaatgtattaaaattattaaagttgcagatataagtctaatcaaaaagagatgaaaattacagtctttttttttaaatagagtctcactctgttgcccaggcatcctactgcaacctctacctcccgggttcaagagattctcctgcctcagcctcccaattagcggggattacaggcacccgccaccacgtctggctaattttggtaattttgatagagacggggtttcaccatgttggccaggctggtctcgaactcctgacctcaggtgatccacctgcttcagcctcccaaagtgctgggattataggcatgagccaccgcacctggccaaaaattacagtcatttgatatatcggcaatattgttaaattacagttaaaactacagtgaaaggagatttttcacttgcataattatataagtatatagataaatcattgtctcaaataatattttaaatatgtgattttctgtgaattcttaggaagcaggtgatagcaatgattgaggtgctcaattaagctatggtactagaggaacctttctaaatattttactgcagcttatttttatggggaaaatatataagcaaattaaattttagcaaattaaatataattaaattcctttatatttaattacatatataattatatatacatatgagttaattaaaatttgttatttgatagtggagattttttctatttttgtgagactttttcgctagagaatttagaattcagttagagtattttctcagccatctcaaagaccaggaaagagtgattattgctctatgacacatgtagtcattacagatttgcccttgaccccattgtagtaaatcagctttcaggagttgaaattagctgtttgttaccttacttttagtacatcagatactagtctttccccaaaacacttctctctgtcaggtgccacactctcttaggaccagacaaaatttgttactttgagttctttcctagaccattaataaaggcgacctctagagcaatttttctcaaacttggagttccacaaactctcaacaaaattttgattttgtcttttcatttttgtaatcatcaaaccattttaagcatattctgaatcaatatacctattttataaccatatattgccctagggtttcattatatgcatttccattactttttaagacttgagtgataccaaatcattacctaaaataacaacatttatctttttcatgactttttttttcaaactggggtctctgttttactggaagccatgaccgtatttcctaggatttttttttttttttgagacgaagtcttgctcttgtcacccaggctggagtgtgatggcatgatctcagctcgctgcaacctctgcctcccgggttcaagcaattctcctgcctcagccccccaagtacctggaattacaggcgcctgccactacgcctggctaatttttgtatttttagtacagatggggtttccccatgaaggccaggctggtcctgaactcctgacctcaagcaatccacccgcctcggcctcccaaagtgctgggattacaggtgtgagccaccacgcccagccttttcctaggactttatgagaggtggttggattgagagagcagtggataatctgtcaaagtggtttacttcctttatttatttcctttataagaagtacagttggtttacaaattaaatcatatatgatggtggcgtttgtgtttgtttttctgagtctgactttagggtttgtttatagcagtatcctaagggtagaaccaagagttaagacttgttgtgagttttctcgtctttgcaatttttccagccctgcgatttgtgctgtgtcttccacataatctacttttttttttttttttttgagacagagtctcgctctgttgaccaggctggagtgcagtgatgcaatcttagcgctctgtagactccggctcccaggttaaagtgattctcctgcctcagcctcctgagtagctgggattacaagcatgtactaccatgcctggctaatttttgtatttttagtagagacggggtttcaccatgtaggccaggctggtctcaaactcctggcctcaagtgatccacccgcctcagcctcccaaagtgctgggattacaggcatgagccaccatgcccggccacataatctactcttaacattacctccttaagattgatggctgccgggcgtggtgagtcacgcctgtaaccccagcactttgggaggccgaggagtgcaaatcacaaggtcaggagatggagaccatcctggctaacatggtgaaaccccgtctgtactaaaaatacaaaaaattagtcgggcttgacggcaggcacctgtagtctcagctactcgggagactgaggcagcagaatcgcttgaacccgggaggcggaggttgcagtgagccaagattgttccactgcactccatactccagcctgggcgacagagcgagactctgtctaaaaaaaaaaaaaaaaaaaaaaaatactgtttctcactcatctgtctagctgagggaaacttggagacagagggaagaactcagccaagctcctgataaaccacttaattaaagctaagagattatcatgataaatgttaattgggattatcatgataaattgggattcttgtcctgtgttcttttataagaaacaggtgatgcatattttcttttttttgttgttttttgagaccaagtctcgctcttatcacccaggctggagtgccatggcaggcgcgatcttggctaactgcaacctctgccttccgggttcaagcaattctcctgcctcagcctcccgattagccgggattacaggcgggtgccaccatgcccggctaatttttgtatttttagtagagacacggtttcaccgtgttggccaggctggtctcgaactcctgacctcaggtgatccgctcatctcggcttcccaaactgctgggattacaggcgtgagccaccatgcccggccaacgcatattttctttggcccacattttaggtgtttattaataagtgttggtcgacgcccaaaggagaaatctcagaggtcatggttgttatactatttttaaaggtctcccacaggatgcttaaggaacctatagcagtggattctgcctttagtgaaagtggaatacagctcatcatccttgtctcaataataaccccatttcctcattggtgaaatgggaacaataataataaaagtggatttcgtctcaaagtacatccgacggtccggtcttccactgtttttgatgactcaccttctgttgatcccttgcctacttcaccggtacattaggagatttaattaaagtgtgtagaggatctaagctcttcagagaaacacacagcattattatggcagataacacttctgatcttccataatctcttgaaggtaatgaaaccagcaatatagaaagctgagggtttaatatagtcagagttttatgaagacacatccatacaatactttattaatagtggtcatcattgtggccttgagagttcagaattcaattcctaggaactttctaattgttctcagcattttgatttaacttttttcctgtcaataaacacaatcgagagatcagttaagtattcaggtcatgctggttttactcaactttgaaggctttcctattttgttttcaaactatgattattacaatacttttgtaagttggagcaggggggaaaacagtatttatttaggcttgtgtttcctgactcgtctcctggtctctggtttctccagctttcaacctgtattccaactgcctacttaatgatcgcccttatgtagttctcatcctctgggccaagcccttgtgtcagtatttttcactgtaagctaatgtacaacctacaatcagcctttacgggatgctttaaagtctggaaacatgctcctcattgctcatatcatcagaatgtctctgtgacaagccacctcctccaggaagccttctcattcctccagtatcagtgaatgttgtccacaccgatctcacagggcacttgctttgtacctgtatccatccattttcatgctccagataaagacatacctgagactgggtaatttataaagaaaggaggtttaattgactcactgttccacatggctggggaggcctcacaatcatggtgggaagggaaggatgagcaaagtcacatcttacatggcaacagggaagagagaactcgtgcaggggaattcctctttataaaaccatcagatctcgtgagacttaaacactatcacgagaatagcatgagaaagacccacccccatgattcaaatacctcccactgggtccctccatgacatatgggaattgtgggagctacaattcaagataagatttgggtggggacacagccaaaccatatcagtacctctctcctgacatttactgcactctgctttgtatcgtaagtatcctatgaatatataaaaacgatgagtgactcattgaatgcttaccatatatgtgctaaggtaggcactgtgttggtggctcctctcctagggccaggattgtttctttttcatcttcgtttccctgcatatcttcagttgaagttagtagatcctcaggaaacatttgcaacattaaattgaaatgtatgcaggtgaaattagcacgtttggaaagctgatttccttgaattcccttcctatgccctgagaacttaagaccgaagttgccccctcagatctgtaaatcaaagcagtttttcttaatatttcaggaagcataaagatcattggtcacaagcctataaagaggacataatgccaacgaaaacataggtttgcttgtggctgaaattacattccatcagtatggaactgaagggtggatagaacagaaatatttgctcattggttgagcagacatttattgatcatctgcctctgtgcaattgctgtttgtattagttcattctcacactgctataaagatactacccaagtctgggtaatttataatggaaagaggtttaattgactcatagttctgcctggctggggaggcctcaggaaacgtaaaattgtggtggaaggggaatcacgcatgtcttacatggcagcaggagagagagggcaagtgagagcagggaaaactgcctcataaaaccataagatctcatgagaacccactaactatcatgagaacagcatggggaaaactgtcgccatgctctaatcacctcccatctgttccctccctcaatatgtagggattatggggattacaatttgagatgagatttgggtggggacgtgaagccaaaccatatcactgttatagcttagagttgtacctagtgttccaagtatgggaatggagttagttatcaaaacaaaatctagttacaagtacaactctccttttcatcaattatggtgttgactttcccaggcaggtgtccaggcaggcagcagaccagagcaaggcaagggctagagtcagaatggaaaagtctctgagctccctgctagtggctgtcagacctttttctgttataactaccttttttttttttttacaccaaacaggctaggttagaccatctaaaaacaggtatctgcactgattgtttgtttgagacagaattttgccctgtcacccaggttgcagtgcagtggcaccatctcagctcactgcaacctccgcctccccaattcaagtgattctcatgactcagcctcccaagtaactgggattacaggcatgggccaccacgcccagctaatttttgtattattagtagagatggggtcttgccatgttggccaggctggtctcaaactcctggcctcaagtgatccgcctgtctctgcctcccaaagtgctgggcttacaggcatgagccactgcacctggcctgattcttttcaactctggattaacaaaacgtggtagccaaaatcaagacttttcttggagagtctaccgtgtgatcttcaaaggacctggggagacttgtgtgggaaataccttttagatatactgtattgttatttgtgcaactgaatcatacagcctttctgtgattcaaagtttatttaaaaattaaacggccttagcaagaaattcctgaggatggtctatacatttaaaacatttacctaagagccattatccagttttacttcttataaaggaagacctatggccatgagtcacttgcagtaactttactaagtatttttagttttctgattttcagttgacttccaccaatgcagataggaaatgtctttggagatgaagtcacttgctgttatttttttatatgctcaagattctggctcttacactactgtccccttatccatggttttgctttttgtggtttcagttacctgtagtcaaccacagtctgaaaatattaaggtattttaagacagaaagagagagaggagagaaaccgcattcacgtaagttttattccagcatattgttataattcttctattttattattagttattgttgctaatcttttactgtgcctaaattataaattaaactttatcataagtatgtatatatgggacaaaaacatagtatctacagggttaggtactatttgcggtttcacacatccactggggcccctggaacagattttctttggataagagggcactactgtggatagtaagggaaagttaaaaaaacaaaaacaaaacataaaaaggctatgtattcctatgtagttgggtacagaataataatctaaaatagcacatttgctgccgggctcagtgactcatgcctgtaatcccaacactttgggaggttgaggtgggtggatcacctgaggtcaggagttcgagaccagtctggcctacatggtgaaacgcagtctctactaaaaatacaaaaattagccaggtgtggtagtgggtgcctgtaatcctagctactcgggaggctgacgcaggagaattgcttgaacctggaagatggaggttgcagtgtgcaattgcactccagcctgggttacatgagtaaaattatgtctcaataataatagtaaaataaaatagtatatttgctgccttctgagaacttggagtgtgaagatacaggaaagttgaaaaagcaaacctggcttcaaaatccagagcccaaacactttgggaaaaacattttccatgctttttaataatttttagctcttccgatttgggaaaataatgtcatattccgtaaaagggctgtgctgtgatctcagaattatctattgtcagaaatatattaaataaagattccaagaaaatggccaggcatggtggctcatgactgtaatcccagcactttgggaggctgaggcaggcggatcactttaggtcaggagtttgagaccagcctggccaacatggcgaaaccccgtctctactaaaaatacaaaaattagccgagtgtggtggcagacacctgtaatcctagctactcggaaggccgaggcaggagaatcacttgaaccagggaggcagaggttgcagtgagccgagatcaaaccaccgtactccagcctgggtgacagagcaaaactccatctcaaaacaaaaaacttccaggaaaatgtttagctcttttttttttttagtgacttttaacctctattaactacacatttttgttgttcttttctagtgctaattccacttctatttataattctttgcttctgctttaatttttgttttcttactttattgtatgattcctttgtgcgagtctcctcaaaccctttgtggataaagcgggactaaaacaagcaagcatctagatgttcgctaaatacatactgtgtaccaggcactgcagggaactgaggactgagaggcaaagatgtgactcaccgcaacgagctcaaagtctgatggaaaagacataaaacagaagaaggtagctaggtgcaatggctcatgcctataatcccattactttgggggccaaggtgggaggatcccttgagtccaggagttcaaaaccagcctgggcaacacagggagacccctttctctatagaaaataaaaaaaataattgggtgtggcaacgtgcacttgtagtcccaactactcaggaggctgaggtgggaggatctcttgagcccaggagtttgaggctgcaatgagctacgatcatacccctgtaccccagcctgggtgacagagtgagaccctgtctcttaaaaaaaaaagccaaaaaacaaaaatcagaagaagtgcattattaaggtgaaattgaggtgctatgagagtacctagaattgacatcttacctgtattgcttgagcaacaaggaggaaccacaggacaatcttctagttaggaagagtgctgaaggccgagtagaagttggccaggactgggaaagggttagggaggcagagtgggagtgggctggatttgcaagctgagagcaaagaggcagaaacctgctcagagaccttgcgacaggggagaagataaaaagtccaggaaagggcaggtgagtgcagagtgggttcatagggtactatcaggctctatgttcagatttgttttttaagattagaagaagactcagggagagacacattcttgtctgcgatttagaaagagcgctgtataggcttcctaaggtggattgcaaagccagagagacttctgagaagcttttactggaatccatctgtgagatgatggtggttcctactaagatcgtgactgtgagaatgaaggggaaaaggaatcaaagagctattaaagtggtggaatttacgggatttagaaactgagtgggtgtgggtgaggcaggagtcttggatgaaatctgagttcattctgttgtttgtttgtttgtttctgagagcatgaacttggctcatagcctcgagtccaggctcaagtgatccttctgcctcagcctcctgtgtaggtgggaccacaggtgcatgtcaccatggctgactaattttgggatttgtttttctagagatgaggtctcactttgttgcccaagctgattgcgaactcctgggctcaagcagtcctcctgcctcagcctcccaaagtggtgctggggttatagcatgagccaccgtgcctggctgttttttttgtttgtttttttgtttttttttttaatttaaataagagcatttgtagatgttgcatcagagagaatgtgaaaaatatagaaatgtcatgtaaattaccgagtgctgggcttggcacatggtaattttacaataaggttgctatctattgttattgtcggctaaactagtctaattaatcttagcagaactgtgtatgaagtgctgttcatagtcaatatttggcattctctaagcagacttaggttggaattgcagcctttcagtccaggggcaagtttcttaacttttcttggccttactttcctcatagaatatcaagccagcaatgcattcgtgaaaatttgagataagagatgtaaagtgctttaagcaacacatagtagaagcttagtcaatgaacaaaaggcattattgttggttcccagcctccaagtgaggccacaggactcttatctatctttgtatctcccatagaccttacctgcctcgaataacatcttacacttattaactgcttaatacatatttatcaaatccatagtaactttttatttcatcctgttgaggcttttcgccctccattaaaagggtttcttgggagggagcggtggctcacgcctgtaatcccagcactttgggagatcgaggcaggcagatcacttgaggtcaggagttcaagaccagcctggccaacagagtgaaaccccatgtctactaaaaatacaaaacttagctgggtgtggtggcgggtgcccgtaatcccagctacttgggaggctgaggcaggagaatcacttgaatctggaaggtggaggttgcagtgagccaagattgtgccactccactccagcctgggtgacagagcaaggctccatctcaaaaaaaacaaaaaaaattcttcttatggttctgttctttaaaaaggtttctttctatggttctatttttatggtttatctttacttacaatttattgttcttgattcttttttttttaacttaaaaatgatgactgacacttcctaatttatgattaagaacttcccttcacaacacccccgcctccatttccgctgctaacccctcatatgagtgtgttcagatgagatcttgttcctggtctggcttaactgtgatacgaattattcaggccatggagctttttctagaattgtcactgggcttcaagacttccaccaaagtcaaaatcagtcggcgatggactacctcaaacagcttgaattgaattaaaatgaaccatagcactagaaaggcatgtaatttgatctgaaatattgcgcaggaacaatatcaagtctcaggcaagacaggcaattagcaactttgtgataataaagaatttgaaatagctcttgagttcataactcgttgcctgcctgtgtgttttggttgggggattcaaaatgtatatgttactattttacctgtgacattacaataagcatctgatggatttacactagtaacattgatcttttcccattttactcccttttactgattataaatgttataaacattaaaaactggaaaatacattaaattgtaatgaaggaaaaaaaatggtcgatcttcactcctcctgctcaaagatgagcttcacattttagtgtctctggctgttaagtcctatttatgtgtagatacatacactccgtataaatttttatcgtatttaaaatacttaaactagttttgtgttttgctttttcaggtaataagagcatttttctttattttcctcatttttttcttcacatcaaagagcatacagaatataagagcatttttctatgtcattaaatattctttgcaaatataattgaatggttgcataatgttccatcctgtttatatgtaaacattcctatgttataagacattttgttgccatctatataatgccataatggactctttgagtataaatcttttttacacatgtctaaatattctcttaagacagattctcaccagcagagcaacatttttaagacttgggatacttactgctaaattacttttcagacaagttgggcaaatttgcacttttgccagcgtgtggctaggaggttgtcatacctccacgctcactacaatcttcctattttcacaaatgagtcaatgaacgggctggatttgttgtaactgtctctcaagtgatgctttctattggattcccacaatatgactactgctaacttttaaggactaagttaccattttaaatggaaagatttcatcttgaatgtgaagctggatatctataaataaaaaattgcagttggttatttggtgtttctcgtattgctagtataagttccttaaatattatatagatattatttttatgatttagcatttatcccatgataaaactggaatcatgtatgcctcatacggattgactgtgtccccacccacatctcaccttgaattgtaataatccccatgtgtcaagggtggggccaggtggagataattgaatcacgggggcggtttcccccatactgttctcctggtaatgaataaatctcatgagatccgctggttttataaatgggagttcccctgtgcaagctctcttgcctgctgccatgtaagtcatggctttgttcctcatttgccgtccgccatgattgagagtcctccccagccatatggaattgtgagtccattaaacccctttcctttataaattacccagtctcagttatatctttattagcagcctgagaacagactaatacagtccttctcccccaccatgttttggggtttatctgaggataataattcctaataaatactttacttctttggcatttggacctctggacagctttttgaaatttgaacagttttctattatgttgtgccatctggaatttatacaaataaaatacactgtgcttcaggtttagtttgtagaagtgagaattttatgtatgtagcttctattctcttcatttctaagaagtcaacatttaaaccagacttcatgttgtctggacataaaagataaagtatttgtagagtaatttaatcgagtaggtcttagggcatagctctccatattacatacccaatttccttgcaaacttcaaccaaaaaaaaaaaaaggaaaaaactttattggaattttagagttagagcacattgtactttattcactttggaataaaccgtttggctctttcattctttaattaaggtataaactagttgtgatactttccttctctttattcggctcaaatgagtctcactgatgcaaaataaacactagatactatgtaactattgggaataaaggaggccttctgcccaccccacctctaacctgacgaagcccctgatgaagtcaaaggaagataaatccacgcagtgctggaatatactgtggaacctcatgatatattcattatgagtcctcctctccagcacaccccagttagtaagttccttagataaaccaaatctatgcacaaatgaactcactattaaaaattagttctcctagcgcttgaacccgggaggcggaggttgcagtgagccgaaatcgcaccactgcactccagcctgggtgatagagtgagactccatccgaaaaaaaaaaaaaaaaaaaaaaaaaaaacagttagttctcctgtaagcattcctgtgtccttaatatcactttctgttcctgccttgcatctccgcatctttttcttcgtctctggccgaatgctgtaaacgctcataaatatcaagtaataagatgcaaagagattgcaaactaaaactgaaaaccttaaagatgcagtttgtcatgaagctgctgaaagagatattggagaaatgccaaaatacctccaaagccaaagtctggctgtgtgactgtggagcatttaaaagcttctcatgacttagtttcctcacttgaaaactggaataatatctgcctgattaaccacatgaaatttgaaataaaaagcaagtaaaatgatacctaaaagcactacttaaataataaagtacctggccgggcaccgtggctcaggcctgtaatcccagcactttgggaggcctaggtgggcagatcacgaggtcaggagttcgagaccagcctggccaacacagtgaaacgtcatctctactaaaaatacaaaaaattagccagttgtggtggcatgtgcctgtaatcccagctacttgagaggctgaggcaggaaagttgtttgaacctgggagttagacccttaacagcccaagaggagaaattggtaggaatggtatcaagacaagtgcttcagaatagaagttgcataacaaccagttaatagaggaccttggttaaaaaagaaaatgatagtcttcaaaaatatttttgcaaaacttttttcatcactggggtacaaaagtcaagaaaagaatgtcatctcacataattttgtcagaaaaatgatcttccctccccaccaaatctaacactcaaataattctttgttctaaccattagggcatatttataatgatgacttattttgattttttttagtgtaaaatcttaagccctttaaaaatgacatattattcggcgttagtctctatattttgaatacctactgctgtgtaacaaaccacctacccatttggggtgctctaacagaataatatagcctgggtggcttaccaaaaaaaaagaaatttggtcaggcttcgtgggtgacaactgtaatcccagcagtttgagaggccgaggcaggtggatcatgaggtcaggagttcgagaccagcctggccagcatggtgaaactccgtctccgctaaaaatacaaaaaattagctgggcatggtggcgtgcacctgtaatcccagctactcaggaggctgaggcaggagaatcgcttgaacccaggaagcagaggttgcagtgagccgagatcgcaccactgcactccagcctgggtgacaaagtgagactccatctcaaaaaacaaaacaaaacaaatttatttctcatcattctgaaggctgagaagtctaagattgaagccctggcagatttggtgtctgggagggcctatgtcctggtttgcagatggtcatcttgctgtgtgttcacatggtggaaggaaggaggaagctctttggggtcttttttataaagggactaattccatttatgaagcctttaccttcatcagttgatcacctctcaaaggccccacctgctaatactgttactggggattaggatttcaacataggaattttggagggacacacacatttatagcaccatccctaagccagaggttacaaacaaccaccattttattgtccctcatcattctgtgggttggtcagattctgccagttgcatttagctgggcctgacatcatttgggatcttggctggactagaatgtccagggtaactcacttatctgctaccttcacagggacggcctcaaggctgaaatgactgggggccctgggatggctggagactctctttctctccatattgtctcagggcctcttctccatgtaggaaggtagccagattcttacattgcaactcggggttttgcaaggcacaaaagcagaagctgcttccaatgatatgggtcccaaactggctttgcatcactttattcacattctgttggttaaagtgattcaccgaccagctctggtacagggtagaagggggctacacaaggatttgagtattggaatgcactgaaggtcatcatggagactaacccactgtaggaagcacattcatcgaaaacgtcatttccagtactgcttatccatggataatgaggacctcctgtagctgtagtcactttggtgcatcgtttccaaaaacctaatgagttgtgatgtcaattgcagctgtcaatctacttttaatcacaggcctcaaatgaagaaattcatttagaggataagcaaattacagcttcagttttgttcataaacttaagccccttattgctaatttttttgaaagaacaagtttatgctgatttgtccaaggatactcagcaaatatttggaaaatagttcaaagtttaatgtataatcataatcctattgcttcttggccttttggcaaagatcaagtgtagtgtctgttcttatcagtttaataatcataatcctgaacatttatatattattattattattttgagatggagcctcgctctgttgcccaggctggagtgcaatggtacggccttggctcactacaacctctgcctcccgggttcaaacgattctcctgcctcagcctcctgactagctgggactacagacgcgtgccaccacacctggctaatttttgtatttttagtagacagggtttcactgtgatggccaggctggtctcgaactcctgacctcgtgatctgcccacctcggcctcccaaagtgctgggattacaggcctgagccaccatgcccgacctcatactttcttatttaagtggtgcttttaggtatcgttttacttgctttttatttcaaatcttatgtggttaatcaggcagatattccagttttcaagtgaggaaactaagtcatgagaagcttttaaatgctccacagtcacacagccagaaaacactggagccaagactccaagttttgggttcttcttttttatttttttaagacagggttttactttgttggccaggttggagtgcagtggtgtgatcaaggctcactgcagcctcagcctcaacctcgcaggttcaagtgatcctcccacctcagcctccagagtagcttggaccacaggagtgccccaccatgcccagctaatttttgtagagacaaggtgttgctatgtttcccaggctggtctcaaacttctagactcaagcaattgtcccacctcagcctctcaaagtcctggaattacaggcttgagctgctgtgcctggcattggggttttattcaaaccacccctccatcctagaattcttttttttttttttttttttttgagacagggtctcactctgtcacccagattggagtgtagtggtgtgatttgggctcactgcagcctctggcttccaggctcaagcaatactcccacctcagcctctcaagtagctgggactataggcacacatcaccatgcctggctaatttttgtgtttttagtagagatgggctggccatattgcacaggctggtatcaaacccttgagctcaagcagtctgcctgccttggcctcccagagtgctgggattacaggcatgtgccaccatgctgggcctagagttttcttttaaactttgaaggatgtgaactggaaattcattctgtctttcgatagatagatagatagatagatagatagatagatagatagatggatgtctgtctgtctgcacatgcatgtaaaatacacattttattttattttttttttagagatggggtttcaccatgttggccaggctagtattgaactcctgacctcaaatgattcacccacctcggccttccaaagtgctgggactacaggcgtgagctactgtgcccagcctaaaatatacatttaaaaatccattgtgcaagtatagctttcattgtttgttagtgatctataggtggtcagtaatatccatttcaagctaaaggaatcactgatgcatggatgccatctggaagttatctggtcaaccccttcatttcacagatgggaaaaacaggtgtggagtggttaaccaagttgcccaaacccacacagctatttagtgaagagccatggattcttacctctgaacccatcattttaccaactagaccacaccacctcaagaatagccttccagatgaaactatgagaggaatatagatattttacatgtttaaaacatttgtctgtagtttgccaggacttaaaagtaatacaaattttaagtgctttactgatcaaatacagctaaagaccagttgtgcagctggctcaaagtatcactgtttctgggaggcaacctatgactagggtttcatgggacagaaaatcccctgtagaaaaagcagaggacagacttcaacgtggagagttcttcatgaagaaaagcaggtgataaccattgtattcaaataacttggtgtatgtttcactctcaggaatatatgttgctagtaaaatcaagaattttacatcaaacattctcaaggcattgagtgtggaaccttctgagaatgaaaagggcagagatgagatctcgtttttcaaattaagtaaaatttaaaggtcagttattccgacagtgtcttgacaataatattgcacttgtcccaactctaggatgttactatagtgagtaatgttgcacttcgatctgggttgaaatactgttttcttcctccctctcccttttcctccctcgtttccgttttttttttttttggagttggagtgttgctcttgttgcccaggctggagtgcaatggcacgattttggctcactgcaacctccgcctcccgggttcaagcgattatcctgcctcaggcttctgagtagctggtattacaggtgcctgccaccacagctgactaatttttgtatttttagtggagacggggttttactatgttggccaggctagtctcgaacacctgacctcaggtgatttgcctgcctcagcctcccaaagtgctgggattacaggcttgagccaccgtgcccagccccatttaaaaaaaaaaaaaatgttttcagttggccactaaacagagaaatttgggaagccactggtaccagttacaagtttgtagaccacagtctacacaaaggccatctgctcaaccctggtgacttgaggttgactggcccaagttaaactgaagagttaatgaagccacaagccgattttttttattcaaggagtctgatgtgttttctgggttttcaaatggcttcaatggatttacttaccagtttaagatgaacacctcacatcaaggaatgcaggatggcaaaagcctgagctgacccagaggaggagacctttcccaggctgacctgtctgcaaaggccttttcccagcactgtcacttcctgggttcgtcactgccatagtcctcgtaattgtttagaatttgcacatttcctcaggttttcttcttacattcttagtcaatttgaaaaaaaaaaaggaaagcttgggaatgaaacccaacattttcctccaacgacaagctgctcatttgtgtctctgagcagttttgctttatttatgtcacagtttaaagaacttgctgggtcccattattgctctgtatccttaagtggtgggatttctttcttttcattcaggcatggttactgattcttttgacagtgtttaatattaaaagttataaatgcacatgcagtagggccattacaccataaatagctgagagagtagaagcatgatgactgtgtccaaggagggactcctggtgtcaccgttggtcagtgtccaggcccaggctgcttcaaagaagatatattgcaggtctgaacctgtatgcacaatggaagtattcaaacaagctttaaaaaaaaaaaggatgcatttaaaaaatatttttgtgacaaatcaaatgtcagtgttaagtgcagtgtttctagagtgcagccgcgctctgtgatgtaacacttcaaaaaatagaagtgctgatctatttgggccagacagcacttttttcttagaagtccatttatttggaggatacttttatagtaccagcaagtccagttagaaagttccatctgctctgcctcttactgcttctggtttcttgccatctacactggtgtcatctcagacaagacactacctgattttttctggataatagcgacatcctatggggctccctgcaggtacaacgggccccctcccttcatccattcgtacacggctgccaggctcttcacttcatattgtctgcaaaaaaccctgagatgccttcccgtttttttgtcagttagggtttcttcagagccaccaaactattaggttggtgcaaaaataattctggtttttaccatcacttcattttactcatagtattaggttggtgcaaatgtaatcacggtcatggcaaagaccgtgattacatttgcaccaacctaatactatgagtagaatgaaacaagggatgtatgataagaattagacctttcatggttgggggaggagttgggaaagtcaactgaaaactgatccaccaaaactcagttttgtaatttgactatagcattttttttttttttgagatagagtctcgctctgttgtccaggctagagtgcagtggcgcaatcttgactcactgcaccctccacctcccaggttcaagcaattctcctgcctcagcctcccgagtagcctcccgagtgatgacagacatgtgccaccaggcccagctaatttttgtattttttatagagacagggtttcatcatgctggccaggctggtctcgaactcctggccttaagtgatctgcctgcctcaacctcccaaagtgttgggattacaggtgtgagccactgtgcctgacctaatttgaccattgcatttaaaattgttagacgagtaccttcaaccaggtcaagggctgggtataacagagtccggggtgggagaagagcctatgtttatgaaataaggacagtgtatttcagttaagagaagctctcctcattcacaggtaaaatagagtcctggaaagtcctaccctctgcaattcaaaatgccactgaaaaatatattcaatctacatagacggaatcatcttaagtataatggccagggtgaaatagctgtgaggaactctcagtgaaactaaactaaaattgcccccaaactaccgtcctgcacaccaaatcttcaacaattaggtgaattgtctaagtattttgtagaagttgatttatgcatatggttttagaatacacatattttaaacatgcgtattttaaataagacaaatcctatttatcgtttctggctttcagctgtgctggaggactgtcctctgattctcttctcttatcccttttattttttgtctttaaaccctctgtgctttttcagttctagatgcatcagaattagaaatgttgttccccttggctaggctgtaatagtaattgcagtctatcctcagtcctcagattgttcaaatttcacatttgaagtgcaacagaacttttgacccatgtgtttgtagctctggctacccactttctcactagcttctgtgccggtgtatgtgagtgatgcttaagcctctcaggcatactctggaaaatgccagaagcctgctttgtttgttggtaaccagtcctgtttgcaccattgggtatagctgctctcatcgttccttaccttcttccttgttctgtgaactctcttctctatgggggaaggccatgaataacctcttgcctgtatgttgagaagagagcaacctccaagctgaatgcagagggaaaagggctccctccctgcacaggaagcgtgtattctagatacacactccaccccactcaaagacattccagcttagagcaatgttggctacagtttgttctttaatcgtttcttatcctttgagtggaggttacattgtgtgtgatcataggaagtgccagccagttctgcctgagagcattagaggaatctcccagaagggatgacatttcttaagtgatttttttttcagaaagactcacagcttgtgagcttgaaacgtaccaacattgctctttcaaatatgcatcaattgaatatgcagtttggtacttttctagcaaaagtggtagcattttatcaatttagctcagtttctgcccctctgtgactctctggaacacgtctgtaagatggtcagccagaaggaaagaaacggcaaattaacccatatggaagcttgcatctattattaatggtactgtgatttcatcaacggaaggcatgaactacacactccttgctctcagtagcaaggaataagacactgaacagtaaattcctatccatcatcattggaaaatattgccctgtatagtgcctggcagctgtgtggtgattctctgaagagacactgcctgcttttctcttagccaccatttgaattgcctagctgatagaagtttggcttccagaaaggcactatcaaacaaaatcaatggccatgttagccacaagtcctaagttctgtccaaaagtctaaatccatcatttatgccttataagccaatatatcgcaaacacctgagttccagataattgcagtggcttgctataaattggcctacaattctgtcaccctctgacctctgatgttgttttcaccttgtcttacgtgtgtactatacccttcacaaattttcccctttgttcccccaaatcatctcccctctcatcagccactttctctgaaaagaaataatctaggatatacgtgaatagttcctagaattcgcaaaacaaagctactatttgttgaatatggtctgcgtgccaaatgcatctacaggtatttttacctgtggtatctaatttatttttacgacagtctatgaaatgtgcttcgttattttaatttacagatgacaaaaatggaagtcaaagaaggctttcaagggatatgggggaaatgatgacttcagaacactatttgaaggaacagtttgagagcttggaaacacgtgatgctccttttcttcagttcccagagtctgggactcgagtcctgattttgctcttggccatgcaggagtttgtcctcactattttcagtagctcttgttcctttataaacccttcatttaggaaatgtacttaaaatttttttttttgagacataatctcgctctgtttcccaggctggagtgcagtggcgcgatctcggctcactgcaacctccgcctcctgggttcaagcaattcttctgcctcagcctcccaagtagctaggattacaggcacgctccaccacacttggcaaatttttgtatttttagtagagacgggttttcaccatgttggccaggctggtctcaaactcctggccttatgtgatcttcccacctcagcctcccaaaagtgctgggattataggcatgagccactgcacctggccatttaatttttaatttaaacaaattttttaaaaggaaatgtacttttaaaggaaagtactggaattggagttcttggtatcactgatagacattggtgaacacttaatttgtgctacaaatgaaagcaaatcgaggatagagagggctttgctctttttagagatagccgatttcagtttcaataaatcacaatcgctttcattatggctaagaatctttgcttttcagtatttttgaagtgtgtttctgtgtgccctagacaatcaagcattcaacctgaagaggttcgtttcttgttgttatttcattattcaaccgagtgtgctcctcagttgttttggggaggggcatattctatgaagtcgtgtgagtcagagatcttgtcttttgtttctttatggctctaatttctgacacatcatggaccttcaacagaaatttgtttgcttgggtagtggaggaacagtagaaagatcagttgtggccacgagtgatggttcacacctgtaatccaggcactttgggaggccgaggcaggcagatcacctgaggtcaggagttcaagaccagcctggccaacatagggaaaccccatctcctaaaaatgcaaaaattagccaggcttggtgacacatgcgtgtagtcccagctactcaggaggctggggcaggaaaatcccttgaacccaggaggcggaggcggaagttgcagtgagctgagatcgtaccactgcactctaacctgggcaacagagcaagactctccctcaaaaagaaaaaaaaggaggaaagatcagttgcttcaggatatttaatttagctaaaaagtgacaaatgaaacagtactgatacatggttagtttggatgtaagttattgattctgaatacttttttttaattacaattactgttgatttatccaagaatgcatagctatgattaagagatacaattaagttaaagaaaagtgaactgaatatcaaagaatatttccagtagataaggttaggactaactcaggcagaggactcccagtagaaggggtgggaggcaattaacaccacgcacgtcacttagatctgcagtggggatagattctgaagtcggcaggattgtgagatcgtatctctagttttattgatttgccttcttacatgggtatatgttcacagcctcccaccccttacggacaagagtttatgtgtgtgttaaatattctgattgtagttgtttgtttgtttgtttgtttttagaaaaaagaaatcctctttttagaacatctcttggtggtaccatcagaaatgtcttccttaagtggaaaagtccaaaccgttttgggccttgtagagccaagcaaactgggccgtaccctgacccatgaacacctggccatgacctttgactgctgttactgtccacctcccccgtgccaggaagctatttccaaagaacctatcgtgatgaaaaatttatattggattcagaaaaacgcctattcccataaagaaaaccttcaattaaatcaggagacagaagccataaaggaagaactgttgtattttaaagctaatggtggaggggctttggtggaaaacacaaccactgggattagccgagacacacagacgttgaagaggcttgcagaagagactggcgtccatatcatatctggagccgggttttatgtggatgcaactcactcctcagagaccagggccatgtcagtggagcaggtaaaaagcctaagttctttgacagtatttgttcataaattcagaacagccagaaccttggaaatgccctgggttcagaggtagctgggcatgctacggaaatttgctagctagcaaagacatctgccagttggggccccagttagtaacactgtatttcataaagaaagtgccaattttgcaagcaagccttgtggtaaagaaaaaagaaaataataataataagtgtcaaggaaagagatcttagtgcactggtcattgcaaaatccaacgtgataatagttagatttgtgtgtatcgtatctgtcctcagtattggcaccacagtctatttgtaaacctcacttttccatcttaagttatgctacctcgattttttttcaccctggattttataataaccagcaatgaagattcactgtagggtgaaacttggcagtcaaagacttggcacatttgtgaatatgtttcagtttcctttcacaaaacaggagaggtggaagaaaattcattcccctgtgttttgtcataatatggtcttaagaatgggcagaaggaagtaaattgtttagggacaaaaagaataaggtgcaaaaccttttttgcacgtgtatgtgttctctttctaaacacacatgtatctatttatacatgtttacacatatatgtatatattcgtatgtatcttccattgcctgcatgacaggcatagggtgtcagctcattctttgcaaaagatcacttactctctggagtattttgtatttcaaaattttttctgcattattttccaaccaggactttatttttttaatgtatttttgttgtttaaagactatgctgatgatgaggattatatattcttccaaccacttttagtggtaactatacatatgaacccaaaagtctaatagtagtatagtgtgctgtgaattttctatgctgtctatgataaaagactggaataaataggagagaattaaagcatttcttgatgccttgtgcggtgatgcaagcgtgtagtcctagctacatgggagcctgaaatgggaggttcacttgatctcaggagttccaagtccagcctgagtaacatggtgagacctctgcttctttaaaaaaaacaaagaagaaagaaaaagaatgacttgatacacgggacatagattcaattcattggcggtctttctatattctagatgctgctccccaggttaagttacagatttttttttgcttcatcctgaatgtactctcattaagtcactttgtccccctccagcttcctaaagctataaatttcttgttaaataatcatggtatgatattatcgaatcttggatttagtgcaacttgttgatttttgatttggccagcaaaatgcctttttccttggccaatattaattgataaatactgaatacatttttaaaagaatgaatgacaaaataaataaattcattcacatactgtggtggatctattttgataaatttcacaacctataaaatatattccttctcactcttccttagcttaccgatgtccttatgaatgaaattctccatggagctgatggaaccagtatcaagtgtggcattattggagaaattggttgctcctggcctttgactgagagtgaaagaaaggttctccaggccacagctcatgcccaggctcagcttggttgtcctgttattatccatcctggacggagctccagggcaccatttcagattatccgaatattgcaagaagcaggcgcagacatctccaaaacagtcatgtcacacctggataggtaagtaggctgtcttacaaatggatgcaaactgccatataattaatgcatgatcaaattaagaatctacagtaatcagtcaatgcaatactaatcacgcagagaaaaccactaactatatggaaggtagtatttataaagtttcacaactgacatgaataaaagtcaatgctgccatttttgtgtccctcctctgtgtcagatagtgtcctaggtatttcacataagatatttcgcataagtcatttcctttaatttactcaatcctttataactcataacaggtgtcactgtctacttcatttctttgtctcatgggatgctatcaaagtagctgccaattccacttgctcaatgtttaccagtagttggagtaataaagttatcacacatataaagggagggaatgtcaatggtttcacccagagaagaaaaccgcaaatataaatgttcacatttgtgtcacttgtggtttgaatcatctgaattttggaaaatgcaattataaaaaataatagtaataagtatagcatgtgttgggtagtatcatgcattagtttcctattgctactgtaacaagttatcacaaactgggtgcccctaaacaacagaaatttagtctctcaaagttctggaggccagaagtctgaaatgaaactttgtcagggccccgcttcctccaaaggctgcagggagaatctttccttgcttcttccatagcctcagatccagctgttccatggtttgtggctgcataactacagtttttgcctctgtcttcgcatagccttttcctcactgtctatgtcttctcctctgtttgttacaaccacagttgccattggatttatggcccgtccagataatccagaataatctcatctcagatcatttacttaattatatctgcagaccttttccccaaataatgtcactttcagaggttccaagagttagaatatggacctatcttgttggggttcaccatttaatccctacatattattttagatgcataggggacagtaaaatgaatgactaaatgaagaaatgccagctgctgttaattttatgaacaagtctaactgttgctaaggctactcattagccttcagttgaatttattatagaattaatacagcaccagtgagactaataatatattatagttacttctatcttgcctattggagtaaagccatattaacatattgataaatcctgattatcagaccagacagattgctatttcataaactaacagtcctgcaaaatgtattgataaaatgcctctccttatgaggctgcagtgaaccatgaccactacactccagcctaggcaacagagcaagaccctgtctcaagaaaaaaaaaattcttttacttaataaaaaatactgtgaaatcatgtgcaggaaatataaacaagttgtagttatagcagaacagagaagtcagtattaatggggaaactgaggcataataggataaaggtaattctcctggcaaccaggttggtatcaagatccatacttggctatcttgaggaatcttctggttgcactgataaagtagaggcatgcttctatatactggtcacagagacaatgcatcagactgtgaaaactagactctttggacccagtgagaactttgaattctaactctcattggtgtaacatcttggacagcttaatttgaatttaaaacaatgtattttataatgttgccttgtatgatatgggatatatgtagcacatttactgagtaaggatgatactttttaaacattgtgaagtacctcataccttcaaaaatgtattacactaatacttttaaattttataaaatgttttagattcttaaaagcgttgcattctgcagttattatacagtgtaattgttctatatgtctattagaacataatcatttatcatgttcaagtattctgcatttctactaatttaaatatatatatatatatggagagagagagagagagagagagagtctgtctctctgttgcccaggctggagtgcagtggcatgattttggctcactgcagcctcaccctcccaagttcaagtgatcctccaacctcagcctcccaagaagctgggactacaggcatgtgcctccacacctggctaatttttatattttttgtagagataggttcttgccctgttgccgaggctggtctcaaactcctgagctcaagcaagtcactcgtcttggcctctcaaagttctgggactataggcatatgccattgtacctggtcataaatttcttttaattgcgtgcttggcattccttgggattcctgaatgtaaggatgtacctttcattgtttctgaaaagcctcagccattatctctttaaatactgtttcactcacatgttatttatcatctgtatcacaaactccaatttgatatatgtagggctttcttacctatactctgtatttcttaacacctctttcatatttccatccacgtgcatcactgagctataatttcttcagtttgatcttcctatttactacttctctttccaacggaatcaatctgtcacttagccaatatatttggtttataatgttgagaactacatggtttttctgttacctattaagttctagttggttacttttcaaatctgcttggttaattttgatcatttatgttcctttcaacatggtttcgattcaacctttaaaaaaatattaaacatacaatgtataacttgtaattgataaatctaacttctactgcctttgttttactctgatatagtttactagttcttctggctgtcattgataggaggttatttccttatgttttagagtacaattttttgttgtaacatcagacatcttggaaattattatgagtattaggttggtttcctcttacccctggttttttttttttggttatttattttttatttctggtaggcagttgtggcactacttacgtgggacactttatactaaattttttaattgtggtaaaatgtgcataacataaaatttatcatcttttaaacattttgaaatgtacagttcagtaatgttgagtgtattcactccccatggcctgtgacaaacgccattctactttctgtctctatgaatttgactactctaggtacctcatgtagatggaatcacataaagctttttgtgactgtttaaactaaattttagacttgagagacttagacccacacaggtgctatgagttctgacccctcagcttagcaagtgcaggaatggggctatggattctcaagggagactttttctcaacttaccttcctttcactagaagacaagactgagaaagatacatacagataccccttgacttaagatgggttatgttccaataaacccattgtaagtcaaaaatattgtaagctgaaagtgcatttaatatacctaacccactgaacactacagcttaacgtagtctaccttaaacatgctcagaacccttacattagcctatacttccgcagaatcatctatcacaaagcctattttataataaggtgttgaacagctcatataatgtattgaatactgtaccgaaagtggaaaacggaatgtttctcttggtacttgaagtacggtttctagtgaatgtgtattgcattcacgccattgtaaagtccaaaaagcattaaggtgaactagccagggaccatctgtaatctccaaaaactgtatatggggcaagtttttacctacttcatcctcaagggtgttgccttccatataaagggagtagccctttatatgtctccagtctgatctcctactcagttcaagcccaagctctgtcttacttggttcattaataccttttaggcaaatgctagctctaggtctcaacttattcctcattttctcagctctcttgttgtctctgtcccgcgagcaagtaagtgttactttcccaccagctaaaccaagcatttcaaaatagggtgttttttttctctctcttcaatataatgtagtattttacatgcattctgctggaaaggttttctgtgaacatctagtctgccatactgcttgaaactggctcaagatgattcgtaaagaagaagctttctatctccatctatttacagttagacatgtatgtaagttagaaaattatgcttggcacaaatagaaaacaagctttcactggaaaatgtgaaataaacccttacttctaccacagtagtatttccctgctcataaaatcaaacaatatataaattgcaaatgttttctttattgcctagtgatatacatatatgtatacactacacctatatatacacatatgtatatatttatgtatatacacacacatatgtattttttttctgttaaacaataaagatacattaccagatttccatttggctgcagtttcaatatatctctctagaatgggtcagaacagaatggaaaggttgacctgacatcagacaaactcagaacattctagaaaattctgagaccatcgctagagcagccatccattctgtacctatctgatggattattcacggttccagtgcatgaaaaagacatacatgaaagtatgagcatttcagaagggaggcagctagggaacatggctttagaaaaagcagtgcattcggaaaaacataccgaataaagtaacagaaaaaaataatcagggaggcagatgcaggcattgttagctctttgaagtggctgttcacagcaagacagtggccatgctgaagtttgactgggtcagcctctcacagactctctgaggtctgcagggctgtgcatacgatctgagccgtactgaaaggccaaggacttcagctttctgtaacggggacaaatcacaaagggcatgtatttcatgcaacgaaatgcacagaagcctcacgaaacagacctgcatccccaaaacaaggcctccaaaaaataaaaaccaagacaaaatggcaaatcatttcatttcccccatcatgccttttcagacattaaaaaccaaaaaaaaagatctgaggctaccttgtgattggaagataatcaggccgtcgctgtgcttcatagccccctccagaatgctgggactctccaatgggactgaccctcagtcttacctacccatgatcagtttatttttcccctttaaagtagtatttccatcatttcagtatacaaaaataaaatattacagtgtgcccccaatcacattgaagcaggtaaatatttttgaagatatacaatcttcattaggattcatgcatttgtatgggtgcacacacacacacacatacactcattgtgacaacaacaacaacaaattgctacatggctatccaaaaggggcatttgggaccctgagagggaagagttaatgaatggccatcaccttaggagacctcttaactacattgttgtcatgtgaccgttggtgacctgcttaaggtcatttactaggagataacagcttgacaagataaatctgcttctgtgtctaggccgtcccctaaccatctgctccctttaagaaacatgggcctgttggttgctgtgaatttaaccctagggaacattgcagggggctgcccttgatagttacagccacccaaagtcaacatttattggaaaagagcacctggcacttaagtgttcctgtttggtcttaatctatgaaggctttctgcctttcaatcacttactataattttactacctgttaaaactctacccacgtgtccaggtgacgtgtaatgatagcactgccttggcctccggtctaatacaggctagatgcgattaaaaaaaacaacaccccacatatatcctttttgccattcatcttcaaggagattttatccttaatggactattagagtagctgtaggtatttttatgacgacaaaattctttaccaatgaaagctgagtaaaacagcatggctggcaggtatttgggtagcaactatttactgattaatttttgagccccctggaggggaaacagacaggtgctgtgtgcctgaatcttttttctacttggttatctattcaacaagccaaagggctttgatagaaatccagggcctagagtttgattaagggcacaatgataattaagtgaaggaaaatagcgcatcactgtctttgaaaattcctagctgaggaaggtagaggaattgacctaagggtttctgaaagacaacaagagggaaacatttagggaactggccgacagcacattttattccctttgcctctgatcattcgtgccaaattggccaaactcttggaaagctataattttgatatgtttttcatgctcttaattagatgaaataagagagtgggatatcacatcattcattcattccacaaatacttgcatgtctaattaccatataccagacgttgggctgtagcctgaagaacaacccactctctgccttcaaagtcattatttaattataattatggtgatttttaaccttaaggttttctgtgaaaaaccacaaaaaataattatttggtttccttggaacttacacacatttaatccctctgaatattcgtgaattaacgggaagtcattcaaaaacaattccaagcaaatgtttgacaaactgaaactgagcaaaacatcgtgatatcgttaagtagtacaggggtgtttgagaataattggaatgctatgtgcatgtatttgtttgtaacatctagaatcctatgaatatgacactgagtttcttttattcttaaaaacaattttttttttaaatttttaagagtaaaagagacagggacttgctatgtttcccaagttaattttgaactccttcctcaagtgatcctcctgccttggcctcccaaaatgctggggttaccggcttgagccactgagccggccagaaaaattatttttaaccctaaagtgttatgcaaaatttccccacccctgccctagttattgtttactgtgtattttctctcaacatgcagaacgtatggaaggaagaaagggaaagggagagggagggaggcagaaaggatggaaggaaggggagggagggagaagagaaagaaagaaggaaaaaaggaaacagaaagaaatccaggcaaatatctgacaaagtaaaatgcaccaaaattctgtatattcataaatagtgccaaataaaatgcaataaagttatggtgataattaataattaattgtggagtattccagattatactattttgggcagacctgccttcctggtgaaagggaaacgctggccatgtgctctatccagtacattctacccaccaaagccttccacgagtaattttttttctaaagcaatttttcataactctgacaccattcccatgaaatgtgacattttaacaaataggattgccaggtctgtgagatttatcttcactctcctcaataccgtcattccctgaaccgtgtatcgccttacatgaaaaacgcaacctcttttgtgctatgtggtagctgaagagttcgtatggtaaaaagctcttcctgggatgtataaactgtgaaatgcattctaaaataaagttttaattacactttgtaattcggagccaacttctgggtttagtctaatttaaacaagggtttttctctcttgcagccatctgttccttttgcttaagcctacacttaagtcataatattgaaagggtgacgtcactccttccttatgatgtcattaaacatttctttagcgacccaagcagtcagagaactgaataagtgatggggggagatgcttgttaaaatatggataatagcatactgaattattttatttttcattcccagttattctccaatatcaaaaatattgttcaatgaaagtcatgcctccgtgcaaaaagaatcccataaaaaataaatctttgaaatacctacgtatttggtcataaactagtacattaatgcaaacgtaccactctcatttttggcttgggtctggatcaaactaaaattcttggcaaattattagtggaagtagcaaattacatatttttaatcataggcaatatttagaccacacattaaaaacttacatcatctctatttactttctatttttgacatttaaatttatttttaattaattgagatcagttaaatttcttcaattaagaatttctcagctctcatagttgcagtggagctgtcattagcagtgtaagaatatacatgaataatgttttaaaattatgttaatatcaaattagagtatagtaaattaggttacaatcactcaattatagtaatttgctttttttaaatattgcattataaacattttaaaattaattttaggttattaagtctataattctagctgagtttagtaattattttaagtagttgttgaaaaactttaaaaaaataagaattccacatagctgtacaaatattcattggttctaaattgataaactcaagggggaggagtacaaagattttttggaattacttttttttttttttttttttgagacagtgtcttgctctcttacccaggctggagtgcagtggcaccatctcagctcactgcaacctccacctcccaggttcaagcgattcttgtgcctcagcctcctaagtagctgagattacaagcgtgcactaccacgctcagccaattttgtatttttagtagagacgaggttttgccatgttggccaggctggtctcaaactatcgacctcaagtgatccacccacctcagcctcccaaagtgctgggagtataggcgtgagccaccatgcccaaccttcaattacttttttggtaaacaatttttaatgatcagtcactgaaattcaacaattttttcaataaatcagttgtatatataagcattctgttgttattttatttgtatgccaatttttaaaacatacttgatcaagtctgtaagttttatcagggaatgcaatttatgatgcataaattcagatgtcagggcctgagctagttccatgagccacatagagctgccctcacaggcccaccacttgcccaaggaattcacagagtcaaatggctgaggagttacaattaaatcaaagctcagcacaatggaaagggcactagattaggagttggaatacctgcattgtgggtcactttaaagaacacccatgctttcctttctttatttgtgcagtgacattaatacgtgacataattatttcaccagtctattgtgagtttcacagcctgctccttgttcttgttatttaatggtgccaacatctaatcagttgcccaagcaagacaggcttgtgattctcctcctgcgtggctgtccctgtggtgccaatgcctcatccttcactcttgctgctgtgctccgtaatctggctaataacagcgctatttacccagctgttagcctaaagacctccagatacaagctctcctgtccactcctctggtgttctctgaattcagcccctcatttatcatttgaattattataagtctccaaacacaaatccctcccttagttttggtcccagatctagcctccacaatccaccagatctttccaaaggcaaatctaattatatccctgatcctgacttaaaagcctccaatgggtcacctttgcctcaggcacaaaatccgaaggtcttggtcttctggttccctcgcctccctccaccttatctctcgttattcccagtatgcacacagtctctgagccaaagccacactgaccatgtctttgagtgccctgtattggttgtccttatatgcatctcacacatgctattctctctgctaggaatgttctatttccccttatctatttagcagaatctttcttcagaatgcaattcaccaggggttttctcctctatgaagcttttccagaaacagccaaccactgtttgatatctccttctctttgccaacctagttcctagcagcactcttaccatgacacttggtaaattctgtatagcaagtatttgtttccgtgtctcttttccacagtagatactgaaattcttccaagatgggactggtgttatttgtgtttgctttcccagctcatggctgattgcaagtaggtgatcaacaatttcttgttaaatggaatgatggatagatggatggatagatggatggatgattcccctctcttctccccttcctctgataaactacacccttatattcaggaacagcaagctccctttttgcctctcagcaggtggttctctggatttttttttttttttttttgagatgaaatctcacactgtcacccaggctggaatgcagttgcgcgatctcggctcactgcagcctttgcctcctgggttccagcagttctcctacctcagcctcccaagtagctaggattacaggtgcctgccaccatgcctggctaatttttgtatttttagtagagacgaggtctcaccatgttggccaggctggtctcaaactcctaacctcaggtaatccactcgacttggcctcccaaagtgctgggattacaggcatgagccatatgcccagcctctctggatcattcatcttgatccctaccaacatttgtctaaatggtgtcctttaagactcaactcaaatgaatcaaagtgaatcaagtgaaaaaaattaagtgcttcattcttcgttcgcaatactgtgtatttatttgtacttcaatgttttttagcacatttaactataattattagcttaaacatcttccttctgcagactttaatttccttgagacagcatcttaaatttcttattcgtgtctatattcctaacacagagaatagcacaagatagctgatagtagatgttcactgaattaatttatgaaggtgtgtttcaatgtgtgaaatgaaataatatacctgagagttatttgaaactgtaaagcccaagacaaatggtaggtgcttttgttatcttgatcctacccacggatcaaattctttcctctgctccttagttctttctagctagggagcccacagacccttgtctaaattatcacttcatgcagacttcctttctcccacacagagtgcattttgacattaaactaaacccctcagcatatggataagatctagaatataaaagggggttgaaaatagaatcacctgtcttgcattatagtaccagccttaagaaactgggtatatgataactgtattctgacaataaagagccgaatcactttggacaccatttttttttttagctgatgacaatttattttccctaaatttatgcctgtttcttatatacagaaaagttacttactagttgagcaaaagtataaaatatgcagcagaggaaatgatatcatatgaatgacatgaacaagtacttgataccaaaatctggtcttccttctgggaaatcccaggatgttttgtaaatgacattgcaatcatttcatccaccttgaagatgggacttttcttcagtgtgaaatgcggtagctcttctgtgcgtcacaatcacttcactgacttttcaggggaagaagtgaaaaataccgaccttaaaagctgggaaagattggagtaagaaagaatagaattattcatggatggccaggcgcagtgtctcacactgtaatcccagcactttgggaggccaaggcaggcagatcagctggcgcatcagctgaggtcaggagtttgagaccagcctggccaacatggcgaaaccctatctctactaaaaatacaaaattagctgggtgtggtggtgggcacttgtaatcccagctactcgggaggctgaggcaggagaatcgcttgaacccaggagatgaaagctgcagtgagccaagatcgcgccactgcactccagcctgtgtgacggagcgagactgtctcaaaaaactaaaataaaaaacaactctcaagaagtattcatggatatagaatgcagaatgaggaaaactggctgaggttagcacctccactcttctaagatgtgctatgagatcattggtgactgggagggacaggacctctgtttaatcctcatctgctggatggcacacagagttcattttcccatggtaatatactgacattaggggtcaaccctctccaagtgaaaaagaaagtcacttgcataaatgcaacttcagtagcgctttggcagtccctggaagccatccagctgaatgtcaatttcacatgggtaagtcaccttgttagacgttcacggcgcaaggtgcttgttcctagatgtcactacgatggtgagtgtgtctccgtagtgtgagtgccttggaggaggaacggagttgccctggtgcctgggtgttcttacccctggaggggcagcctggtttaagaacacggcctcaacacaaaagcagtttgggtttgtttgaagctcttcaggttgagacctgagtttatcttttctgagacttaaagtcctcatctgtaagatggggacagtcacaccttcctgatagagcttctgtaaggattaaatgagctggggctgtattaaatacctgatgactatcaggtgttgattttcttgtttcccgtcccaccccttattaatatctcataccacatactacttattttcaggactttcctttgaaaacctgtgtgatcactcacactattttcttcccctgaattttgcactcagtttgctttgtcaataagaagaatttaaaggaattcattcccttttttatttttaatttaattattttatttatttatttatttatattttggagacagggtctcgcttgctctgtcacctaggctggagtgcagtggcttgatcgtgactcactgcagcctcaacttcccgggctccaacaatcctcccacctcagtctcccgagtagctgggaccccgggtgtgcaccaccctcacctggctgattttttgtatttttgttagaaatggggttttgccatgttgcccaagctggtctggaattcatgagctcaagtgacccttccacctcagcctcgcaaagtgctgggattacaagcatgagccactgtctgcagctgaattcatttcttaattgccttcacgttaatgtttagttaccccaaggaggtcatatcaataaatgtcagttaaaaaatcagaaaaaaaactgcatatatatgtatgtatgtcttggttttttttatgacagcaaatttctcttcccctctttttctttctatttgtttgtttatgttatagaggcagggtctctctgtgtttcgtctcaaactcctgggctcaagcaaccctcccagaggcttggcctcccaaagtgctgggattacaggcatgagccactcactgcatctggccttgcccctttttttttaactgcattttcctaatgtctaaaatatcagcctaattgcttcccttctgaagcaatctcccctcacgtgtgatcatgaaatttttaagagcattttaacagaggaaccagcttccccaaagtcactccgctttatataagtttttgagcggataagaattcatagggattacttttttttttttttgagacaaggtctcactctgtcacccaggctggagtgcagcagtgcgacccaggctggagtgcagcagtgcgaccatagctcgctgcagcctcaaactcttgggctcaaatgatcttcccacctcagcctcctgagcaactgggaccacaggcacacaccaccacaccctgctaatttttaaagtttcattgtagacacagggtcttgctttgtttccaaggctagtctcaaactcctgagctcaagggatccttccaccttggcttcccaaagtgctgggattacaggagtgagccaatgtgcccggccaggggttacttttgaaacttacatgtgtggatgaatcttatgggacagtgttagtcttcctctagaaagacatctctgcttattgtgagattcttcagtgaacgtttataacgtaggtaacatttatatttcattgcatctggagaattgggtccctacagtccctattcatcttttattttttatttgtttatatttctttttttagagtcaggggctcactctgtcacccaagctggagtctagtggtgtgaccataggtcactgcagccttgaactcttgggctcaagcaatcctcctcactcagcctttcaagtagctgggaccacaggcgtgagccaccatgcctgccatctccccattcctcttttattttatttttttatttttgttttttgagacacagtctcactctgtcacccaagctggagtacagtggcacgatctcggctcactgcaacctctgccttccagggtcaagcgattcttctgcctcatcctcctgagtagctgggactgcagcacgtgccaccacacccagttaatttttgtatttttagtaaagccagggtttcaccatgttggccaggctggtcttgaactcctgacctcaaatgatccacctgcctcagcctcccaaagtgctgggattacaggtgtgagcccccatgctcagccaatatttgtaatattcatttcttagttgacttcacactagtgtttagttatccagagggggtcatatcactatatgtcagttaaaaaaatgaataactacacacacacacacacacacacacacacacacacacacacatgcacacacacacacacacaccccatagtaagaaagtaagcagttgtcatgattaccatagttcctttctctttgatcatgtcattcaaattgtctaaaataactgtaaagatttaatcctgcttactatatatagttaccctctgacttagcagttaaaaatctccacaagtgaatcctttcttacctttctgggattttcactttcttccccccatactaccctttgatggtaaattctccatttttcaagtgcagtgtgagggtaccacggggaggaaatttcaaattaaaaattaaagcacactctgtgcacattcagtcattgtaattctggaaaatgtcctttgagtaaaaaacaatatttagcaataggagaagccatacagtatggtggtttacagcgtaagttctaactttgagatgaatttaaattctagcacatcaccttgagtgactatctaatcaagtcccagtttctcagtcttcagaattgagagctgctgggatcatggagggtattaaatgagataatacatataatgcactttgcacaatgtcagacacatagtaagttctcataattgtcagcatgatgataatgatgctaagtgactttactttttattttcaattggagctaaggctaaagagttttctaaggctttacatttaccacggacttttcactaagtatatgcctcgatatagcactgaaaatttaggaaagttattctcaaggcattgggccaaaggacagaaaaagacattaggagcagaaataagagtatgatccaacctgtaactggtgactccatttccgtgctgactcctgccctcccccagtaccctgcccatattggataattaacacactgaatttactcaaaaggaaaaatactaaacttacctcttcccgcttacattactttaattgtgtatattttgtttttttcaagtatggttctttggggaaaacagaatatgttttctatagaaaaacacatattctttcagcctagtaattttggaagcaaaagatggtctccatggtaagaagatggaaaatgagtagtattaatagaagatagcacagaactaatgtacattttatagtagaaaggaaagattttttagcctccctgcctaaaacaacatcgtgaactctaagttatgctaatttggtgaataaatgaaaaggagccagccagggtatgatagctcagaatgaaagtcagtagtcaactcccaggaatctcacaggaaaggagaaacttcccgcacccgtggcacagggaggcttaattggttctcctgtggtttataagaaaagctttgatcaggtgcggtggctcacacctgtaatcccaggactttgggaggctgaaacaggtggatcacctgaggtcaggagttcaagaccagcctggccaacatggcaaaaccccgtctttactaaaaatacaacaattagccgggagcagtggcacacacctgtagtcccagctactcgggaggctgaagcaagagaatcacttgaacccgagaggtggaggttgcattgagccgagatcacgccactgcactccagcctgggcgacagagggagactctgtctcaaaaaaaaaaaaaaaaaaaaaatctctgaaaatacttctgacctcttagaagtagattcatggacacatgatagtgctttttttttttttttttttttttttttgtatttttagtagagatgggttttcaccatgttggccaggctggtctcaaactcctagcctcaaatgatccacccaccttgtcctctcaaagtgctaggattacagacgtgagccaccacacccagccacatattagtgctttttgttttttgagatggagtcttgctctgtcacccaggctggaatgcaatggcacgatctcagctcactgcaacctccacttcctggtttcaagtgattctcatgcctcagcctcccgagtagctgggattacaggtgcctgccaccacccccagctaatttttgttttgtttttgtttttgtcttttgagacagagtctcactctgttgcccaggctggagtgcaatagtgtgatctcagctcactgcaacctccgtctcccaggttcaagcaattctcttgcctcagcctcccaagtagctgggattacaggcacccaccactatgcccagctaatttttcgtatttttagtagagatggggtttcgccatgttggccaagctggtcttgaactcctgacctcaggtgatccacccacctcagcctcccaaagtgctgggattacaggtgtgagccaccacacccagccatttttgtatttttagtagagacgtggtttcactatgttggctagactggtctggaacacctgacctcaagtgattcacccacctcggcctcacaaactgctgggattgagccaccgcaccctgccacaaagtagtgctttaatcctcacatcgtggagttgccaaagtaatagaaatatcagcatggataaaaagccaataagacaatgactgtctaatgttcccaactcatctccacgccaatttccgatccgaaacgatcccttacatttctctaggtccttcattcctttcatgcaatgtctaatggggtatatttttccttcattcccttcatgcaatgtcttccttcccttcatgaaatgtctaatggggtatatttttccttcactttttttttcccatattgttttctgctaggatgtttttattccttcttagctctctgtgtgattggatctctacagtggtattttggggttaccttagtgcatctctttttacttgttataatgcaaatttcttgatataatctactcttgctctgtactctacgcttgtctgtagcctgtacttgtcttacatttctctcctttccctttcatttacataatcttacatcctaaaatagttacattctttatatgacatctattgaaatgagaagatatccataaaatttatcataaaataataaattttatttaaaaaataagcactccagagcataaatatctgtatgagtattgtgccttcaagaaaatgtgggaatgatattctttaaaggctttagaattaattttagaaccactttacaatcttcacaagaaaatcaccctgctaccacaaggcaaagcctcatgtgttacccagattagcattactcacctaattcaccagacctgaggccagatttcctttaatagttttcacagttcatagcagtctttagaggatgaaaatttaccccattaaggattctcaaaatagtgtgggggcatcttctgaacacagttctgagggagaattccaaacttgctctggaataatggaagcatcattaaactaagtctgtagtacccaagtactttagaggggaaaactcctttttagatgagtaagttctgttatttctagtaacaaattgaacttactgttttatactcacatcattaagagccatttcagaagtgtctgttactcgacttcaactatgttcttgttcttgtacattgtgtgcttaaaacttctagtatgtacatgtggaaaatgggctcttcataataacagttcatctgtcgcattgtttctaggactattcttgataagaaagagctcttggagtttgctcaacttggctgctacttggaatatgatctctttggtactgaactacttcattaccaactcggcccagatattgacatgcctgatgataacaaaagaattagaaggtaaatatggtaaagcctctcatagcattccctttccctagccctttttgattgtcatatctagggaagtattagcaaagattcagaaaacagtaagcaggccgaaccacagacttgcagagaaaaatatatctatgctgtttcagggagaaaaatctctctatattattttaaggagaaaatgagtcatcctaagtaggctaaagcttagcagagccttagaagttcagtgcagatgggcagctgacaggaaacacagataatacccaacccctgccatgaaaatcagagaacaaaagacattttcctctatttacccctaatgaaataagctgttcctctctcaggttgaccacactaaagccataacttcctacaagtaatatttgaaatgctttatcaaaagttttcattaaaaaggtgatttcaagttaaatgctaaaagtataaggtctaaagactaaatattatgtaaaatgaatgcaaccttccaaaactgtataatgtgtgatgctggcagataattgtaggagtcattctttgtaatcaagtagaaaattttaggcgtcaatgatagctacctagtttggtcttggtcacatggtgataagaagattgaatgaaccaagttagaatacctaggaggagaaataaattggagattgacaaggaaggctttcgtttgggaatatctaagtgttgctacccagtgaagccctaagatatggtttgtatgtgatagttgaaccgtgggaatgaatgacatcactcagagaagaagatgaggacagagacctggggacagagacatttaaggaatggagtaggaaccgtttctcaaggaaaggtcgaggagaagttttcaaagtgataacatgagagatatatattcttatggaagtcagtagagaggaagtctcagggcagaagggcttgaatgccggtaataagtgacaaatatcaagggaaataaagactgaaaagcatccattggatttcacaattaggaggctcacattttataaacagagtgcaatctcagtggaaaaggcttgagaaatgggtgggccgtgaggaagaggagagaggatgttgaggtgactctttcaagaagcgtggcagtggagggaagcaaggagatgggtctggagttacaagtcaataaaggatcaagggaagcttctagtaagagttgagcaatgtttatgtgacttaagagcaaaagcagagacagagccagagagaatgagtccagggaagtggtgcccattccacagggttactatagaattgacatgaaataatgttttccaagtttttgtctgagtgtctggtgcagaatatggaagtgttcaatagatgttgactttaaaaactctggatagataagaaatatagagcaaggttcctaaggcaacaaatagatggaatctggggaacaaatagaaagtcggttgaaaggatgctttctccatggaaatgagagggcatgacacagcgatggggtgaatgcaaacagaagtcttagtgagggaaacaggagactgaggacacatggccacatgtcctctagtgtctctgtgaggtggacatggttatctcctgagaaaaaaagagtggatttagggcagcactgtgtagagcaggagaaaggctaggaatggctgtcaggtcaatgagagagatcttgacatggatgtgttatgtgcgagacctagttgagtctagaaatcatgattgcatgcctgtgtattggcaccaatgcacacgatttggtgattattttccaaagcaaaactgttttgcgttttggtagtggaaccagagaagttgtgtgcgtacaagcagaaaatgggaacagttcaagagattgagggttgggattctatctgaaagagatggataacaatggaggagttgagatgagggtcatgggatccaagttggagggaagaaagcatagagaggaatggtcagatagacaggaaaagcatagcagggcaaataagtggactgcaggctttaatgaagtgggtggagcatatatatatatatatatatgttcaaatatatatactgtatgtgtatgtgtatatatatatgtgtgtgtgtatatatatacacagtagaagaagtgagtggaaaaagtagaaaaatgtaacatgatcggagtgggaaactgaagatggagatttcagagggggagcagtagttccctatgataacaagaactagaatataattatgagaacagaaaagtggttgccgtggaagtagcaaagctggaattgagaagtgatgtccaggaaccatgagattcaagtattgctagttgaataaggcacactgggttgaggggaagatcttgagccagtggtcatagttgggacatcctgaggatctttccctgggaagtcacatttacgtctgtatgccttctgctgtctccaagtactggcattctgccttgatcacctcattaatagtactatgcttcaagtttagtatcattagggaaagctagttaatcagtgttgcattagttaagtaagatggcaactctcaactctacatgagcaaatgacttcacctgtcttgaccaatgaagttctgtcttttaatactcagatcagttatttgacaagtagatgtattgtttctttgtttatttttgttttattattttaatttacttgcccaggaacccgattcaatacaggtgaacctgttcccctaaagccctagtagttagtttatactcagaggagactattccttgcctaagggcatctggaatttaaaatagtgcagtgcattcagtcattctcatctttcacaatctcaaaaacatgatttcctgatcaatgccctcaacatatgttttatttcttttttctttttttctttttcttttttttttttttttgagatggagacttgctctgtcgcccaggcaggagcgcagtggcgcaatctcacctcactgcaagctctgcctcccaggttcacgccattctcctacctcagcctcccgagtagctgggactacaggcacccgccaccacgcccggctaattttttgtatttttagtagagacggggtttcaccgtgttagccaggatggtcttgatctcctgacctcgtgatccgcccgcctcggcctcctaaagtgctgggattacatgtgtgagccaccgcgcccggcctcaacacatgttttctaaatcatcttggaaatgggaactttgcactctggatcggcttccttttccgaagcccctttgtggtagtgaggtgcatcttttgcacacctgtgtctcgcatgaggctcccagaccttctagaacaagagaaagaagatccgtaaaggggcatctgtgaaggagatagaagggtcagatgaccgatggctcccccagcattccttcttagctccttttagccatttgtttaccctttactgtgctaaatatagctattctggatgtatggaaataataaaaattattataatataaatctgtgtatatatatataaaatacctgtgtgctattccatacgtacgtgtatgtgtgtgtgcttaatcttccttaaattaaaccatgcattctcgcttgacccaaggacagcccatgttaagcactgaatgcccttttgggttgcgtgtgctccagtacccactgtcttgcacacttgattttcatcatgcatgaaaggaccacagggtccttttctgagccatcgtagtcttaaaccttgaagtgcatgaacacagaagcacgcttctgcctacctctggtgttcagcaccagaaattctgtgtctaacacctgttttcaatcttctgctccatttctcaaatcttattatatctctgccttttcacactttgtagtctctctctaatatttgtttgcaaacactaactcatttgtatttctataattaccgtgattttttgtcttctcgtctgtagtggctcccccttttctggcagcatctctgtaactcctgttcttccatataatggcacaacaggagagatgatcttttagtgtaagcaggacggggcaggttttcttcatagtcaggatatgattgtgtgtccagagccataacgttatctttctcataagtagtctccagattcttgacttaatgggttctaaggattcccggttttaagtatgagtatcttgtcctctatactctttcattctacttcatgatttgataacattgtgtttcaaggtctgacaaaggacatcttaaaggaatttgtttatccacatgatctgcctttatagtgtgagaaattatatttatcagataagaaacataggcaaaaattttggaaaatgcccagaaaatatcagggagaaagtgtttcctaaaacctcctataccgtgatacttctttgcagttgtggatcaaggtttgtcaccctaagcttcagtattgtgtgtgcattctgtcaaatctttgtctttttatgtgataatataacttatcttagataattcccctaaactgagtgtgttccaaaagtaactgcagatcagaacttcaggatagtatacaaatttcaatgaggcaaaaaatcatagtggcacaaaagtcattacatgcacttataggacaggcatggttcttctctgctagtgcttgcattcctttgacctgcagatacaaagtctattcttccattataatttattttaaaatatgtgttctcagagggcagggctttgtgcttgagttttttttgtgtgtgtagtaccccacgttttgctcactgtagtagttattaaatatgactcatgtactaggacaccaagaaatgcttttgaaacaaaaaagatacctttcaaataatcagcctctggaggaaggcactgtccgtccgtctagatccactttagaatctagacgccaaaaaaactattcagagaatcccatagaagagccattgtctgtgagtggcatcttctaccatcaaagacccatggaagtcacgacagacactgcccagagtccagacacgtacagatggtggctgtcaggaggtgactcacactacagattccagcatttaacaaagcaaagaggatttcatttttagagaatagtcaggaagctgttctttagtccactgactataaatttaaaggaacagcttattattttagcaatcttgctgacatggaaagaagacagaatatatttgtattggtcagtttaatccaatgctcagaggctacaactaaatcaaaattgccatagacttcaaaggggcaaatggttaaaatgctgaccaaccttttttcagtggctttgtagcttatcaaatgcccctcacttgcagaccaactgattttgctctcagaatattttacttgtagtgagattccttttgtttccctattttaatcgcaaacagtccttgatattttttggccagataaaaggagagagcaagaatgagatctgaaaaatgggcccacagggagaggcatttgagagaggattgctgaatacaaatccagaacaaagttatttagtgaaatgccaaaatggtcattcatccaaactggcacatcctattagaagctatctttaatgcggtattgccaggcatggtcataaatgtcacaggttagaaatttctgtatgcatggaataaggatatgttcctgctaggatgcagcaatatttttatcgtcaccacacaatatttattaaaggtctctcagtacacacgccacagtagaagtcagtatctttacgacaagcacaataggttaatgagtaaaaagttgaaagcatcctgaaaagcgaaaatgaaagacaaatgacatctaatgagttaacatttttcacagggtgcgtctcctggtggaagagggctgtgaagatcgaattctggtagcacatgacatacatacgaaaacccggctgatgaaatatggaggtcacggctattctcatatactcaccaatgttgttcctaaaatgttgctgagaggcataactgagaatgtgcttgataagattctaatagagaaccctaagcaatggctaactttcaaataggatggttgcttatgaattcacaccttgagtataaaacttgcagagaacattcagcgatttccagtccactgtgagatattaatcagttacctaggactaatgacagatcatttccttctgatgagaactaggagggtttgccttctctgagaccagctattacaactgtgcctctagggagttactcagcctaattgagccctattattttaacttaacaaaataaatacagaagtacctatttctaaacaatgatttaaagtctatatcccctaagcggagttgttgtttttctccctaatctatcagctgcactacttgagaaaatttaaagtgtttctagttaaattatttccttcttgagcgatctaatgtttcttgtaatattgatgatcctactaattatcctgctgttctttaattaatgcttaatgaataatatggcactgtaaaatagcttctgcaacaagggaagttaaattttgagacttttttccccaaaggatactgactgtaatacaattaccaattcacaatgataaaaatattttgaaaggttaattttatactgtccacctatctatatattcttctactgaaatgattttgatatctttggctttccggtatctatttttgccatacattttgctgttttgcaaagtttgtataagaacacataacactactgaattataaaaattcaatcataaaagtcaaaatatattacataatatagtttaatgaatcattacatttataataacaaaggccacaatttaattaattggtaagatataatgcaaaaaaaaaaagagaaatgtttgccttatgtatattccctttatttcctttaccttttgtttttccttggacctaaacagagaaaataatgcttatgtatctgaagaaaaggtcagatctattggaaatgacagcccgatacttgagcctcctctttaaaaggtatccagccctgatattttgtgtaaataaaatgtttttaaaacctgttagttaaaacacttaggtgatgggcactgctgcttataaattcatcttttggttgaatcctcactatgctatttggtacctaaaaatattctccaaacccttgctgccagttcctctttgataaatatatagttaattcgaaataaaatccattgcaattcatttatgagttatcttacatatcacaaagaccaattagaattagtcattattcttgatgaagagtctgtttttaatcataaaaatcatgacagttactcagacccaggcatttcaacagagctaacaccaccttcagataggcacaccatgcataactcttgggaagttgagctttgctaaataaaagatatttctgctgatcaaagatgatcaagctttctgtgtattggaacagaaagtaacaaagaggaatgagccaggagaacaaactaattcctttaaataaataaaaaaaaaaaatgcaaatgtccttcaccagtaaagcaagcaaatttttaaaatctctgtttttgaaatctactcgtcaaagagttttcagaggcaatgaaaggggaacagatttttcattgtaatagtggaagttgtgtgatagttaggagatatcaacatgcatttttaatcttttccttagatgaaagagatggcttttggcagtgtgttctaaccagaaagaaaggatttgtattactctccaaatctactgtactgtcagcttcactccacctgagaaaaaagaaaaaaaaattgatagctcaaatgcatgtaattcataaacactgcaaaggagagccacttggtgtctgcagtcctcatattaacagtctgtcacagaatgcagttaaagtattgattggcatatggtaatagagcaaccatagccttaacttacagacctgtgaaataaagggcattttgacctaatacaattaattttctggataactcttaaagagaagtcattttaactgtttttgctactccatatattgtcattcaaaatatattttaacccaaaataagttaaataatttgtgcatgtttgtgtgtgtatatatgcatacacttttttatattaaaattttgaggctatacagccactgtgccctgtggaataaagccatatatataaatgttttatatgtatatgttttatacataaataaaacatttcatctaatatatatatgtgtgtgtgagtatatgtgtgcatgtttagcagatatttgtataaaatataaacactctgttgtcatataggctatatgcgaaattgttaattttaaaataacctcaggccacagacttgtagtaatcatttgaaggcctcacctagtgtccccttggtgacgtatgcagcagctcaaattaaacctttgtgcattgggttatgaataatcttttcttccaaagatggcaaaagcctcggtttgatttgatactaaagaataaatttctctgactttcccagtgaatctaaatgtattcagttgacaaaatggacacataagggctttttctaaataccgtacataattacacattttcacacttagagggtaatcctatgatacactgtcaatctctatttttaaagactatcaccagaaaagagagaaaagaaaattcatataagaaaaagaaaatgtgaaaaagatcataggcttgggaattccctcaaatccagaaaattccaggttaaggcttgaagttgaatcattcccaggtctagctctaaggttaacaagagtacaaggcaaacaatttctttggggacaagcagcattatttcaattagaccttctcctgcagggcaaaaatcattcttccccacactatgaatggactccaagtatcataataagcaggtaaactcacaagaaccaaagctgacatatggataaaagcagcaagatcacagtacaccaaagtatcatatatatagaagaaataattcaatgtcttagatttgtctataaaaatttgtgatctatataggacttcattcacatggacactaacgataaggagtatttgctttggcggtagtggatcacacatctgcttatcttgctttgatattttttacataatgtttctgagtgatacagatgtgagtcaggtagcatttgatttccccacatatacacaactgaggtgccctgccattggcatcccctgggatccttgattcactgacgttagccatacgaatccagtgttcaaactcagaataataagcttagtttctgcattatcagtcagcataaataataaatccagaaaacgtgctgtatttgttgttgtttcctccatgggctttcccgccatctaatttgatatagacttcatctcccggctccaaatgaagaaccacactgttactggcatagtcgtaattctgatcagcatcttgggcaattgcactagcacgcacctatgtgaaacagacaagaattaggatgcgtaaatgagaattctcaagttttcttttttgccattcatgtagcatcacaagctgacttgctgccatagtacagaatttagcatagcaaagtccatgttgacctcagagctttatgaggatagtgctgtggcagtttccgctacgttagtgagaaggaggacagaaagggacaaaatagtgcttcagtggggaccattctggcagtcttatctaactacacattctaaactatgcatacaatttattatcttcctgtatcactcgtttttctaactccttcgatccctatgcccaatcacattttgaaatgaaactaatagtattttttgcattttaatttaagccagatagcaatattctaatcagctgtttatgagtacagaagttcaagtctaagttcagctgttcaccacaattattagaaaattgaggtatgtaatagctaaaaatacccaggaaaataccaactcctctactacttacaaagaaaaaaaaaaaaaagaaaaagtcttttgatttagggctttccaaatctaattcatgtaaagccccctttaccaggctgcttcagaagcttagctcatttatacatctttgattatatcacctgagttttcagagttcttttttccatcgtgtctttttattacttaactatgacatgtgcatttaaatcaagaatttaacctcaacatatctaaaagttaaagaaaggactaaattttcatgctctgaggcctctcaagtttcaagaatttttgaatgatttcgttgaatatccacttacacttaggagattctaaatatgtggcttgatttgagggcagaggctgcttataatctgcccatggtaagcctgtgatctcattagtgagttgatagacatttacaaacagtcaaattgcctatcatctcatgcattgtggacattctgtcagatccttagctcaaattaggcttcatattcatttagatatattgtgattctgccttggaaaatctttcaacaggcagacttagatttgatttatttcagtaaaacatcttctactttgtggcttgtttcatttctattccactataatgatatttccctgaataacatagcaagtgatttagtggttttgtaaacctgcactatgtaataatgcatgatttggggtacaatatgctggattttatcacttggcaaaatgagagaaatgagacagaagtcaagaatttccatgcatttctttcaaaatttaaatgatgagttttccaattaaattttcttgtgatatagtctcacgttaatgctgaaatgttaaaaaaagaagactctttaacactgctgaacttgtaaagtcatttgagtagtatctttaaagtgtctttctgggtatcacatagcaaaaggagaaaatggcttaaaggatttagaattgcttaacgctgtactaacaggcactaatataatgaaagcaatataccatgtaattatgcttggaagcactgactccaatatatatgccaatttagtaaagtggtccgttttgaccattaaataatgacgcagtttgacttcataatattttctaaagattaatcatgagtttgtaggagttgaatgctttgattcattaatttcatctagccattaattcccagggaaacaaatctacaagaaggatattgctattatgacttgtgtttttttctcatctttggatttttaatggtgaaaaaaattaaaaacaaaatattcatgagctatattagtaatacattagttatcaacccataatatactcctcagctattactaataaccagacatattttattcagtgctttgggtatttaggacatgttctatggttactgggctttaacatggttttctacatgaaggtattggagaaacaggacatactaaaattacttgatttagacacaataatccttttaaaaatataatgccatttttattctccagggtgtaaccacaaaaccgagtgaacgtcaccatttttattcagtaggcgtaaccacaaattcctgcgaatgcattagagtgattccacagactgaaaggttaccctcacagtttctaccacctttgttggatcaagccagtgtggttgctttttaatgaatgtaattctgtaagattttaacctatactgtaccgtaagactgtcccaattaaataattgccatactccagtgtacctggcatgattttggtatggctgctcacctgatcctactctaaagatataacaggacttgaaatttcaagctctagtattcagctcagtgacttcaacaattctttcaagccatcaaactattgaggaaggcaatgtgttcaccctggaggctgtttccagattcctaaatgtacagtgatttcagcattctgtctgggaataagatccatccttccttcagcgcaatcaaccgatttctacctgaatttactctaatatcttttcttattacaagataactatttagattctgctttatgtttagtccgtatttctttaaccctaaaaagattatgaatttgacatgtcattgatctctctaataagcgaataccaacccacaaaccactcatccttttaaaaatatttcatgggcatcggtgccataactaataaatttttaagagtaccaactggtctttaattattttatgcttttaatcctgaaacagtattagttttcattcgagtggcttatttattatagtggcattagagtgattgtattcaaatagcaatttttcttcatgttttctgctaaaaggattatcaacattaaagagatttcctctttccaaatgtaaagctatttgagttgaacttttacctttaatatgcactgtcatgggctttcaacaaatggtaggattaaatttaggttgatggcttcatggggagtatgagagctgcggtcattttagggatatgtttctgtgtctgcaataggtttcatagttttagcattatcttattagtgaggatctatcattagagatcatatttatggtgacatttgtaatttaattaattgctactgatgttctcgtaatttcattttcattgtacttctgtggaatcataaacaaaaggttaagtggcacatcaggttaatttactggtctttgatgtttccatctgtgatcttacattctacacaaagtataaataaaatggctctcatatggttaca

SEQ ID NO: 420 - DNA, 4089 bp, Homo sapiens
  source 1..4089: mol_type = genomic DNA; note = NC_000005.10:141094615-141098703 PCDHB2 [organism=Homo sapiens] [GeneID=56133] [chromosome=5]
agatactcagctaaagaagcagcaagcaggaagaggaggctttctaaggcggtcgctccgggaaatccgggccctaggattgtccactcatcccagtatcagcgagatacggggagatagagttagcgacaacgtgagccagagctggagcacgtttggtgagagaccagaaagcaatggaggccggagaggggaaggagcgcgttccgaaacaaaggcaagtcctgatattctttgttttgctgggcatagctcaggctagttgccagcctaggcactattcagtggccgaggaaacggagagtggctcctttgtggccaatttgttaaaagacctggggctggagataggagaacttgctgtgaggggggccagggtcgtttccaaaggaaaaaaaatgcatttgcagttcgataggcagaccggggatttgttgttaaatgagaaattggaccgggaggagctgtgcggccccacagagccctgtgtcctacctttccaggtgttactagaaaatcccttgcagttttttcaggcggagctacggattagggacgtaaatgatcattccccagttttcctagacaaagaaatacttttgaaaattccagaaagtatcactcctggaactactttcttaatagaacgtgcccaggacttggatgtaggaaccaacagtctccaaaattacacaatcagtcccaatttccactttcatcttaatttacaagacagtctcgatggcataatattaccacagctggtgctgaacagagccctggatcgcgaggagcagcctgagatcaggttaaccctcacagcgctagatggcgggagtccacccaggtccggcacggccctggtacggattgaagttgtggacatcaatgacaacgtcccagagtttgcaaagctgctctatgaggtgcagatcccggaggacagccccgttggatcccaggttgccatcgtctctgccagggatttagacattggaactaatggagaaatatcttatgcattttcccaagcatctgaagacattcgcaaaacgtttcgattaagtgcaaaatcgggagaactgcttttaagacagaaactggatttcgaatccatccagacatacacagtaaatattcaggcgacagatggtgggggcctatctggaacttgtgtggtatttgtccaagtgatggatttgaatgacaatcctccggaactaactatgtcgacacttatcaatcagatcccagaaaacttgcaggacaccctcattgctgtattcagcgtttcagatcctgactccggagacaacggaaggatggtgtgctccatccaagatgatcttccttttttcttgaaaccttctgttgagaacttttacactctggtgataagcacggccctggaccgggagaccagatccgaatacaacatcaccatcaccgtcaccgacttcgggacacccaggctgaaaaccgagcacaacataaccgtgctggtctccgacgtcaatgacaacgcccccgccttcacccaaacctcctacaccctgttcgtccgcgagaacaacagccccgccctgcacatcggcagcgtcagcgccacagacagagactcgggcaccaacgcccaggtcacctactcgctgctgccgccccaggacccgcacctgcccctcgcctccctggtctccatcaacgcggacaacggccacctgttcgctctccagtcgctggactacgaggccctgcaggcgttcgagttccgcgtgggcgccgcagaccgcggctccccggcgttgagcagcgaggcgctggtgcgcgtgctggtgctggacgccaacgacaactcgcccttcgtgctgtacccgctgcagaacggctccgcgccctgcaccgagctggtgccccgggcggccgagccgggctacctggtgaccaaggtggtggcggtggacggcgactcgggccagaacgcctggctgtcgtaccagctgctcaaggccacggagcccgggctgttcggcgtgtgggcgcacaatggcgaggtgcgcaccgccaggctgctgagggagcgcgacgctgccaagcagaggctggtggtgctggtcaaggacaatggcgagcctccgcgctcggccaccgccacgctgcacgtgctcctggtggacggcttctcccagccctacctgctgctcccggaggcggcaccggcccaggcccaggccgacttgctcaccgtctacctggtggtggcgttggcctcggtgtcttcgctcttcctcttctcggtgctcctgttcgtggcggtgcggctgtgcaggaggagcagggcggcctcggtgggtcgctgctcggtgcccgagggcccctttccagggcagatggtggacgtgagcggcaccgggaccctgtcccagagctaccagtacgaggtgtgtctgactggaggctccgggacaaatgagttcaagttcctgaagccaattatccccaacttcgttgctcagggtgcagagagggttagcgaggcaaatcccagtttcaggaagagctttgaattcacttaagtgttaataaggatctactgaggctagtctcgtttaatttgtggaaagtccttttttactgctttgcccattggaggtgtctccttttattagaaagtaaccatcttattccaattctatgcatgttactggtatttataaatgtatgagtttttttgcggtataataaatgtaaattttctttgtattctaattgttggttagtttcattgcaatttaattgcatttaaagtgtaaaagtaaattttgtattttcagaaatctttaagttagagcatcttttccagacctcacagtctatggtcctagataattttgaagtcctacatttgaaaatatttgttatcattacatgagttatattttccagcccagaatatttgtgttttttatatcctcttaggctagtgtaaattctatcctgtgaattcacattggctaaccctttaaataggtatatttatgaataatatagcaagcaccgtccttacgtttttcaatatatgtaatttttttttttttttgagatggagttttgcacttgttgctcaggctgtagtggagtgcaatggcgcaatctcggctcgccgcaacctctgcctcccgggttcaagcgattctcctgcctcagcctcccaagtagctgggattacaggcatgcatcattatgcccggctaattttgtatttttagtagagacagggtgtctccatgttggtcaggttggtcttgaactcctgaccttaggtgatctgcccacctcagcctcccaaagtgctgggattacaggcgtgagccaccgccccccagtccaatatgtatacttctttcaagtgttgacatatgaaaagtattagtctttagagattgtaagaattttaactgttggattctacaaggcactaacatcataagtgctctaataaatttttgtcaaaagtcaatcattaatattcaaaaatgtagataaataatacatgtctagcaattttcaaaggcatgctaattcatcatgctttctctttcaaatagtttttttaagagccctctgcttattccagtccccccctttaaaatcttttaaaattattaataacctattaactttgagcacttcattaaaatccaaaaaatttgagggagtacatgtctttgtcctttacctttagaaccctcaaacatagcttggtattgctgtttttaaaattttctggagcatttaggattcacttagaaacaagcctttagggagaaaaatttatctagcaccactcactctatttttttgcactgactacttctatttttccccctttcatttccctagacttttcaatgcttttttataaaggtgcttgagttctgtttctcaacagctccctcatttattgaatgattcacacagtcactggaatattataggctcttaataaaatttttgaatgattgaaagagagaaaagtattttacctgtgatatattgatatttaaataaactagaacacttaaaggaaaa

SEQ ID NO: 421 - DNA, 2774 bp, Homo sapiens
  source 1..2774: mol_type = genomic DNA; note = NG_000017.2:62743-65516 PCDHB2 [organism=Homo sapiens] [GeneID=56133] [chromosome=5]
ccttacccagatactcagctaaagaagcagcaagcaggaagaggaggctttctaaggcggtcgctccgggaaatccgggccctaggattgtccactcatcccagtatcagcgagatacggggagatagagttagcgacaacgtgagccagagctggagcacgtttggtgagagaccagaaagcaatggaggccggagaggggaaggagcgcgttccgaaacaaaggcaagtcctgatattctttgttttgctgggcatagctcaggctagttgccagcctaggcactattcagtggccgaggaaacggagagtggctcctttgtggccaatttgttaaaagacctggggctggagataggagaacttgctgtgaggggggccagggtcgtttccaaaggaaaaaaaatgcatttgcagttcgataggcagaccggggatttgttgttaaatgagaaattggaccgggaggagctgtgcggccccacagagccctgtgtcctacctttccaggtgttactagaaaatcccttgcagttttttcaggcggagctacggattagggacgtaaatgatcattccccagttttcctagacaaagaaatacttttgaaaattccagaaagtatcactcctggaactactttcttaatagaacgtgcccaggacttggatgtaggaaccaacagtctccaaaattacacaatcagtcccaatttccactttcatcttaatttacaagacagtctcgatggcataatattaccacagctggtgctgaacagagccctggatcgcgaggagcagcctgagatcaggttaaccctcacagcgctagatggcgggagtccacccaggtccggcacggccctggtacggattgaagttgtggacatcaatgacaacgtcccagagtttgcaaagctgctctatgaggtgcagatcccggaggacagccccgttggatcccaggttgccatcgtctctgccagggatttagacattggaactaatggagaaatatcttatgcattttcccaagcatctgaagacattcgcaaaacgtttcgattaagtgcaaaatcgggagaactgcttttaagacagaaactggatttcgaatccatccagacatacacagtaaatattcaggcgacagatggtgggggcctatctggaacttgtgtggtatttgtccaagtgatggatttgaatgacaatcctccggaactaactatgtcgacacttatcaatcagatcccagaaaacttgcaggacaccctcattgctgtattcagcgtttcagatcctgactccggagacaacggaaggatggtgtgctccatccaagatgatcttccttttttcttgaaaccttctgttgagaacttttacactctggtgataagcacggccctggaccgggagaccagatccgaatacaacatcaccatcaccgtcaccgacttcgggacacccaggctgaaaaccgagcacaacataaccgtgctggtctccgacgtcaatgacaacgcccccgccttcacccaaacctcctacaccctgttcgtccgcgagaacaacagccccgccctgcacatcggcagcgtcagcgccacagacagagactcgggcaccaacgcccaggtcacctactcgctgctgccgccccaggacccgcacctgcccctcgcctccctggtctccatcaacgcggacaacggccacctgttcgctctccagtcgctggactacgaggccctgcaggcgttcgagttccgcgtgggcgccgcagaccgcggctccccggcgttgagcagcgaggcgctggtgcgcgtgctggtgctggacgccaacgacaactcgcccttcgtgctgtacccgctgcagaacggctccgcgccctgcaccgagctggtgccccgggcggccgagccgggctacctggtgaccaaggtggtggcggtggacggcgactcgggccagaacgcctggctgtcgtaccagctgctcaaggccacggagcccgggctgttcggcgtgtgggcgcacaatggcgaggtgcgcaccgccaggctgctgagggagcgcgacgctgccaagcagaggctggtggtgctggtcaaggacaatggcgagcctccgcgctcggccaccgccacgctgcacgtgctcctggtggacggcttctcccagccctacctgctgctcccggaggcggcaccggcccaggcccaggccgacttgctcaccgtctacctggtggtggcgttggcctcggtgtcttcgctcttcctcttctcggtgctcctgttcgtggcggtgcggctgtgcaggaggagcagggcggcctcggtgggtcgctgctcggtgcccgagggcccctttccagggcagatggtggacgtgagcggcaccgggaccctgtcccagagctaccagtacgaggtgtgtctgactggaggctccgggacaaatgagttcaagttcctgaagccaattatccccaacttcgttgctcagggtgcagagagggttagcgaggcaaatcccagtttcaggaagagctttgaattcacttaagtgttaataaggatctactgaggctagtctcgtttaatttgtggaaagtccttttttactgctttgcccattggaggtgtctccttttattagaaagtaaccatcttattccaattctatgcatgttactggtatttataaatgtatgagtttttttgcggtataataaatgtaaattttctttgtattctaa

SEQ ID NO: 422 - DNA, 108366 bp, Homo sapiens
  source 1..108366: mol_type = genomic DNA; note = NC_000006.12:c25832108-25723743 SLC17A1 [organism=Homo sapiens] [GeneID=6568] [chromosome=6]
tttggtgaatgatttatggggctaaacttggtaatcctagaaagtcaatattgtgtaaagttgagagaaaagtcttcacagcggaagaagaaatcacttttttgtcccgaatcaggttagtctacggggctcattaaatgaaatgagcaatcagttgattccccagagggccgtaagggggcattccctggcaaagatattattgaaagtacttagcaataggggaaaatgtggggaggggtggaatatgccctatcttctgaggcttttcacaagagaaaaaagaacatatttttagcaatcagtgtgaggttcacagggacacaaggaaagagaagtatgtgttgtacagtgtgtgatgcttgtatagctgtggtgtgctgtgtctgtaatgtgtgtggcacactgtgtacgcctggtgcatctgtgcccatcatttatgtgtgtgtgtggttatgtgtgtggtgtttgtagtttgtacttccgttttgaggatgcagtattgtaacgtatttatatgtttggtttgctatgtgtctggagtgtatgtgtggagaacataaggggagtttgtaccatgtgtttatgttgtatgtatgtatgtggtgcatacgtatgggtggtttgtgtgtgcatttggtgtgtatgtatatatgtattgaaataaacagcagccccagaagaggttccaatgtgtgataatgatggttgacaaattgcttattcaaaaatattttgcaaatccaatctcaggactttggtatctttggggcactaggtatcatataatctgatatggtaaaatcctgaggtctaacctgaccagcacatattggtgctgaattctgatggtaaggggttgcctgataggagactgctccattctgattctccactgagcttcctgccataaagctttgcatcagtggctgctctatccacggaaactgaagatacggacaggggcatgtggacgtgtaacgaatgattagcctctgcttgagttgatcttatcaataagcagatagtatcttccagctctattaagatacagggggaaaaaaggaatttgttttacctttgcttactccttttctgacattcttcctttcttttcatactgccgagtttctgacctatagcaatctccttctgcctgaaaggcttcttttagtgttccttacagggcaggtctactggcaatgaattctttccatttctcactttggaggaatattatcacggatttagaattctggattggcagggttatttgtttgttctctgtagttttcaggtcttccatatatttttaatcaaccaaaacaatcacaaaagtaaaataaatatcaagggaagcacataatggaggtgaatgggcactgctgtgatggagcaagttatccttggaagcggttttaaatcagagaggagtactgggtagtgtttggtcagttgcctctctacattatgctgacatcaacgtgttttgcactcacagtgggtggaggcaaaacccttcagcaagaagagaagcaacttcagccgtgtatgcaaatggataaccggttgcctcccaaaaaaggtagcactttattctgttccattaaacaggtgttctttttcttaaatattacatcacagattccatgtggaagaatatttttgtgatatacatatggggtcttaaaaatgttcagaaaagaaggtagaagaaaccagtcctactatggttttccaccagaaaagccctaaataaaaagattctacatactctggtggcttacactttattttcatttttgcgcacttgtcagtttatcatttagtggaaaatatcagaaaaaactgggctattttggttccatctccaagagaaagagagatagatctgtaagtggaagtaaggcaggatgaatgttcttgagtccctgcattcttggacatcaacagctgaatgtgtactgaatattttttgagagaagctgtttattttaggcagggtagtgtaatgacaataaaggattactgctattggtttagcgttgtgtcaatgtcataggggacaaaatcccagaaaaggagatgagcgatagattgtatactttttcaacttatgaaaaagttactgtatattaaattatgtatttcttcttgtatcaactttgatacttaattattttgattgtttaagttgtccatttaatctgcattcaaagtttatatatatatgtttttttctatatattattcatttctgcccttatgcatttaattccttttagactttttgggtttgttcctttgctcagtttccaagtgtttaaattctttcttttttgataaatatatttacagatgcacattttactctgtccatgagtttgatatgcggtattcttattactcaatcccaaacactttagaattccccctgtggtcttctttttaacttaaaacttgtttagacataattcatggacttcctggagcaatgtggaggagagaaatgagtaaaactcaaaagcatacccctaaatgactaagacaatgagcccttctctgacatggtgacaatgacttcccttttaccatgtagagactcctgcaggtgtgtttacaaagtttctgatagctttctagatccattcacttccctatgatactgagtttaggcagcaaatcaaaggaagggctggctgatgattaaatttctcaggggtattcttttacccccttctattcagctcttaagttcatatggcacaaaatttcttggcagtccactgacaagataagggggcaatgtgttcatcctccattgaaccatgtaaatctttgacatccaagcattttaggagagggtctcctactatacactatcgcatcgctaggaccttggtatttgattcctgttgtccccatatcatggaaggccaaaaatcccaagatcaaaagtccacagtgaaacatctgacttcaaggcccaacttatgttttgaggcccccatcttcactaagcccttggcctgaatatttcatctttcctcttagatcacccatgcttttaaaaaaatggtttattttaagcatattttatctaatattcttatcttttaacaacggaagctcagttggccagaaaactagccaactatttgttgggtactaatgctttttttcatttaacagtttatctaaagagtattccacaatttttggcagagattttccttagcatttttatagctgcaaatgactttggtatggatggatatattataatttatttaaatggtcactgatttataaacatctaatttgtttacagtcttttgctagttcaaacgattctataagaatgttgcaaaatgatataaaattcaattcggtaagatgatgtaaaatatttattatctaataaaatagcttccaatatataaagcaaaatagtcttatgaaaattataaagacaccaaatcctaaataaaatattaacagaacaaaacaaatctaagaatttataaaaacattaaaaaagcaaccaccaacactaagtcaggtttattcttaaaataaaagagtaacttaatgttagaaaatgtatacatgtcactccacacaaattaattgaaagaggaaaacagtatgattatctcaatagatataaaaaatctatttatttatgatattaatatttatttgcaataaaaaattcttagttaactatgaatgtgcagtagacagaattccaagatggcacccaagctccctggcccctgttttattcttgggtggaacaatgagcacagaggatacagcccaaagcccagagggtggagccaagagccacaagaattatctccagaccttatgaaaaatccaacattggcctggctgaacttcagaacctttatggatcgatgactccttttctcctctatttttcccaccttggaactggaatgtctatagctttatcctacacctgttccaccattacgtggtaaaagtgttaggggcatataacttgtctctttagtttcacaagcccacagatagaaattgtgccctaggagggattaatcataggcccctcttccacacctgatttagatgatgagattttggactttgtgctatgagattttgatgaggttttgaacttgagctgataatgtaataagatgaagaatttgggaagcttgaaatgggtgaatatgttttgcacgtgaaatgaacatgagtctttaagggccagatggtggactgtagtaggcagaattctaagttttctctcaagattcccagcccctggtgtatacacactttctcccagttatttaagcaaacattaagctaggtgctgcttcaaggggttttgcagatgtattatggtcccaaatcagttaatcttaaatagcgaaattatgcagttaggagagatctaatcacatgagccctttaaatctggttgtacaggtcagaggcagagtagctagattcaaagtgtgagagggattcaacataaagtaggttcccattgctgattttggagatggagggggccatatagattaactttgcctgtttttgaacttcataaaactagattcctatagtatatactgtctggtatctagcttctttaactgaacatgtttttgttgaaattcatccagatttatccaaattgttgtgtataagtagttctttccttttatttctgagtaatatgcattgtattaacataccatgatatgtccattctttccaaacattctgctattttgaataaatctactataaacatttctgtatgtgttgttttgtagacatatacctgtatttctcttgaaaaaaatgccatttgttgaaaaacactttactttcctccaatggattgcattagtacatttatttttaaaaagttaaccatatatgtgtatctgtttctggactccctactttcttccatcaatgaacttgtttggctgtacaccaactgattactctagcttatatcaataagtaattacatttttttaaaatgccatttttttctctgcattgggcatatataagtctttcaaccagagtattttttaaatgttggaaaaggaatagttttcttgacagaaaatgtctttgttgtaattagggggacttatgtccaagagtaacacagggtatttataaagggtcttttaaaaaatagacttgagccaaagaacttgaaagattggcttgattttcttggaacttctagctggaaatacaattttaaggagaatatggtattattatatcagtctcacatcttcttattatataataattatcaaaggtcattaagtacaataaaattttaaattaatatctagggctccaaatttctgaatgtccctcctatagttaaagtatgtttttatctcagctctgtcagcaattgcgactttctgttttactttgtagttccaggtttctgttcctttcgctatggattgtctttccttgtgcactgttgtaatgttataataacagcacagcgtgcgtgcctgaacctcacaatggtagtcatggtgaatagcacagatccacatggtttgcccaacacctccacaaagaagctcctggataatataaaggtacatcaataattttccccacagtcaaatgtttaaaagcctgtcttgctaactaatttgtgtagatatggaattgtactgatatgatactatatttgaaaaagaagctcaagtcttcatctaccttgccaggagtgacctaaataaaatgtcccatgattaaagtatgcctcagtatttctgaagggcttgttgtgtaaatccttctatgtgagagagaataaaacccaagagttagggcttctttacaatcaagaaatttggacaagaggaaaaaaagggaaagcattttaaattaggagtggaaggtgaagacacattacatttttaaagtttttgacttgcaggatatttaaatgtttcattaatttcatctctggaagataatcagttgttatctaccagaagatgtagatgcagcaaaaaataaaaacaagataggtaatgtcagtaaagagatggaaactataaaaagaatgaaaaagcaatactagaaatcaaggaaattataacaaagaatgcttttgaggggctcatcagtagactccacaccactgaggaaataattagtgaacatgaatatgggtcaatagaaactcccaaagttgaaatgcaaagagaaagagaattttaaaaaattaacagatctttcccaaattgtagacagtatcaaatggtgtaacatgtgcatgaccagaatgccagagagaataggaaacaagaaatatttttttcaaaaattggctgagaactttccataattaatgacaaacatcaaaccacagatccaagaagctcagagaacaccaaacaagataaatagcaaaaacaaaaacaaagaaaagccacctaggcataccatatttaaattgcagaaaaccaagacaaaaagaacatttcaataaaaccagaggaagaaaatacctacagaggaacaaatataagaattacagcagacttcttatcagaaaccatgcaaataaggagagaaaagtgaactttttaaggtgttgaaagaaagaaaacccctgccaacctagaattctgtattcaataaaattattgacaaaactgaaagactgtaaaatttcaagctgtagctataacttgagaaagcctttattgtctttcaatttttgtccttcaattttcccttcatatatacgaatttactgccagcaggcttaccacaaaagaaaagttaaaagatggtagattttaatccaactatattgataatcactttaaatgtgaatgttctaaacacaccagttaaaagacagaaattgttagaattgataacaaataaagatcctcaaatattctatctacaagaaatcctgttaaaatataaagactcagataagttagaagtaaagggatgaagaaagatgtaaactatgcaaccatgaaaacacaaatcaaaagaaaactgaagtagctatattaattttagacaaagcagagtttatagcaatgaagataaccagagataaagagggcattacccaatgataaaaagagtgaattatccaaaaacaaatgattctaaacatgtgtatccctaacaacagagcagcaaaatatagggggcaaaaactgtgagaactgaaaggaagaatagaaaaatacatacttggtaactgttttctatttgttaaatctgttctttgttaatttttttttcattcacattttgccttctctgggtttaactgagcattttatatgactgaattttatctcctctcttgatatatcatttatacctgaaaaaactattttaatagcttccataggttttataatatacatttgtaataatacaaatctacctccaaataacactatactatttcatgtatcatgaaggcatctcgtaacagaatatttccaattcctctctcccatctctgtgactactgttattcattttatgtatctatatgttataaatactcaaaacattccttcaacaaaaagttatcttttagatcaattcaaaataaaatattttccactttcatttattcttttttaaattttttgtttatttatttattttttaatggcatgaagggcatcatagtttatttttaaaaattgtaccacactgatcatgatgaccagcatacacatgataatggcatttattcttttctaatggtcttacttcttaaatgtagatccacattttttagctatatcacttttcttctgcctgaagaacttctcttaacatttttttgtgggttgtgcttttgttgttgcatataagaaatctttgcataacccaagatcaaaaaaaattttctgtgttttagaagttttataatttttcattttactgttaaatctatgattcattttgaattactttttgtacatgttgcattaaatatctttttttacatatggatgtacaatttttttcagcccaatttgttgagaaaacttttctttctccactgaattgcctctgaatgttcatggaaaattagtagttggaggtgtaacactacctactgctaattttaagacttacacagagttatagtaataacgacagtgtagaattagtgtaaagacagaaaatagatcaatgaaatataatagagagactgacacacatatgaacaactgatttttcaagatatgcaaaagaacaaacataaaactgaacttcatcagaatttaaaatactgttaagataatgaaaaaacaagccagtgacaggggcacatatttgctaatcatatcttataaagaacttctatcaacactcaattaaaaaacacaacccaatacaaaaatggaaaaaaaagatgtgaacagctatttcaccaaaggagatacacagaggaaaaatactcacatgaaaagatgctgtatatcatttgacattggagacaaacatcaactacaaagataaattactgcacactgattcaaatggctaaaattgtaatgattgcaaatataaagtgtgtgcaggaatgtggaggaactagaattctcctacagtcctggtgagaatgcaatgtggtacaaccactttggaatacactttgtcatttcataaaaaattaagcatatgcctaccatatgagacagccattccactgctagttatttactgaagagaaataaaagcatatgtccattcagagacttgtacataaatgttctataaacatttttgtctagctttatttctgatagccaaaaaactggaaataacctatatgtccatcagtaggtgaatgattgaacaaactatggcacatccataaaatggagtactacttagcagtataatggaatgaactactgacacaaagaacaacatagataaaactgaagataattatgccaagtgaaataagctagacaataaaaaagagtacataccgtagcattcccttaatataaaacttctagaaaatgaaaactaagttacagcgacaggcagcagatcagtggtgggggagggcaggagggaggaattacaaaaaaaataggaggaagtttttggagataaagaatatgttcactgtcttaattgtggtgatagcttcacaaatatatatatagatacagtttattgtgtcaattatctattttacataaaatctattctgtatgaaatctattttgtataaaatctatttcatataaagtgttttgaattatattcttaaatatttatgatattccagtgctttggtttaaatactgagaacctcatattctagagaaatggctactcacgggagttgtattttagagccttcactatggctctaaaagaggagggagctcttgagctatagagcttgaaagatttctctagcacatgcatcagcccgccaccccatgaaaccttttgccatcccatgaaatttcctgtcacaattcagtttactgctacataaggtactacatttaaaaatgaagaaatagaatacataattattctaaatagaaaaacacaccagaaaattattccacaaagcagatctaaattgtagtctaacattacaaaataacctaaaaattagtaaagcagttatagctatggaaggaacaccatagtgcagtatctacaataactcaaagtagacatggccagaccacaagaggctttgcttggagagcagatgaatgaaaaaaggaaattgacaggaaaggaatatgaaaaagtcaaaacaaacattttagaaaaaaagacgaaataagaaaaacacggaacagacacacacagatattttaccacagtaagaaacactgattatagaaaagaagatgacaaagaaggtagatgaggaatattctgtagtcagtcttccctcttccatcaaagtcaaggagattgtgtcattattcttttttaagtgtaccaacttgacagttagaaattctaccataattttaaagtatatattcttttattactaatgggattacacatttgtatatttctgtgacctatgtttattgatcatttccattttgttctcttataaattatctattgatacctggatacattttccttactgaggtattatatatttcttattcatttatatgactcatacaaatgagtatatatatttctaagatttacttagagtcatttatacatttatatgtggagtactttgttcaatggcaactagttaatgcactgtatagaaaaatataaactgaggatttatctttctggtgtgagtagtttcagtatgagctcaggggatttaaaccaattctggtgaactttttttattttctacattctgctgtggagagtgatggctttaagccataagaaaaactatccaagattttgagtgatgtgttcacatgcacagggagagtagaacaaatgcctgctggcccacctgatatgggtaagggtgaatattgacttccttggtgcttcctgtgattaaaaacaagaaaaacaaaacaaaacaaaacctggctgagcattctgcttcatcttctgtgtagcctccttcctctcagtggaaaagatctggaacttccctggcacccaggctactataaggatgtgcctcactggttattatttggtattctcagagagtcactcctaccagatttttccatggaagtccttttccatccaagagaaatattacactctagaggccacagctatagggtgacagtgacttgaaaaggagagaaaaaagaagaatggagggataatagtgatgacaacaaacatatggattcctacctattttatttaatattcaaccaaaaataacatccagcacattcactgtttattcaggaaactcttcgttatttaatatgttcctcctaattatgcaagtaacagagaaagtttagaaaatgccactatcctagacacttccaaataaactttatcctgtcctcctctactaccattaagatttcttcctgttaagtgggtccaaaaacttgtgcaacctcgtccctcatagtctcaacaataaattcaatattaggattttcttttatcattcttttttttttttttttttttgagatggagtctcactctgtcgcccagactggagtgcagtggcgcgatcttggtcactgcaagctccacctcccaggttcacgccattctcctgcctcagcctcccgagtagctgggactacaggtgcctgcaaccacgcccggctaattttttgtatttttagtagagatggggttttctagtagagacggggtttcactgtgttagccaggatggtctcgatctcctgacctcgtgatccgcccgcctcgtcctcccaaagtgctgggattacaggcgtgagccaccgcgcccggccatcattctttaataatgtaaaaagaaacaatagaaggccctctaacctaggaatggactaacaaatacatttctggaaaaaatatgccacatcagaaccaagtgaaggaagagaaatggcctttttctttttattgttctgtgcagttgttttcacagttcagtctgagaattcttcatggttttatcttctctctttcatgactttgctctctgggagcaatatgtatatggggaaaagtgattttgcgaatgagcttaaattaatggaggagttagagaaagcaaacagggaagaggaaattcacaactgcagtatgagtagtactatgaagtacaggaaattaactatttaaatgtatgtatgctacacaggaggagtttacatgcagtttagcaacattcaagaaacaagcattaaatgtctatgctgtgaaaggtactggagggaggtacagatggtgtccttggctgtgaggactttacattactccaatgataaaatgtaaatatgtacagaaaatggtgtgataaaagaataaagaaggtcctgtgataaagaatactagtaagaggggagctactttccatgaggtgagccagaacagtttccctgaatccctaaatgtcacagtaaatttctgatatgcagagtgattcgacatgtccccccttgtcttttagaaccctatgtataattggagcccagatatccagggaatcatcttgagttccacctcctatggtgtcatcatcatccaagttcctgttggatacttctctggaatatattctacaaagaaaatgattggctttgcattatgcctcagctctgtgttaagcctgctcatcccaccagcagctggaattggagtagcttgggtcgttgtatgtcgagcagttcagggagcagcccaggtattaaaataatgctaaaactgaacagagtttaaattcacaggaagtattagagattaaatgtcaaacctttctcatttcaggggatagttgcaacagcccagtttgaaatatatgtcaaatgggctcctcccctggaacgaggccgacttacttctatgagtacatcaggtaaagaattaaagcctagaatgtttgaatcctatcttcatctcattgtattacattcttccctagagccataagaaatgtgtgttttgaatggtcaagggctttggaaatcatctgtttcagcattcttgctatgaagatgagagaattgtatagaatggagaagagccatccttatctcaaacaacagagaaaaagagagaaaagaaaatatttttattattttcttctgatgtttgtgttatgatacacaaatttgtttcacaggaaattgttcattgctacagtgaggctacattatctctgctttcagatgcctgcattaattaggggtgttctttgtacctactgattagggtttttgctgggaccctttattgtcctacttgtgactggagttatctgtgaatctctgggctggcccatggtcttctatatttttggtgagtctctttctgtaaaatcctagttattattcagaatctaaaaaaatttaaacattaaaacccaatataatgtaataattcatataaagttaatattaaaaatcatgaactccactgagtgaaagagagaagtcaatactcattaagttcctatcacaagcaaggtattatgcttaggactatacatgtatttttgtacataacttttataattctataatgtaggcgatatagatgcatatgcttttatatgaaactctccaggaaaaggatgatcagaataaataagtttacagatttcagaaatatgttactttttatacttaacattcaaagcatgatgtggagcactaccacataatcaaacacattaatttctacagtaaaaaatgaaatctgtgcaaactagaacacacaaaaaaactataaagaaataaggtttacaaataagtgataaaatcactttcggctctctgatcttggtttcaggtttgtgaataagaaaatgtggataggttctattatgtccatttgatacgtgaggaaacttcaaaaggcttaggtaacttgatcaaagtcatatacttaaggcaaaattggaagaatttatttacaaagtgatcacttaaaaaggtaggtatgagatccggtgaaattctaggaatagtccagttacctggggctagcgatacaggagctcggaatatctagcatccccaggtccaaaggcatcaagcaaggaagtagttatcagaatccattaggagagccctatagagcaggatgccttcaaagaactcatgatttttcataaaaggacacatagattgaggcaatcataagacagagctaaccagggtttgaaaagacaccttgatctcactcaattctctccctctcatctctgccgggaatttctgttggccaaatccaggtggaagcagaggacatgggggcctactgatgttcattcacatcagccatctgtagccaaagtaaggtgaagaaggatgaggagtacatctagggggacaaacagaagacatccaatatatacagtgagcagatggcagaggcataatctgaaaacatgtcttccatcctcaaaattccattgctgttaatgactgtgttagttagtcttcagtagtagacaatggtcagcatagtgatggaacgtaagccccttatcaggaaaggggctgaaaaaactgagaatgtctagcctgaagaagagaaaacttgagagaacataccttgtaggactttatataaataaaatgcagacctgttttgaattacaaaactaacccaaatatacagaaattacggcggagcaggggagcaggggtgaggtttcagctccatataaggaaaacttttgaataactaatgctgcccaacattgttgatcaagggttgaatgacatctaatatttatgttgtatttctatgataagatcatgtacagcaatgtatgccacttacagttatcatgggtggtttcatgaaactcaaacgaaggtgttacacaactacacattgtactatgataatagctttactgtgaagtccctcacatgttttttccttatcactaagaattgaggaaaagggattagatgacagctgtttaggaatttaggtatctgcctcccacaacctttttactataaattacatgatgtccacgtatgtcaaacgacctgttcgttagtggcagagggaaaactaaaaccaagattgttttaaaattccattggaatattcttgccaataaagttgaacaaatctgaatagatactgttttaaagaatacgacaataactgtatttaagcagctgataattgctggagattaccaagtagagtaaattgagtcacagacttacatttgcacttaaaatggcctggccagctgggcacagtggctcacgcctgtaatcccagcactttgggttgctgaggtgggtggataacctaaagtcaggagttcgggaccagcctggccaacatggtgaaaccccatctctactaaaaatacaaaaaattagctgggcgtggtggcaggcacctataatcccagctactcggaaggctgaggcaggagaatcacttgaatccgggaggcagagtttgcagtgagccaagatcgtgccattgcactccagcctaggcaacaagagtgaaactccgtctcaaaaaaaaaaaaaaaatggcctggccatcctgctatatttgtctcctaaagactatttcaaacttcttaactcttctcaaatctctaaaatgattccctttccctgtcttctgtctcaagtaacctccctttgaccattgaaatcattgcataatctgtctgtacccattgcctacatttcctagcatctcacgctctccttaactcacatctgactagtgtatgtggcatcaaacacagctattgccaagatcacttatggcttctgtcaccgctgccctgaggcccaggccagagggcgcttgccctagattccacactgtggatagcccattctagcccctctctagctaggctgtcttcatagggcaggtgccaagacagtaggctcagtagagcccatggctctgcttctaatcatcatgcctggaatgtcttgcttaaatagaaccaaggctattggttatattggaaaagaccagcagggctcttcccaacatccattcaactggggagtgaccaagggaggtaggaggcactatttgcataagatatgaatggtgcacaatggggaagccaagagtttccacatatatccattcaaagtacctagtgaggtgggaatgggtctgggtaggaataggtcaagcttcagtctagtcgccagagatttgtgttcagaattctaaatttaaacaggactcttcaggtcatttttttccctttggcttctttcaaaattgtctttgatttactgaagttgaatattatattgtaaccgaaaatcaagttagttgcttaccacatgtagagtccaattaacaagagtggggtctggtacaagaaaagtggatttattccaaagctagcttggggaagggacacaaaatttcttgcttttaactgtgccgtttcacctttggagctgaagtggcaaaaaaaaaaaaaaaaaagtaagcattttcatatggtaggggaggaaatgagcaagggcaggggtccccttgctaccgggcagttatctactgcacagttgaggtagcacttacatggacagaagtagattgaaaaagtgaccaaaaagggcatgttttcaatatgctctccaggtggaagaaagttccaagaccactcctggagagtggaagttccgaggccacgccctagagatgaaagttccctggcaatttggtctgcaaattgactgtcagctctggaggagagctgtgtcttgaagcacgtagttaggagaatttttcctatagcgaatgtctggtgaggggaggaggtgaaacgttgtatttgcatttctgaagggctaagttggaaatgaggagcaagaggaaaaggggaaaggggaaaagaagagaaagctttaaaaaatagtaattcgtctcagaaaacaaaaaatagtacttcattcccgttttcttaaaaaactggggtcatttggttacaacatgtcaggttgtaacttttttttttatttattcttggcattctctgggcttcctatatctgtggtttgaggtttattattaattttaagaaattctcagtaattattgctttaaatattttttctaatttttttctttcccctccctccctcccttcattcctccctcccttgctacctccctcccttccttgctttttctttcttcctttctttctcttttttcttttttttctctttctctctttctctatttctttctttcttccttccagtatgtttctttacatgtatatcacaccttgtgattttttttattacatgtatattacagcttttataattgtcctacagttcttagatatttcattctttgtgtgtgtgtgtgtgtgtgtgtgtgtgtgtgtgtgtgtgtttgtgtgacagagtcttgcttttgtcggccagcctggagtgcaatggcagtatctcagctcactgcaacctcagcctcctggatttaagcgattctcctgccgcaaccccctgagtagctgggattacaggggcacatagctacgcccggctaatttttttgtatttttagaagagacggggcttcaccatgttgaccaggctggtcatgaactcctgacctcacgtgatccgcccgcctcggccttccaaagtgctgggattacaggcgtgagccaccatgcccagcccattctgtctttttagttcttttttctgtcttggcaattcagttttagaaatttctatagccattttatcaagctcactgattttttcttggtcatgtctagtctactgatgcatcaaaggcattctttatttctattatagtatttttatttccagcaccccagcctcgccatctaggggtgtagtttctccctggacaatataattcatgcttatgggtaaactaccactcactaacatttgtgtcccacaaataatttgatctttctgagtctcagtttgctcattttgaaaaagagataataaacagtattatatgaatttttgggaagttgattgaataaaataatttttttcttttttgtccactacaaagtcaactccataaaggcagggccttttgtctgttttattcactgctgtatccccagtacttaaaataggtgcatggtaaataatcagcacttaatcaatatttgtcaaatgaatgcaagtcttctggaagactgatgagcactatatactttctgtcccagcagagaattcctcacagtcaaattattcatataaaaaactcatagaaacaatttgtcaaactcttatagaactccaataatccctgaagcctgggctgtatctcaggaacatagctgaggctaagctgtcaaaactgggtgataatagcaaagacatggagtcaacctaaatgcccatcaatgatagactggataaacaaaatatggtacatatacaccattgaatactatgcagccataaaaagaaggagatcgtgtcctttgcagggaaatggatggagctgggggccattctccttagcaaactaacacagtaacagaaaactaaataccgcatgttctcatttgtaagtgggagctaaatgatgagaacacgtgaacacgtagaggggaacaacacacactgaggggaacaccttctaccactgggtagagggtgggaagagggagaggatcaggaaaaataactaatggatactaggcttaatacctgggtgatgaaataatctgtacaataaacccatatgacacaagtttacctatataaataaactgcacttgtatccctgaacttaaacattaaaaacaaaacaaaacaaaacaactgggcaattgtcaagccctgtgcaggctcagctgtgccatcctcttatggtggaacacatgaggaatttgaaaagatgagggcctgagggcagggaggtccagctgtcaggagtggagggagcagaggataggagatcaggaaagggcataggccttatcccatttctagtagggaggggtccctgtggataaaaggaggactgaaaaacacaagtcttgttgaaaagtttcaaaaaagaaagaggaggtccagtttctcagactgatacattgaaaaatgccattctgggaaagagatccactacaaacagagacttccaattctaacttaccctgctttgataggtgcttgtggctgtgccgtatgtcttctctggttcgttctgttttatgatgaccccaaagaccacccatgtataagcatcagtgaaaaggaatacatcacatcctccctggtccagcaggtagaacacagttctccatattggcatctcccagattctactccaaactaaacatgttccagtttgttctaatgtgctaattcttaatgaatttctctccaggtcagttcaagtagacaatctctgcctatcaaggctatacttaagtcgcttccagtctgggctatttccactggtagttttacgtttttctggtcacataacatcatgacactatacactccaatgtttatcaactccatgcttcatgttaatataaaagaggtaagtatactatttgttcttttttttaacttcacgaaagactctgtgtacatttgtctgtctctaacgaccctagtcgcagctcttgccagctcctcacactatctggctactgctcttcacctggaaactaactgtttctgctctttctatgaacattgcccaaaacagaaggcattgatgtagacataagtgtctggcactccagcaacagcacacatgcatctatatttccgcacatttgccatctcccattgactatgtgactccctttgtatattacttaaggctcaacaccaccattccctgcagggactgggggcctcctatgaaagtcacttagccaggccctgtcactctgccaagcttttaccaatcctctccaaagtaaggcaatgagtctgggctatgaagccaagactcaagtcttactttggaaggactggcatacccattgctcatctggcttggagaatcactgatacgggcaaactcctattgttcaataccataataaccagacaagacaagactcctttagaaatggagtctgtctgggcttaccactttgccgcattctgtaatgagcttccagtaaaccagcctaggggctggcataccagtaaggtcttataaactctctctgactcaattttatacttcatgaaaccctgaagttgctgcaaggactggtagcagctggtccagtgtaagcaccatacgcatgtctgtaattgtcatctttatcctatcattttccccagggccggtatttcctattcccaatgtagtcttcctcctctattatccagtgcttttacgtttcatgatactgaaattggaagatttgacagattatgacaaatattactgacctcaaagctatttttctctttcttttgggtaatgtggtcccagcagtaattctgttgttgtatgttgatgatttcctatatgaaagtacacattttagataataaattttagcatagggattactctgtgtgtcagtactgctttacccatcaaactcactccaagaataatgtttcctcttcagaatgggttcttgtcttcccttccctatttgtttgcctggatctgtggtaacctagcaggtcagttatcagacttcttcctgaccaggaatattctcagcgtaattgctgtccggaaactcttcacagcagcaggtaagcaacagccagaacatttaagcacttgggagatacttctcccctatctttaggatgcacctgactatgttgtctgaatcactccccaggatttctccttcctgcaatctttggtgtctgcctgccttacctgagttccaccttctacagcattgtcattttcctaatacttgctggtgcaacaggcagcttttgcttgggtggagtgtttataaatggcttggatattgctcccaggtaggatttgtttatacgcttttttttaacctttaacaaataaatattgtatatatttattgtgcacaacatgatgatttaaaatatggatactttgtggaatggctaaaatcgagcaaagtaacatatgcattacctcacacacttagcatttttgtgtgtgtgggaacacaaaatttactcttaggaattttcaagaatataatacattgttttatactgtagtcactgtgttatacaatagatctcttaagcttattcctcatatataaataaaatttggtatcttttggctaacatctcactcccagtgcctggtaatcactattctactctaattctaagtccaattttgtaagattccacatgtaagtgagatcatgcagtgtttgtctttctgtgtctgacttatttcacttaatgtcctccaggttcattcaagttgtcacaaatgacttgatttccttcatttttaggctcaatagtatcccattgtgtatatataccacatgtttgttatgccattcatctgctgatggacacttaggttgatcctatgtcttggctattgtgaataatgctgcaatgaacgtggtagtgcagatatctcttttgacattctcacttcatttcctttggatagacacccaggagtggaattgctggatcatatagtggttatacttttaattttttgaggaacatccatactgttttccgtaacagctgtactaatttacattcccaccaatggtatgcaaaagttccccttttttccacatccccatcaacacttaccttttgtatttttgataacagacactctaacaggtgtagggggatatctcattgtggttttaatttgaatttccctgatgattagtggtgttgggcattgttttcatatacctgttgatagtatatctttttttgagaaatgtctattcaggtcctttgcccattttttaattgggttgttttcttgttattgagtttgagttccttgtattctttggatattaaccgcttattatatgtatagtctacagatattttctcctattcttcaggttgcctcttcagtctgttgattgtttcttttcctgtgcagaagctgtttagtttgatataatcccatttgtctgtctttgctttcattgcgtgtgcttttgtgatcctaaccaaaaaaatcattgcccaggtcaaagtcatagagcttgtcccctgttttcttctagtagttttacagtttcaggtcttatgtttaagtctttaatccattttgagttgatttttatataaggcacgcgatgagtgtaattccattcttctgcatgtggatacccagttgtcccaacagcatttattgaagacaccatccttccctcatgttgtgttcttggcacctctgtcaaaaatcaattcaccctaaatgttggatttatttctggactctctattctgctccattggtctatgtatctattttcattctagtatcatgttatttttattattaaaactttgaagtatattttgaagtcagatagtgtgctgcctccagttttgttattttggtttaagattactttggttatttgggaccttttgtacttccatagaaattgtaagatgtttttctatttctgcgaaacatgtcatgggaattttgataaggattgcattgaatctttagattgctttggatcgtacagacattttaacaacattaattcttcctatccataagcacaggatatctttacatttgtttgtgtcttcttcaatatcttccaccaacattttagttttcattgtggtctttcacctattcagttaaatttattttaagaatttttttcttgtaactattatatatgggattgtttcattgattttgtgtgtgtgtgtgtggatagttcactgtaactagggagagtttttaaaaatctttttctttcttaaatccaagctctcaaaagcgttgctaaaagttgcttgcttttgtataaatttaaggcatgcaaatacagttttgttaagtgaatatattatgtagtggtgaagtttgggtttttagggtaaccattacctgaataatatacatcatacctattaagtaattttttaaccctcaccctcctcccactcttccaagtctctaatgtctgttattctacactctgtccatgtgtatacattatttagttcttactttataactgagaacttgcagtatttggttttctgtttctgagttgtttcacttaagacaagggcctttatttccatccatgttgctgaaaaagacatgatttcattcttttttatggcagagtagtattccattgtgcatatgaacctcattttcctcatccaatcatctgttgatggacacttaggctgatgtctttgctactgtgaatagtgttgcaataaacacatgagtgcagatatcttttttgatacaataatatcttttcctttgagtagacacccagtaacagaattgcaggatctaatggtagttctatttgtggttctttgagaaatctctatactgttttccatagaggttgtactaatttacatttccactaacagtgtataagcattgctttttctgtgcaacctcatcaacatctgttggtttttgactttaataataatcattctgactggtacaagatgttatctcatcgtggttttaatttgcactactctgaggattagtgatgttgaaagttttttcatatgcttattgtccatttgtatgtcttcttttgaaaatgtctatttatgtcttttttccacttttttaatgtggttatttatattttgttgttgttaagttggagttccttgttaactctgaatttttttaaaaaaaattcttcttttttcaatagcttttggaatacaagtggtttttaattacatggatgaattgacagtggtgatgtctaagattttagtgcatccatcaggggaatagtgtacattgtacccaataggtggttttttttatcccttgcccgtcctcccattttctcccctctcagtctccatagttcattatatcactctgtatgcctttgtatacccatagcttagctcccacttataagtgaaaaacatatggcatttggtggcaaacataagaaaaaatgctccacatcactaataatcagggaaacgcatatcataagcacaatgtgataccaccttactcctgcaagaatggccataattaaaaaacaaaataataatagatgttggcatgggtgtggtgaaaagggaacacctttacactgttggtgggaatgtaaacgagtacaaccactatggaagacagtgtggagattccttaaagaactagaagtagaataccatttgacccagcaatcccactactgggtatctacccagaggaaaagaagtcattatatgaaaaagacacttgcacatgcatgtttatagcagcacaattcgcaattgcaaaaatatggaaccagcctaaatgcccatcaaacagtaagtagataaagaaaatgtggtgatatatatattatggaatactactcagccataaaaagaaacaaaataatgccattcacagtaacctggatgaagttggagaccattattctaagcaaagtaacttgtaactcaggaatggaaaatcaaacattctatgttctcacttataactggggagctaaacaatgaggacataggtataaaaataacataatggactctacggactcagggaaaagggtgggaggggagtgagggttaaaatactacacattgggtgcaatgtgcactgctcagatgatgggtgcaccaaaatctcaaatatcctcactaaagaatgtatccctgtaaccaaataccacctgttcccccaaaattattgaaataataattttaaaaaacatacggcatttggttttccattcctgagttacttcacttagaataatggtctcccgcttcatccaagttactgcaaaagatgttatttccttctttttaatggctgagtggtattcaattgtgtatatataccgcattttctttatacacgcatcagttgatgggcactgaggttggtttcatatctttgcaactgtgaattgtgctgcagtaaatatacatgtgcaggtgttttgtctgtttgtttttacaatgatttattttcctttgggtagatacccagtagtggaatttctggatcgaatggtagatctactttcaattcttttggaaatctccatactgttttccatagaagttgtagtaatttacattcccatcagcagtgtattaagcaatctctttttaccacatccacatcaatgtctattgttttttaactttttaataatggccattcttccaggagtaaggtagtatctcactatggttttaatttgcatttcactgataattagtaatattgagcattttttcttatgtttattggccatttgtatattttcttttttgataaatgtctattcatgccaattgcccactttttgatgagattatgtttttcctgctgatttgtttgagttccttgtagattgtggatattagttctttgtcaatgcatagtttgcaattcttttcacccattctgtgggttatctgtttactctgataattatttcttttgctgtacaggatctttttagtttaattaggtcccattaatttatttttgtttcttttgcatttgtttttggggtcttaatcatgaattctttgcctaggccaatgtccagaagagtttttcctaggttttgacttcctgttttccagtttgaatgctctttatttccttattttgcctaattgctctggctaggaattccagtaaaatgttaaccagaagtggtgaaagtgggcatccttgtcttgttccagttgtcaggaggaatgctttcaacttttccctatttcgtatgatgttggttgtgtttgctatatgtgacttttattattttgaggtaagtcccttctatgcttaatttgttaaggatatttattacaaaggatgctggattttatcaaatgcattttctgtatctgttgaaatgatcatatgggttttatttttaactctttatgttatatatcacatttattgacttgcatatgttaaaccatgcttgcatccctaggatgatacccacttaatcatggtgtattattctatctatttgatgcactgctggatttggttagctagaattttgtggaggatttttcatctatgttcatcagggatattgatctatacttttctttttctgttatagccttttctgattttggtatcagggtgatactggcttcatagaatgagttaaggaggattccctcttcctcaatcttttggaatagtttcagtaggattggcaccaattctttgattgtctggtagaatttagctgtgaatctgtctggccctgggctttgttgttgttgttgttgttggcaattttttaaaattactgatttaatctcactgcttgttattactctgttcagggtttctattttttcctaatttaatctagaagggttgtatgtttccaggaatttgtccatttcctctagcttttctagtttatgtgcatagaggtgttcatagtagtctctaatggtcttttgtatttctgtagtattagttacaatgtctccaatttcatttctaattgtgttttatttgaatcttctctcctctttttttggttaatctagctaatcatctaatttatctcttcaaagagccaggcttttgtttcattgatcttttgtactgtgattctttcaatttcatctagttctactctgatctttgttatttcctttcttcttctagctttgggtttagtttgttctttttttcctctagttccttgaggtgtgacattaggttgtcaatttgtgatctttcagactttttgatataggcacttagtactataaactttcctcttagcattgcttttgctgtatcccagatgttttggtaacttgtgtcactatttatttcaatcttgatttcattgttaacccaaaacccattctggagcagattaatttccatgtatttggatagttttcatggttccttttgtagttgatttctagttttattccattgtggtctgagaagatacttgatataatttttaaatataagatacttgatcaattttaaaaaatttgttgagacttttttgtggcctatcatacggtgtatcttggataatgtttcatgtgctgataagaggaccgtatattctgcagttcttgggtagaatgttctgtaaatatgttagatccatttgttctaaagtgtagtttaagtttattgtttctttgttgactttctgtctggatgatctgtctactgctgtcagtggagtgttgaagccttccactgttattgtgttgctgtctatctcatttcttaggtctagtagtaaatgtgtaaataaatcttggagctccaatgttaggtccacataaatttagtattgtaatatcttcttgtttgattgatgttttaatcataatataatgacctcctttgtctttttttactgttgtggctttcaactctgttttatgatataagaatagctactcctgctcacttttggtttccatttgtgtgtaagatatttttctacccttttaccttgagtttatatgaatccttatgagttaggtgagtctctttaagacagcaaatatttgttttgtgattttttttattaattctgccattttgtatcttttaagtggagcatttagaccattcactttccatatgaatattgagatgtcaggtactattccagtcatcatgttacctactttgttttcttcattgtgttattgttttataggccttgtgggttttatgctgtaaagagattctattctggtgcagatcagcttttgtttcagaatttagaactccttttagcatttcttgtagggatagtctgctagagacaaatcccctcatcatttgtttctgaaaatgactttatttctccttcatttatgaaacttaagtttcactggatacaaaattcttggctgacagttgttttctgtttaaggaagcttagataagacctcaatcccttctggcttgtaaggtttctgctgagaattctggatagttaagctacattgttgttcatagccaccaggccaaaagttctgaagaaatatctatataagtcagatataatcattaattaatgatatgttaatcattaatgatattaatcattaacgatatattcagatgtatgcatctgtcatatacgtatgtgaaaagtatatccttatgattagaagcacagattctagagttagacagttgaatttcaatatcagcacagccatttatatcaaacaaattatttaccttctctctgatgatttttttcacacataaaatggattaataagagaacgtttactcatagagtaattaagataattgaataagttaatgtaggtcaagtatatagaatagtacctggcatactctggcaagcactgtgtaagggttagctgctccataattattgctattatgtccatattcatatattattaattctcataacaacctaccagttaatcatatttaccttacaactaaagaaactgaggttcagatacttaattttgagctcaaaatctcaccactggtctgaaattttacctaggattttaatccagacctgtttggcaaaaaacttgctcttttcaagatgttattttcaagatattatatctcctctagagatataataagtgtgactaacagaagtagctctgtcattttcaactctcagggaacactgttcacattgtaccttgtggggttagtactctctggagaacataaatccaatatgaacagaattttctgaagttttgtagagcagtggccttggggtagacaggcaaaatcaaccaagaataactcactttcttacaattttataaagaagcttgcccactagatctacacaaactcagtgctagagaaatgaggacatgtatttatttgatttattcagttcaagacctatcttaaaaatgcctgcggggccgggcgtggtggctcacgcctgtaatcccagcactttgggaggttgaggcaggcggatcatgaggtcagaccatcctggctaatacagtgaaaccccgtctctactaaaaatacaaaaaattagctgggcatggtggtgggcgcctgtagtcccagctactcggaaggctgaggcaggagaatggcgtgaacctgggaggtggagcttgcagtgagccgagatggggccactgcactccagcctgggcgacagagcaaggctgcgtctcaaaaaaaaaaaaaaaaaaaaaaaaaaaaagaagaagatagtcgttaaaacgtcataaataaataataaataataggataaatacaaagaaaatcacacctaaacctatctagtgaaactgctaaaattgaatgggaggaggtgacagaaagagagagagagactgagagagaacaaaatctttaaaacagccacctagaaaaggctcattacttccaaaaaagcaataatagaattgacatctgccttcttaacagaaacaatgaaagccagagccaatcaattgatatctctaaaatgcaaaaaggaaaattactgttaacctagaagtctatatccagcaaaaactttccttgaagaactaagttaaaataacatttcgaggcaaactgagagaattcagcagccatagacctccaatgaaaggattactaaatgagaattcttcaggcagaaatgaaataattacagataaataatcacagaataataatttcatataaataatcacagaaatataggaacaaaagaagagaaatggagaggaaaaatattagggcaaatctaatataattgaatttgcaaaatgaaaacaataataccctatgtgatatagaatatatgtaaattaaaatgcactaataatttaataatcatatttctaccagttgtacagaagatatggtacctatggcctacaatatttttaggaactcatgaaaatcttttccaaattggaagataaaaaacaaactcgtaggtggaagaaaatgatttaatgtataatgttaatgtatttgcctttatgccagagcagtcataaaatataatttttaatatttttatgggggaagaggttcatgaaagcaaaagtggaaagggctcacaaaagtcatgagtggtcccaattcccacctaaactccaggggttctattgctgaaatgaaaaacagaacaacaaatagtggggacaattaatagtttccattccaagctctacctgtggatgttcataaccataaatgtacttcttcatccattacaacacactccctagatcgtcaaaaagagacaactctaatcctacccaatgactgcatatagcttaacgttcaaggactctaggtcttgatgtgactcctctatgaacagggacccacaaattaataaacaaaacaggcacctcctcccatactcaacatgtaaaggcagagtaggaatgggaaagactagggaaataagaagatcagaaaaaaagaaacaagaaactctgaactctgcctctcataaaagggaggacttgaacacactgaactttaatgatgaaatctacagggcaggaaaaacggactcccagccctggagtgaactcatttcttgattagacactgattctgctctccaaacagcaccaccttgctcttcatggctgatgggtttgacccctttatctatcgttcgctgcagcttcactgcgtttgtagctaattttctgctggaattggtttgagcttccaggattggccaattatagttgcttgtaaactaggcttctgatttccttgcctgagtattggaagcaattttggaggtcagtagctctggacctatgggagtaaaccaggtgaacaaagcccttcaattttttattaaccccaaaccagttcccattaccaaaacatatcaccttctgaatttctcaatggaacttacatattttctaattctactgggtttcactctaaatataatcccattttattaatatcatcatattctttactgctaacgccaacctttctgactctgtggtgacactagaaagttgcctatattcatatactttttctaacatcttaatggaatttgagaagcaggaacttgcaaaatgagcaattatctctcttaaatttcatttgattaggtttgcatttcctgcagtatttgtactactttacatttgtgtattactcttttatgcatagatattttggatttattaaagcatgttcaactttaactggaatgataggaggactaattgcttccactttgactggattgatccttaagcaggtaagaaacatacagatgtgtagttatttttccaatattaattgtatagagaaagattacacatatgaaaaattgcagagaagatgccagaaggagatgacttatgagtttttgcatcatatgaaaataaatttggtcaaatcaggcatctctccaaatctacaaataatgcaatttctatctcattatttgtcaattagatatgttgagaactctttagtaattgcccattggtacagaagtggacttctgttatttttgataatgaatatgtggattgatcaacacaggtatttgactggctgagtggtaatataagtaacaagatacagttttctcaaaaaaagaatgaaaaatcacaagtgaataaagactgatctaagtctgactatgaaggcagacttctgtttttgcacatgtcatggacaaagttacctgaaatcttccttttaaggacactgaaaatgccctatcaaattttaacagttattttaaatgcatgcctcatctgcaaaaaaagtaaagcaaaagaacatttcagagattaaaaatgaaagaatagcctgattccagagaggtaaatgaccattgaagacactggctgccttgggtctttgcctatcctgggtaatctatgtcttcagttataatgaacaagcagaagataagagataacatcctaaagccactcaaataagaagagtcagaatggaaatgctggcataaatctgtactcacaaaggactacaccttcataccactagcaccatgtggatcacatataaactttatttgtaggaacacttacaaccaaaggaatggtagtgtgtagataattcctccaaatgctccttatcccaaagttgggacagggagagatggtctgcatccaccatggccacatttcccataaagaggagtcttccaccaccacaatctctgtatttatggtttcagaaaagaagaaaacatcactagaaccacagaagctccctggtcagagaaatggcctcattagaaatgggaagcaccaggtggccatggtctgtttcctccctctgagcatagtgcctttattcttccattgagttcactcaggtgtgcagagctgacttccaaaagttgttagtggagctagtttctctgcaaacatccaagatgtggaaggaaatgtggttccagaactgtccaaaattgtctctgcctataagttaacttagacagttctcatctgcccctgcctcagctttaaaaggagagaaaaactgaatactcttctgagcatttgaaatttgagtaaatcaaatatttggtgaccagaagtcaagcctgggaagtcaattattgcagctgcaataacttttctggttctcctctgatagctatttcaactcgagcatacatctgaagaacaatgtttaatgagtaatatagttaacttctataaaccagcagaagaaaactcattctcttcaaaacgaatccaaaacttaaaaaaaaaaggattgcaatggaaaatatgaaataatatgggagtaataaatcttaacaaaataatagttacaatagatgaaagtatgttaaatttgccaattaaaatatgaagacactctttatctatataagcttacaggatacaataatatgtcagctacataagataccttgaaaagatgcagaaaacttcaaaataatagatcagattaaaaaaatcagttaattatgaactataagaaactagtaaacttaatatctgatgaaaatagaattttaaacaacatgtatatagtagaaagataaaagtgattattttataaagtaaaatgatgacgttttcggctatgtataagtatgtttttccatatttgttacgtgacttgagtctacatttttaatattacattttaaacattacaaaacaaaaaaacaagagcaataatttacaattactttgaattttaattccttaggatccggaatccgcctggtttaaaaccttcatcctgatggcagccattaatgtgactggcctaattttctaccttatagttgctacagcagaaattcaggactgggctaaagaaaaacaacacacacgtctctgaaggtgagaagtgatcagattaaggacaatttttgaaactgggaatgcaggagacagaggagataaggatgactcctcagacgagaaggaataacgggtgcaggtttggagaagaggagaccatgttaagcctgagaatattagacatcctgaaatggctgtgggactctgtggggatgctaaggctggagatataaatttgggaggctgggcctctttaacatcaaaagatgaggatgaaaaagagaagtttgcaaaaaagactgggaagggccttcaacgaagtaggaagaacagttgtaaaatggagactcgaagtgaaaaaggttgggagcaaggacctttggcaagtgctataatatcaagacattacattatataaggtctaagaatttacaatggtttaggcaagagaaactttaaaggtaaccctgactaaaatgattttcaaatgaatgatggagacaaagagtcctttaaggtgtgttcaaggtataatactgtgctttgcttatgtaaactctatcagtggtaaatgaattggaggagaaatgtctctttgtagaataattttggctaatacataaataagaattgaaagatgcagaatgtccttattttgcaaccctcaataaattaagagatccaggtgttgaatatcaatgatcattagtatcacaaaaagagaggcatgaagacattgtataccttctgatgaaacaacacaccaccactaatatcttgctaagaaaatcaaactgaatctcatcaaaccttggatacagctaccgctttggaagaagtacagaaaacagagaatatgttcgacaaaatccaagtgtatcattagcaaatctaaactgtaggagattttataggtcaaaaggctcagggtctttaataaataaattacttataaagaaaaatagggaggacgaggcgggtggatcatgaggtcaggagttcaagaccagcctggccaagatggtgaaaccccggctctactaaacatacaaaaattagccaggcgcggtggtgggcacctgtaatcccagttatttaggaggctgaggcaggagaatctcttgaactcaggaggcagaggttgcattgagccgagatcactgcactttagcctgggtgacagagcaagactccatctcaaaaaaaaaaaactggggtagaaatggatgctctagattagaaagaacttaaatgacataacagatttttaaatattggcaaaatgaaacactataaaggtatacatgtgggtgataagtctataaagaaatacagaaaaatagattattattataaatgtcaaagaagttgttacttttaggggcagggagtgaccatttgaagaactttgggaatcctggcaatattctatttttcatgtccaggctagtgattacaaacatttatcctataataattcattgagccaaatatttgtgcaattttctgtgtctctgtgttttattttatagtatgaaaagagaaatcaagagagagagaatacaggctgaggaaactgagacagccaggataggcattcctataaagcaaattagagaaatggtgtggtagctgtaaagggatgtaaaaccaaggagggttttgtttgtttgttttttgtttgtttcagaagatacatgcaatagcatataaggtgatggtataattcaataatgaggttccacaatgtaggagataaggcacaatgacagaattaaaaagtacttgactcatctggaagggatgaaattcaagcaccacagccagggttggccttgggtagaaacctagagcttatccacagtggcagagagaaggcagtgttgtatatgtgatgggttagtatataggttggcatctcatctgtgcgataagcaatgaggttctcagttaagagagaggggctgagagacaaggaaatgaagaaaatacatattggtaaagaaggtaaaattatcattatgagcagatgatatggttgtctacttagaaaatccaagtgggttgactggaaaactatacaaacaataattaattcagtaagtttcctggaaaatttattaataaataaatttgtcaccttaaacaaaaatagccagttaacaaatttattggaagaaatgatccaaatgaagtttgaagaaaaatttttttaaaaaataggatctcactctgttgcccaggctggagtacagtagcacaatcataacttactgcagtctcaatcccctgggctcaagtaatcctcgtgcctcagcctcctgggtagctgggactataggcatgcaacactacacccagctaaaggaggaaaattgatagcgtcactcaaaaatgaaattgagtcggtattaaatcgatctagtattgcaagtactaaaaattcccataatggtgtactcacaaaaatttgccaagatgcaagcataactcaagattgttgatttagaaatggcaaaaatctggatatggaattaagcatgtttgtcaatacagccttagttaatacattttgtttaagtgagtggaatataaccagcagtttaaaaatacaaaagcttatctgaatattttaatgtagaaatatctgagattgtccttataaataagcatataacagcactagaaaatatcccatagacattagcgaaggtttatcctctatttccaaggcacagagtggggcacagctatgagaacaatcactttactttattcagattccataaatcttatttgttttgtatatatttgacctgttaaatattgaaagttataccaaagttttccattattatttctatccatttttctttttatgtctgctttggcatttactattgaatactatattctgatgttacaatttcaaaaagactttgacaagtatatcttaatttgaaatttacttttgactttataaacttatgaatccttcccattccataatttttacttttaatttactttctgatattgatatgacaaccttaaattgtgggtgtgggtgtgggtgtgtgcttattttagattccctggaatacttttgcattgcctttaaattccaccttactgagccattttatttaatgtttttcttgcagagggcatatagctgggttcaattatttcacccactttgagagccgtctcctttatatagatgacttcaatccaactgcagttattgtcattaaaaatatacttcattttctagcatcttattttctattcccttaaaaaaaatcctccttatctttttggtccttctcctcctcctgcctccttgcctgactctagcaatttagatttgtagaatattttaaattttgattgtgcttatgctctctaactcttctttgaaaatgtgttcattttttctatttacatgctatattctttttctgctttttttctccttccaaaatatcaatcacattcaatgtttctaattatttttctttagttcaggctaattctacgtaaacctgtaattccccaaagatgatgtgggtagaatttcctccattctcctttgtttacctggttgcccttggcatctttccatcaggctggcagtggaggttttaaattctcattttagatattaggctaagtggcagaggggctctgggaacaccagtatggatagtgccatagtgcaggaggtattctgggccttgctgtttgtgttgctgtgctgatggttgtttcttcaacaacctgtatcctcagggctgtcagccattcagcagcacacaggcattttatttgtggaatcagcagtattttacctgtcactctcaaactgacacactgctgcaaagcgggttaccttacaactttgccttgtaattttagaagttagaagaaaataagaaaaggcagaatcatggccttgcgtttctcctgtagcctagaagccattgccaatatgcctggcataccaggattgcaaaagtccattgtttcccagatgccctgcctcctacccagcctcacccaggaagaagttgcttcgcagccctggaactgctttttccacctctcttcccttcgaatgtaccgggttcatgagtttagtagacagctgtgagttgatgtccaatgtcaccctttattttggccctcagtgttttgaacttattatagtaaatagtccttgttgatttgggtatgaggtagttctctaggttttgtaatgttctatttttgcttctttaaatttatttcagtggatcctagggacaatagctgaataaggggcatgcattgtgcttgtggtagttcctttacagtggggcttctcaatctcttgtgtaatgaaccacaactcagaatataatgcagaggattctaaaggagactgattatgttgaaatagttatcaagatactaaaaagtatgtttatgataacatgatttttattaatgctttagtctgaataaaagttctctgaagagaaatttataggaaagaggctatcctagtgaacagtttgtgaactaaggagaggcagatttaaggtgcagtctaaagagcaaaaggagagttcactgtttatagagaaagttccctcccaggttcccactcaggtccacttatgcaaatgcatgattcagatttgcttagttctgagaggttgacacttgctgaattttgattggtcaactcaggctgcagtctatttgttggttcaggcacataaacaggaacaagcagctatgaacttcccaaaattaagaaggtgtgtgggttttatggaaactcaaagtgcgtgtgtgacctccagtcgcaaatgactgcttggctctattttgattttaagcccagttagccaatcagcatccaacttgaaggatttgttctttcatagttcacaattgtaatgtcataggaaaatacctgtgatttttattgatatctaagtcctcagtactaccactgctatgatgtattacctacattcataatggaaggaaatgttaaattttagtcagatgttaaggaataaagatgtaatttttttctatgtaaattcacagaccctggattaagaatccctgctatctaatattcattcagacagtaaataaacatatttaagcacttttgtaggtgctgggatagagcagtgagcaacatcatcaggacttcagtgcctaaaagagcttcacattttgatagggggaaacaaatagctatatttaaacaggataattccaggcaccgatatactaaaaagaacatgaaatagggtaacacgatggagcatgttcaagagggctgtttttgctggaggtcagtgagtattccgaggataaaaaataatgtgcctctctttctcatcactgaagtctcaacacaaatgtcacctactgggcaaaatttgttctcacttgcacccagctctcactgttctatcccagcacctataaaagtgcttaaatgtatttctttactgtctgaatgaatatcagaaagcagggattcttaatctagggtctgtgaatttacatactctgggaaagagtattccaagcataaaaaataaccaaggaaagtaatctgggatgggagtgagctcagtattcctaagagggagaatgaagggcagggtggttcaatctcataagtaaagagagataaactgtgtaagtggttaaggttaagtgattaatgtagtgcttccaggtcatggcaaaagcttggtttgcatccaattctgtctataatcaaatccattggatactttcgagaagagtgactttcctgatcaatgatttataaagatcatttttgccaccttctagaggaaggactttaggaaaacaagagtagaggcagggagaccaggacagatgctgtttcagaggttcaagtgagagatgttggcagtgcagactaggatgtaggcaggggagagggtgagaagcagccagattcagatgagttctggaggtacagcaggccagacaaggcagggagattgtgaactatgcagaaagagaagaaacaaggataggacctagattttggctttagcaactaaagagtgtttattacgagattggaaagcttgacaaggaggaggatggggtaggattttgtccacattaaattgaaacgtttcagagatcaaaaggaaggctctggttttatagcaaaggttcctgctcaggtcctcattcagttcctttatgcaaatgaaggatgttgggtcagcatgatcctgatgggggtcttttgcagacagttgttaaaacaggctagaacaattttaaagggagtcaaatgtatagcccaaatatgtggaagacttgtagactggtctggaactcctaacctcaagtgattcgcctgccttggcctaccaaagtgctgggattacaggcgtgagccaccgtgtgaagccccacctaggtttttaatcaggttcatttatgtaaataaaaaatggaaacacgtttagttgtgattggtgagtgtagttgatttctcattggctggcaaaaatgagttctggttggtcaatacagctgaaccctgattgattgactgaggctgctgagctctgattggttggttcaggtgaatgctggaagtcccaaatataaaaggatgcagattttcagggaactgagagtatgtgtgtgactcctacctggtcagaaaattgcttcttggctctattttaaacttaggcccagttagccacctgggatccatcttgaagaattggcttgaaggattcacatttgttcactatgtaaatagatttaggtgaatgtgtttgggtctgtaaagagaaatggactctacagctctattccttgaaggcagagacagagaatgaagccacgtaagtagtaggaaatgttcccgccacctttgcacctgcaaatggactcggtcacttcacaggcctatttctccttcagacatcgtcacagccacatgggcaatgggcaggaaagaatttcaggactgtgatagtattttaacctcctgtaggcctttaaaattttctgtgttaaccacttaaagcattcagcagctttggagtcatccagaaggtgtgagctcacgcagagccaaaaaggagagaaagaagagtgtttccttctagacaattcatagtcttttgttcatctgtagacgtttattgcatggcttaagtgaagatttgggttcattttcctagtgtttgaattttaccaccattgttttttaaaaaataatttgcgttttcctctctgacttaaaataccaacttttagtaaaaggaatctctgtatatttatgtctatttctgggcttaatatttagttttagtttaatatctattactagacctattttacaacatattcagtggtctaaattttaatatttgtaaatatcaggcaggtcaaaaaaaacatcattttcacttttgaaaatattattttctagtatcagctgtttattcttccaggaaagtttataatcagtggaccttatttaaaaagacctgtagcagtgtttttagagttgcactgaattgcaataaatccaatggggagaaattggtagttataacagtactcaatgtcaatattcaatatcaatagtactcaataatactgatataagaacatgataagacttccattgctgaacttggcttcaggttttcctcagtcaagtattagtttgcttcctgcatttcctatgcatttcttacaaaacttaaggttgttatcttatattttctgaatctgatttttattcattgtattttcaggaatattggaaagatatcatttgaatatatttaattttttaactgaaaaaactattgctaagctatcttgttggtttcgttttgaataatagattcttgtgttttcgggtagatgatcctcatcatttgcaaataataacaataataatgggctaatattgggattcctttattctttatggctttaattgcacagcctctaggcatattcttaaacaataaattggctgttaatttaaaataggcatttaattatgtcaatgaattgtctttttgttcttttttagattgaaaatcaaaaaccaagaatagaaattgagttttgttaaatgtgtttgtagcttctattcagatgattgcatatttttctttgttgtgatttattaataaaatatacttttaatattaaaatcagacttccattcctgatattaaaactttttagatcaaagaaagttaatattacaaggaacttgggattagtttgaaggggcaatggagcatcatatttagttctgaacttcttagtatcaaaaataaaatagaaaatgcaattaaaaaataaaatagaagctctttgtctaataaaaatatatcaacaacattgctttgagggaagcaaaactttcctgggactgaattcttcgagtgaataatgttgtggacggaacataaataggggtaagagcttctccaccgtcttccagacccatggatctgggcttcattaatctattggggtattaaatcagatgtttaccaaatacccggatggagtattgttaacattataaccattgagttgaacaaagatgacttaagggatgtaatcaaaatgcaattctattttttatctcctaccttccctatttgtttaacttgaaaaaaatctcaaggtacaggaaagtttttaagagtagtacaaagagctttttttccttaaccatttgagggtaagttgctagcatgatgccctcaccatcatctccacaccactcacacactttagggtatcctgcaaacaaggacatttttctacttaaccacaaaacaaccgtcaacatcaggtaactaatgctgatacatttctaccatgtaattctgggacctcattcacatttcatcaattgtatcagtgatattcttttcggccaaaagattcacttcagaatttcatgttgcatttagttgccatgtctctttagtttctttaactctagaattgttcttagtctttccttgactttgatgacatgattagagagtgcaggctagttattttgtagaagttccccagtgtgggtttctttgatgttttcacatgattaaattcaggttagggataccacaaagatgtccctgtgttcttctcaggtcattataccggagtcatatgatgctgatatgtaccatttctggctcttcatttgattaaggtggggcctatcaggttttgcctctgcaaagttactccttctcccattgaaatcaacaggtagtttgttaatttggaactatgtaaatatttacatactttggaactatgtaaatatttacatactttggaactatgtaaatatttcatcctacatcagactttcaatttattcacttatttattttagtaaagctcataattttgttttatttagtgatttataatatattactatttttgtttactttgatgctcaatttgtctcaattttggccagttggaggttcttcatcattctttgagcactttcttactttgtggcacaaaacaaaattccagagtcatcttgagtttttccctgaccaagccctgaaatcagtcctcactctaataagctctggttcctcttaatgtttgagaattgtatttagaaaccaagatctcagtggtagatgtgttcatggcttctggggcctctgccctcaggtttgctaggtagacaaagttagggactatatgtgtatacatacatatctatctacctacctacctacctacctacctatctttctattcatatccatgaatttacaccagtacttccatccattccagtccaatacaaagtttcttcaagttttctacttttccatatttttaactttcttttccagcagtgagctcctattaggattaatgtttgtatttactttgtcaatccccttgtgtgccaccatcatcccatttccagacatccttctcattcttttcccaggcctacacccctcactctgatgcccccttgtggatgctctcctttcctgcccatgctctgattccctgacacaggccacacctcctggaccttcctcatctcttggacacggacatctttgctaagttgcacaactttgcctagaagctttcctcaacccacttcagtgggcgaggctgtcacccagctcagacaccctctgcacctggtcaggcttcagcatcctatgccaggctgtcctcctgcatgaacacaatcctcgccctgcacaggctctaacacctctcactgggccactgtggctccccacaccgtgtcctgctggagcatccccaggttagccattaagcaaaataagcttgtgtttagggcaccaagaaaagagggcaccacagagctttcccccagctgtcatgcccttaagtctttcactggtcatatgatgttagtaacattttttgtaattgtctttatttgctgtttagatttaatctaaaattttttcaaatgtgctctttggcatggtgagtgactaaagtttaaaagtttgatttgaaggtgatatcagatataacatttgtttctgtctcatgctctgagggtttttgcctccctgaaagctggctgtgtctggctagcatttaactcgtcagctgatttgtttaaggaacacttaagctctttatgttaagaaatggaagggccaagggtgttacagaaccaccagattcatattcccactactcagtaacaaactaatgcactcagcacataggttttgcagcagagaaagaatttaatgaatacagggtgaccaagcaagaagactgggcgaatcctcagagggatctccatttccagaggaaactccttttcccccaaggactcttgtgctgggatttttaagggagtcttggagggcaagggctagaaaactgaggttactgagtggtcagggtaagggggatgaagccatcaggatgtattctttggtgagccagctcactgtggggtcctgtagaccaactgacacagtagtttcacagataggcaggacctgaaagaataactcaaatagaaaacttaacgtttcacaatgcttaagttgttatctgcagagcagctaagggaaactgtaatcttttgacaaggtctacgtgattttgaggcagcaggcaacaaacaactatgagaaagcaggagagaataagctgacttcatgattagtgctggatgtgctgcaagcttggttattttcatttctccccctcccttcttctctgattaattttgtaaagtttatagggatggtttcaaggtggcaacatggttggtctgcgtttagggcatcattgttcttaatctggccctgcagtgaggcagcctaccttgcttattatttccctaccctatcccaataactttttttttttttaaagtagagatggggtttagctatgtttcccaggctggtcttgactcctgggctcaagtgatgcgtccaccttggcctcctaaagtgctggaatttcagatgtgagccactgcacctggcctccaataacttttgaacaaattcagaaaattaagtgaggatgcaaagggtttaccttttcccttcaaacctgctcagtgaagaaagaattttaaatctaggttatcccacccccactataccccacactcttatttatttatttatttatttatttatttatttccttgttaagccctcttaggtagtaaaaagtactgtggtcactttaaatagcaagcatacattcccagttagataactgaaaatatttatttaaatatggaatttagctagtcaaatgtcatacacatacaagactccttccctgtgtctccagctgggacaaagctgcaggcggaccttctccttcagggagaggggtgtgagcactttcttctgtctggcttttctcctcatccgctaggatgctgaccccacctctgacccctcctgaggtgtgaccaggagagaaaggaggggaagcaggcatggaaatttctggcttgtttggccccattgtcagttgcccacatgctccctgggccagtaggtgttgaaagcagacccttttcttcatgcataagaggctgacaaggcaggaaatgcacttggtttttccagctgcccatctccttggcatcacagatccactccacacaaatctccctttgtggatatcccttctcccttctaggtggtcccttgggcctggctatcagtcctctgtgacctgcatctaatccatgggaaacacgcatgtagcctctggtccaacaaaatggagaggtcttgtccacttcaaatgcagtggtcagtgtctttctgccttgttcctcgggtggaaaatcagagcccctcactcccagattcctcaggaaagccaacagctgacccatgggcccacccaaacacagactaggctctaagcaaccattgatataatttgtctatattgatttgcctattctgtacatttcatgtaaatgaaattacataatatgtctgtgactgacctgtttcacttgacatgttttcaaagttcactcatgtcgtagcacgtagcaatacttccttctttttttgtggcccagtagtattcgactgtatggctatgctacattttgtttatacattaatccactgaggagcatttgagttgtttacaccttttggctgctgtgaatagaccactatgtgcatttgtgtgtacaagtttttatgtgaagatatgtttcaattttgtggggtatatacctacaagtggagttgctggtcatgtggtaattctaggtttaacgttttgagggactgccaaactcttctccacagcatcagactattttacattctcaccagcaatgtagaattccaattctccatatcctcatcaacacttgttatgtttctttttttttcagtagccatctcagtgaatgtgaagtggcatctcattatggttttgatttgcttttctctaataagtaattatgttgaacatcttctcatgtgcttattggctattcttctgtttttttacagaaatatatatattcagtgtgtttgcccacattttaattatttgtcttttgatgttgggttataagagtgtattggatattctaaatactagactgataagaatcagatatgtgatttgcaaattgtttctcccgttttataggttgtctttttttactttcttgttaatgtcctttgatgcaaagtttgaagcaaagtttttgatttttatgaagtctaatttatctattttttcttttattgcttgtggctttgttgtcatatagaagtaatcaatgccaagtcaaaggtcatgaagatgtacccctaagttttcttctaagagttgtattgttttagctcttacatttaggtctttgattcattttgagatggtttttaaaaatagtgtgaggtaatagtattttgttatagcagccttagctaagacagcttctttaatttctttctacaatattttgaagttttcgaatataagtttgtactctttttgttaaacttatttataagtattttattattttttatgctacttgaaattgaattgttttcttagtttcatttttggatggctcattgcaagtgtatagaaatataattgacttttgtatattgatcttgtgtcctgcagctttgctaaactcattagttctaatatttttagtagatttcctaggatttctgtaagcaagattatatcatttgtaagatatagttttacttctgtttttccaatctagtttccttttatttatttcccttgcctaattgccctgtatagaacccctagtataatgttgagcagaagtggctagagtagacatctttgtcttgttcgtgatcttagagagaaaacacatattttaaaattcttacaaagcctttcttcatctacactctcttgaggctttaacttttatgtaacctgaactgtttcagagccgtatgactctaaaagccatatggctttttatgacatcctgaacaatatctgtaaggtatggtttggatgtttgtctcatccaaatctcatgttgaaatgtaattcctagtgttaaaagtggggcgtagtacgaggtgtttaggtcatgggggcagatccctcatgacagcttggtgctgtcctttggataatgagtgagttctcactctgagttcaggagagaatatggttgtataacagtgtgtggtacctcccatctctctctctattgcccctgctctcaccatgtgatgcactggctcccctttcaccttctgccatgattggaagattcctgagaccctcaccagaagcagatgctggcatcatgcttcttgtacagcctgcagaaccataagccaaaataaacctcttttctttataaattacccagactcagatattcctttatagcaacacatattgtctccctaggataagatgtatcatgattgcctatgtgaagagaatacatatgttcagctaacatgtggaaacatctgcagcatgtttagacagttattaggcaatgtaagcagctgtttccactggaaaacccagaaaatgtctatttgtatggacgccatgttttaataactaataaaacttcaaatacaaaaaggaagaaaaaattttcaatacaaaggaaagatagtgtgtgccttcctcattgttactccagataggcccctggattgacacccagtttagaaccttggccactcccccttttcaggttttggagaatatgacatcagaggagctaatctggacacctattaaccaggtaaagcccagtttcagcccaacttgccagagaccactatcccagttaacacagatgacagcaattgttctttgaaaggactagtgacacttttgggtagggtccaaaaaaaaaaaaaagagtgtgtggtgggtgcaggaccacaaaggggggctttattttcattttcttaataacaagttggtttacaaagaatgggaatttggtaacagtacaaaaggtatgtcttattatcgctgtggataaaatatattcttattagggagagtggcagtatcaaacttgagtgtcaaaccccactggtgtgcactgtgtttttttgctttgtttggatttgttttgttttcaggatacaacatagatatagagcaactgatggatggtttcataccatgtacctggacctagcaaaatgttggagttgtttggatcttttacataaagatttttgaaaatagggaaaaggaaggataataaacttgcacagacagccatatttatttttatgtccagaggagagaagtgtaaaaaaatgtttaggatcacctatcactgaggcaaggaagacaacttgagaaaaatataatacacgagaccatctttttgaaatgttgaaaagctttcttatgtcctctgtgtacaaggactcacaaatgacatttgtgtgcactatttttttctttgtttacaaaacttagtgtgaaacagagcacttgcagagcctgggacaacctccttattgaagggaagagggaccagcacatgaggctgaggctgaggggcagtcaccagcaccaggaagaaggtggtaggaggagtcctaggggccagttttaccctcccacatatcctgtgtgcatcgttttttaacatgtgttgtttgtaacatgtaatatatctgaattttaaatgggggtggtgatttatctcagtcttcctctctgcatcagttgctttataaatgattgtcaaaccaataaatacacacaagataaaattttattctaaggcttcatgaaagactttttccacaatttttaacttttattctttctcattgtagatgtgtgagctagtgcaaaattttaggagatttccataatttaaggatggcccattttaaaggaaacagcacaagtcagctccctcgctggtgggcccagggagaaatgtaactcattttcagaaataactaaaagtgacagataagaaagaaagaacaggatccagggagaggctagggttggcttggtgactgttggagaaatgatacggagcagacccagtctctaacatcttaattccagatgaaaaaagataatacataggtttagatgactcgatgctcagaaaacaaatacaattaaagaaaaatctggtccttttccttcctatccatttctcccctaactgttctcccaccactctggagctgttcattcattgattcatactgcgattcaatagcatttactggcacttactgtatatgatactgttgttctttgtgttaaagatgctacaaaataatgtatgtcatggttcctgaactttaagagcttgtcttcagactatgtagaggaaactgtcataaatgaagcagctgaggaacagtgtggcgatagccctgccaggcaacctgcagggcctctctcctctggtctgacaagagcacttcagacctttttctttctccacttactgcctcccttccaagtaggaagaaagatataaaaataagaccctccctagatcttgcactagcagatgaagacaccatcttgggctgtcaggtgaaaaggcaggagctgtcctcacaccatctctcataattctcctaactgggcttcaagtcacaaaattcctcccttgtcacaaccttctcaggaactttccattagtgctttgtgttttttgcatatgcgacttttctctgtcagctagcaccttctcacaatcttaaacatgtttgttttcaactccttcttcgagcccatatgcttttgcagctactttcttgcctctttccttctgctatggtttagatgtctgttccctccaaatctaatattgaaatttgatcccaatgttgggtccacttgcaggaggtgtttgtgtcataagggtgaatccctagtgacattaaagctcttcctcaggggtgagtgagatcattcctacaagagctgcttgttttaaaaaaacctggcacctcctctccccctcccagcttcctgtctcaccatgtgctttctgtacaggcctacactccttcactttccactatgagcagaagttgcctgaggccctcgccagatgcagatgcccaatcttgaactttccagccatcacaatcacaatccaaataaacctctttttcttcataagttacccagcctcaggcattcctttatagcaacacaaaagcgacaaagacaccaccctttcatacccaaacttctcagcagtggtctcctttctgtactttctgctcacttctcatctggacagatcactgcaaatttggcattggtaactactcactttttttggaaacattctctcttcccttccctttcttagcaccatattctcttgattttccttctatctttcaggccctttctttttctttctttctttcttttgtttttctttcctctctttctttctttctttgtttctttctttctctctctctctctctctttcttttctttctttctttctttctttctttctgctaatcatcctccagctgaccattaaatactggaattctttaaggcttattcccaagcttccttttcttatgccactttcacccatggatgactcatccatgcaaaaattgtaatcactacctatatcaagatgatttatacgtttgtaaatggagcccaggtctcacaagagaaatccagagtcatgtgtccattttccttcttgttgtctacacttggatataattgctatctgtgttgctgtctgtgttagaggcatccccattaatataatagcaaaccaaaactcaggagttactctggacatctttcactctctcacttagtaataggacccgtcaggtttattccctaaatcaaataatccacctaaatcaaataatccattcacctctcaccatgtctattgcctcatgccaggggccattgttctctcctggactacactgtaagctcctactccaacctaatctctcatgcagagtgcctttgaaaaccaggacacttcctactgatttcaaaataaagaccaacgcacttcactgggcctacatcatcctgtgtgctcctgaccttaattcttctacagtctcctcacaaatcatacttcccttattctctatactctggccatagctaatttctccctcctgccatgaaacttttgcttatgctgttctttcttcctaaaatattctcctctcagtctcccacaacagttaactattatccttcagatcccagctcagctgaaactttgcaggggtggcccttccttacactcagattagtgcacttatcatccactctcataacccatgtaaccactcattatttctacagttgttattacatattcacttgtgtgatactttgattaaagttatctgccctcccgagacactgaactccttaatactgtgtatgatttgatttctgccatccacacaaggtgtgtgtacattaatattcatttagtgttgaaatggttttgctatcttatgatcctccatgctgcccatataggggctttaacaaaagcactacacacatttctccagacatttggagtgaggttagggcagtgtgtgtcttacatacatctttgggagacattttaggttaatgaggtgaatgttgaatggttccacattgaattgaatcctactgaatggtgcgtgggattccaacagtcagaggggcaaacgaaggcagatatcatgggtcactgtccaaaagcagtgctacatgaagaactgttggaggggctagaagagacactgggcaatgtctgttcactaacatgttaaagatctgcacaaagccaaaaagcagatgtggggcagaagtcaagatggccagaaagaaggtaactgtccaaaagctaactctggaagcacaggtattccagaggcggctctgattccaaagctggcatccacagaatgcaagttgtctgaaagagttaaagtgtactatcttgctcccattagttgcagacacgttcattcctcttatcatgatggaatcattattgttctttcctccttgacatttttcaccaacaatggaaaacactatgctttctgttgtttggggctttcttttgaggacagctcagaggattcatgttctgcatgttgggcgcaactcccttgtgattctcagttctcggtcccaaggtctggcttcctcttttgctttggaaagaaattgtccccagcccctgatgcttttactaggataacagtggaagagtggagaacacagaaatctcaacacacctatgcttttagtagcttgcagttaaataactagcgtgttttcttcccctgtaaaatttccaggcatggtaaaatctttagcgttacatagtcagggtctagctaatggcttatcagtcaagcaggcatgaaagagaaatgtctgtgagggaaaacaatgatgaactaagcaccaggatctagcacatctctcggtttgctcagaggtgggtgaatgtctgctctttagcccagtcctgcacatctgctcggccaaagatgaggtagaaaaccaggcccgatatgttaacagcagctgaaagcaagaagacatttctccaaccaaactctgaatcctggaggcagaaaattacaagttattaacggtcacccaattcctgtccctcttggttcagaaaggctttggctctgtgtcctcctgctccctccccgacctccactctggcttccatgggcttcccagttggtcctagaatactcaagtacatttctgccatgagtccaaagcactgggcatttccttggctggaacgctcctcctccagatacctatttgtctcacatcttcactccctttcagtccttgcttaagtgttctttttaagcaagtgattacggtgagtccttccttgatcattgtagttagaaattccaccccttgtgctttattctcctcttagcatttgctaagcatttgctattctcctgttaccattcaatatgtcatatattttacttccatagatttctttctgtttcttttctacaatataggtttcacaagggaaggaattgtgtttcattcacttaaatagcacgtagcacatactactgtttaatatttattgaatgaatgaatgaataagtcattgaatgacaggagaaacaagagcagtttgagaatttccattttaaacaaccatttcctgacagtatgctagtgcctgggagggaactgaagcttcaagaaaagagaagggacttgatttcataaagaatactctttctttgttattcttcatttatttttctgatttaccagtgaaaaaccacaggaaagtcattctttaactttcctgtggtttttcaccagtaagtgaatggtatatggcagtgtttttttccagtaaatgaagtatatggcagaaaataagaatgccacatacttctttattcatgtaaagtttataccagtaagattcttaggaaacttaagaatcttaagtttctttaattcttaagtcatcatgtaaattagtttatttttgactactttaaaagcatcttctaggatacaaggccgtgcatatgtgaaaaaaccatgcctctataggtttcttttatgaatattcatcagaacatttgacctcacctgactgatgaaaaatccagcagcagtaggagagatggctccagctatgtgtgcaaagacttgcaatagtcctttgagaaagccagtgtacctgagagagagagatggtactctattataaccaagtatacctacgtttgaaagtctcaatacccgggagagggaggcaaatattcctgtgcaaacaaagggttaatatcagctggtctgctgcaactctgtgcttacctctggagatgactggaattgtgtaagccttggtgaaacctgaatgaaatgtactgaccaatgattagtataatcctgtgctagggactggtactcccaagggggtaacctctattaacttgtcaacattgtttatgcaagatggtcagattgatggtctgcacctggtttgtaaggtttttgttgttgttgttgttgttgttgttgttgttgttgttgttgttttggcttctgctgttgagtctgatcttgtaacttttataccctccgtgggtataaaagacccctcaccagatgagacgtcggctcccctgtgacaagggcatctctcacatttcttggtggttcattatctgaagatgaaggatgtcctgttgactgggacagcaccctgggagctatgtttggaagtctcagtcaactgtttttactgtatcagagacagatatttctcctgcagtcctgtgtcctttgccttcattaaagattttcatgagcataccctatagaatctcaagatttctttcagtgattccgccttaggcaagtgctgcattcctcaacagagagaggtttgtgtgagtctccctcagttgactctgagcatggccactgactcctcttgttcacgcccagaaaaactaagttcacaatggtccaccagctttgagtctcttccaggaattatttagatgtaggatgtagagctggtgctgacatttcctgcaacctgttgtacctgccacattttactttcacatcagagtagatttagggctgctagacttgaattgagtgtctgaaaggatgaggcaaaagaggtccctaccgaggagcaatatccaagaagttaacaagggctcctgattcacagaagctgctgatggcagaagacagcaccaagaaggtcatggtcatgctgtggctggatctgacccagggcagggacacgaggatcacggatgggaagagaacccctggggtaggaggacaaacacagagtaaactgaaggctgctctgagcttcccacgttcacccctgtgtccagtctctcccttaccaatggcagtgaagagtttcctgatggtgatgagtctgaggatttttctggagagaagaaagtctgccagtagacctccaaggataatgcagatacatccaacaacaaacggcaaggcagacaggatcccactctgaggaccagagactaggtcaggtgcatgtgcccttaccacccccaccacgacacagacaaccttggacagactgtccacatttgtggcttttctttatatacgcatcacttttaatacaaattccatgttactataatgagccaatatacttttagtatgtatatgttcatagctctgcttgcaaaaaaaaaagaacaaggctctctttatatataaaaatcacctggaaataaatatttaaaagaccaaaacccagtacaaaaataggcaaagggtaataacagacaatttaaaaaagaaaagaagaaaaaaagaaaaataagtggctcctaaacatgttaaaaggtatccaactttactcataatgaaagaaatacaaagtaaaactatggtgagatattatttttcatggatcaaattggcaaaaacacccatttttttttggcatgctctgtgctaacactgtggagaatcaggttctcacaaatattactggtgctctattgagggcaatttgacaacaaatataaaagtttatagtgcatttaccctttgactcaataatctcatatgcagaaatttactccacagagggttgcacaaaggtatgagaaatgaacaaggttttcactgcagcattgctcaaagatgggaaacaatccaaatactgctcagcaaggttctcatgtactgatatgaagatttccatgacatattaattggcaaaaacctagtatataagcatagcggcatattactaagtatactgttttgtattttaaaagttgggaaaataagaatacacattcatgtatgcttgcattctcataaagaaacaaagaaagaatatatataggaaatttaggccagccatggtggctcacacctgtaatcccagcactttgggaggctgtagtgggaggatcacttgagctcaggagttcgagaccagcctagccaatataacaagacctcatctccacaaaaaattagccaggcatggtggtacacgcctgtggtcccagctactcaggaggctgaggtaggaggattgcttgagcctgggaggtcgaagctttagtgagccatgagtgaaacactgcactccagcctgggcaacacagtgagacgttgtctcaaaagaaagaaagaaaaagaaaaaagacatagaaagaattatcattggaatgggctgggaggacagggcagattaggaacagtaatgaaagaaagatttttcagtctttctattttttttttagacagagtttagctcttgttgcccaggctggagtgcaatgtcataatctcggctcactgaaacctccacctcaccagctcaagcgattctcatgcctcagcctcctaagtagctgggactacaggcagatgccacaacacctggctaattttttgtagttttagtagagacagggggttcaccatgttggccaggctggtctcaaacacctgacctcagatgatccacctgcctcatcctcccaaagtgttgggattataggcatgagccaccacacctgacccactctatgtttcaatatagtttttaaaatgttgaaccttgttgttatcaattaaacttctaaactaaaattctatcgaatataatgcaatgaaaaggagactcctctgttgtatataatccaaacaatggaaaggattcagcactcacctggttcaagtagttcattttacagatgcgtaagccgaggctgtcaaggttatgtgactttgtgagaaaatgccctgaaggcaatgagaatccaggtctcttgactttttagcctggaaagctctgctttctggtcactacttgtctttccattcattttcccattttcctcttcctcagccttggcctctgagggtcaagcccacccagcctcacaccaaagacaaatcattcccaacagccagcctcaggaagtctgttgcttagcactggactcctgcttatgtggtgtcccaatcccctggattaaggttctggtttaatttctggccctcttcctctttgaaaagacccagagccactgcctcctggggctttctaatctcagtgcctgcagcctgcttgcatgcagatgctgactactgctaagaaggtcagctctctgttggctacttagcacattttcaccagaggaacccaatcaatacgagaaggcttcttcctgagtacagagtgagagtacaagaataacactggctttgtgaactgtcactaacatgttatgaaatctgatagccacttttaagacatccatccagcaggaattgaaaggctcctgtcagccattcagagtatctgtctattttgtgaaaattcagagagctgtacacatatacacacttttctttctctatgttatacttgaataaaaatgattttttaaaacaaacattactccgcaaatgtctatgtaagtcttatttgggactttatgtcctattaatgtcttattttcagcatatgttgtttatgtttctctgtcacaattttctcaaaggcagaatttgtttggttaatctttattatttatgctgccagcagagcatcttgtttgcaaattttgatgggattgagtataaaatttttgcacagggcccttaaaatatgataaatatgaatagtatatatgaaaatagtataataaaatatgatagtgtatgaaaatcaaactagaaccatatgtatcatcctcctgcagtaagtagtgaaccacattgagatcaatcagaatccaaattaactagattgcatttcctatatggaggtcctgcctggtcctaatcccccgattttgtgactatgggacagacagaggattatatatgagctctcattatttaagcatttaaacagaagatcagaatgagctttctctgtacttacatctctgaggttggcttgaagtaccgagctgatgtacgttggtgtgtacgccataatggtataaaaaagccagtattcacagaaataagagactaaaatggcccagagtggtaaggatttgatcatagccctaatgggaagagaccagcctggtgaacagtcctggaagaaagcacacatcaatgtcccctccgtcagaaggcagctctctctatcacattcttcatctctcagacgtctagagggacatagagaaatgtcagaggagttcctcaatgtacctgctgagccaatgaacacacaatgtatctcttctcaccagcactgataaagggatgattcacaggatcatcataaatgagaggaaaccagagaggacaacaagcacagccaattcctcctaggaaaaggggatccagttagcactggatggattgaagtacttctttcagtttgactctaagatgattcctgtggttgacagagtgactggcctcagtacaccactcttcctggcatctatcccttgcatggccctatcatgggggagggtacttcctcaccacttgactttggccttggccatacaacttgcttttgccaatggcatggaggagtttcaagcctaggcattaaaaaggatttttttaaacttatcctcttgggtcttgcccactgctattggaagactatgctccagctcatccattgaccaaggcagatgacagacacagagagtggagccacccagctgtcccacaaagaaccatgggaataaatgattattgttttaaaccattgagttttgggaggttttgaaatgaactattattaaagctatagcacccttacaagttagtagcgtgtttgccccacgtgcttgaaaatgccctcaccattcacgtaccagtcagcatccctcctgctagtcatgctttgcagagttcctttcatcattaaacctttccatatctatctcttatcttcctcaaagcacataagagtgagcagcagtacattatgtgaaattaattacccaatttgtagatatgaaatgaaatgaatcctcagcaaagacattttttctaatatatacattattacagagttgggaatttaacattatcagtattgagtggaaatatggcccatcttcaaattccctttttagaatcttaagaaatcttatgagctctctttgtttggctagcatgtcatttacaaattccttcacaaacatcatacagcagccactatacaccacgctttttgctaaattttgagaatataaaatggcgaagacacaattttgccatcaaggaacataatcaagtgcggagggatagatatgaaaattagcaatgttgcacattggggttggaggatgttaatatttattcaacaaatatttagtgagtttctattgcgtatatgctccttactgtttcttgaaaccataagcacagtaagattttcttgttgtttgaataatttttgtaacctgccctttcaaagttttcatgataaaaactttaaaggttgatatgctatggaatcattacatattttatttttggtgaatatattcacctgattttacagaaacccttgatctaacaggcctgtcctctaatgaacacactagtgggactataaggtattaccataaacaatttaggggtgcgattttggagaatgtttcaaatattaaacaaactaaaggtaacagcagctaggcagattccaaccacagctccatgaaggtaaaactgtaacgtagtaaaatactgcctctggaactttccaagtgtctttggaacctttctgcagcatctctctgtgtattatgtccacttctgaacctcacataatctgccctgtcctgcagtctccactagttgattctctactctaattagtattttacctatgattaggtcacagtcacacaattttctagctatgatattagattggtgcaaaagcaattgtggtttttgccataataataactggagaaattttaaagaatatattaaattaaaaagcatgactaaaatgtaatctgactaaaataacattttctttttttttttctcttgagacagggtctcactctgtcacacaggctggagtgcagtagtgtgatcttggctcactgcaccctccacctcctgggttcaagtgattctcccacctcagcctcccgagtagctgggattacaggcatgcaccatcacactcggctaatttttataattttagtagagacggggtttaaccatgttggccaggctggtttcaaactcctggactcatgtgatccacctgcctcagcctcccaaagtgctgggattacaggcatgagctaccacgcctagcctaagatagtattttcaacattttatgagataatttgctctgaattcctttaggtcaaatttagaagcagtaaggaatgttatgatgcctctaatgtcataagattattctagctacacactcgggctgctgaaacttaaatgttaaatgtagttggctctgaacactaccagctttagctatgtaaatatccatatctattaggatttggttaaccatagataaattgcatcacagaagtctctgtcataaaaattggagatttgaaaagcacactcaccaaagatatagaagacgtaaggccatcctatggtctggcagaggagaccaccagcaagtagaacaatgaaggaccccagcattgaccctgaacagaagaggcgaggatgttctgggtgagaggactcgtcttggggctctatgtgctttctacaatgctgagttgcacagtgagtgaaggtatgagtttcaagccaaactatctaggttccttcacttggtaactatgtgatcttggagaagttattagtctgtttgtgtctgaaattccatatgtgtgaaatggaagtaattatatatagctgacttataaaattattttgaggataagatgaaaatatgtgcaaaacacaagaatgtttggcacatagtaagcattcagtttattcagttacaatcaagtaaggcagtatggggtagtgctttaaggaaaggactatgaagacacagagattgatatataagatcttggttctgttggcaggactttgctgagttctcctggacagtgcatgtaaagtgaggtttagggtaccagttacctgatccagcaatggtggtgagttgactcctttccagtgggggagcccatttgacccaaattgaatactgaccagttaataccataacctggggggaaaaattccattcttggagatctgaggtcattctggaacctatattccacttatacctggaaaacatcttggtacctgggctatgccttgtacaatccggaggacaatgagcaaggccactcccgcattagctgccagtggaatgaagagggtcaggaatgaggaaataaacaagccagcaccaaccacatacttggctccaaatattccagccacatagccactggggattggagccaagaatgagccatagttgagggagctgaggatgattccctggatttcaggactccagtcatatgcaggggcctagatgacaaagagagttactgtttgtctttagttgaaggattgacagttttcattgtgaggacttgagaggcaaaaattaattggcagttatctttctgtttacatttctccagttcctccaatataccagtatcatgtatttaaaaaccctaaatatatgcccaatatactctttccgctcaccctgacacaactaaccaaaaattaaaatataagagagttcgtaaagaaacaaagactataaagaagaaagcatcataagcaaggtagtaaaaaaaaaatacgtggaaggaagaaaaagcagacaaatctgtgaaacatattttgtagtgattttcatcattgtaggggaagaatttatgtccactaaatggtaaaatgtttcatttattctaacttagtccctggttacactcatatgcactaagtagggatgcaatccccttagatacttattatgttctttattcctttcttttctttctttctttcttttttttttttttaagacagaatctcactctgtcacccagaccggagtgcagtggcacgatctccgctcactgcaacttctgcctccccagttcaagagattcttctgtctcagcctccagagtagctgggattacaggtgcctatgaccatgcctggctgattttcatatttttagtaaagatgcctcaccctcccaaagtgctgggactaaaggtgtgagccaccatgctcggcctgatacttaggtacttgtgccattcctggcacatagtacatgttcagtaaatacttagtggttaaatgaatctcactcttttataactctttaagtcaaattatttgagtcaaagaaagagtccagagtctcattaaacttaccattgctttaaattcttttagagtttcattccagtagccctgggagtcagtggagggccgttctgtggaagcattgggctggctaggtggggctgtgttgttcaccatagctgggatggcaatgctcaagttcatttgttgggtgtaaattgaaaaattacagagctgcaagatgagggccagcccatgtcggactgaacaaaaacctgagaggaaaagggcatgaaaaatcacaatcagaatgcttttctcccactctccctaagtctggaagaaggagaagattggtatctgtctgagatgcagaaatatagggagagcagacattcctctgtaggtgtgtagtggaattttgttcccctgggaggtaatgggggaggtggctccctcagaaacatttctcagagacttgaagaatgtgtggagttggtcagaacaagcattaggggagagctttttaggcagggctctgggatgagaagattagaataggaatgggaagaagtggatttagagaaagaattggctgggagcagtgaccgattgggtatggacagtgagagagaggaaactgctggagatgactcccaagttccctgcttgggcagctgggatagctggaagtgccatttataaccaggaaacatggaagattagcttgtctggggctggggagagatgaaacttgaaagataggctatggttagatcatagaagtatttaaacttcatcttaatactataatctatgcttacacaaaatttgctagtgttccataggagctctggggatatccctgtggttgagtccatatacattagtttgacaacagcgggaagaattcatccactatccctgtagagaaatcccagaggtaatgtatgatcacaaggtatgaagatgccattttcttggttcctgaaagggagcaaatgctcttggaatggacagcatggtttcattttgtgtagtaatgctcttgctaagttctagctcttacctttggttcaactctgagagcatttagttccccatccccaacccagccaatgcaccacccatgaaaatctacattggaattttgatcagtcatattgatatgacagattaaattaagaaggattgccacatttgtaggattgtcttctagtcaagaagagatacctacccatgtaccagtattggtcttttactcagtccgaggtggaattttatagttatcttcagttaaggccttcacaaattttgtaaattactttttattgttgtgtaactgttctttttcctatcatattcatcagcttttcccccactgagttttgattcaataaagaaagacaaattatggacaaataatgaaaaatatagttgattatgtttaccgtttgcaacacgtatttcattctcctgggtaatttaattcaccagcattttcaaaaaaatggacaaagcaggaatggtaagaatgggcacctcagctatatttgcatttactgagactgcttctcacattacaccactaggtatgctgctagttgttggtgtgacatgtcctttaattatattaaactactctgttcctacttttaaatatttttatggggatacataagttttataaaatgtattttaatcctagaatcagacacctgcattccaattccagcttgtgtggtctacttatagctgtgtattctggggcaaggtactgagctctctgtggcccccaaattttgcctgaaaaatgagattaataacagagtctacctcaaggcactgtgataacaactgaataagtttatgtaagtttattataattataatagcctaccaccttcgtattattgggatgatctcttcttattcttaataggctattacaaaatttaaaaacatgatgtattttgctagcattttagctggaattttatttagtatatatagttgagcttaaaatgttgtttatgtacatatgtatgtgctattttttgctatactagctttgttcttttttaaaagttataagcttccatctcaatctgtgatctgaaatgttttaggtacatagccatttttcttaataaatttttaattttaggacagttttagatatatagaattgttgagttcctctatatctcacacaaaatttcctgttattaacatcttatggtgcatttgttgcaattaataaacctgcagtgatatattattaactactaaagtccacagtttattcagatctcttagtttttaactaatgtcctttttctgttccagaatcccatatagggagccacattacacttagttgtcatgtctccttgggctcttctttggtatgacactttctcagacttaccttgtttctaaaatgtattctaaatactttgtagtctaaaatgtctaaagaccttgatagttttgaaacgcaccagtcaggtgttttgtggggcatcccttaattgaaatttgtctgatatttttctcatgattagactgggattatgtgtttttgagaggaaggccatggaggtaaactcattctcatcacatcatattaaggccacacactgtcaacaagacttcttactgttgagttgatcttggtgccctggcttgaggtagtgtttgtcaggttgctccactgtaaaattactctcttttttctttttctccttttaattttttgtatgaattaatatgtacaaatgtactctggaagaagtcacaagcaccagtcacacttaaggagcaaggagctaagctccatcttcagaaggtagagtgctatatgaactatttggaactcttctgcacaggataaataggcattttcctctccttaaaaatctcatataatttttctagtgaaactactagaatatatttgtttgtttctgtgtttgttttaaaaggaataactttttgacaattttcttcatttcttagttgttttttgacatgtataattttttctttattcatatttataaattagaaacataaaaatgtataattcttagaaataataatttctataaaattataattcaattatattttaaatattaaattttaataagttaattatgattatgtaattaaagtttttataattataaattataattcctagaaaatcatttacttatgtactttccctataattagcatattatacattttcaatgcttctgtctcctattttctcataattgcttgtatttaatctctctgcctgattaatctgagtagtggattgttttattgccttgagtagcatcatttttatcaaagaaccagctcttgtatgtatttttaatccaattttttcatgatttgagttcacattattttctataagttgtctgtttcatttttctatgtaatttctttgaagttgtaggctcagtgaattggatgtttaattaactagttttcattttttattacacaatctttgttttcttccttttctcaaatctatcttctccttgctgctactaattccattttaactctgcagtgacatttttttcctccttagtttcctttctcatctatattgggacttcttccatattcttctgttgatttacttcctacactctatgattttattattattgttattgtcattattgagaactttaagaaattgaagatgaaaatattcctcaatttccccgtaataacgtaagcacagcagtgtgatgtaaaagctaacaacagctggtttaaatccagctgctacctctttgtgcctggatgattaagatgtgttacttcatccctctgtgcctgagcaggctcctacaaaatggggatgatgctagtagcacttttcctgaaggattgttgtgagaattcaatgaattaatacataaagactgcttagaacagtgtctaacacagggcatgcactcattatgtgacagctatataatgaactgttatctttcataagtgtacctgtcaatttctttttttatctaacacatgccttatcttattctttcctttgcacaaacatatttacgtaggttccttgtagtccacccctacagccttggaccataaaagccagttgtgtgtgactttgttctcacattttgaaacccctgcacagggccacccatgctggtttgaggcccagctataatgtggtggtgtatgtgggtgggctggtggcaggggtggggaggaggaggtagggaattctttcaccaattcaagggaagctaactactgtaccattttaattctgcaataacattgtataatttgagagaaagccttccaaatttccaagttgatttctgcagttactcatattttcctctgctttgtagcactggcccctgatgctaaattgcagatcagaaaggccagtgaagcgtgaggggaaagctgcaggatgtggacccatgcacgcttcacccagcacatcccagcactgcagacccttgaggggctcatggggtctgtggtctgcccagcttctggacactgccactccaagctgaggagcacaagctgaagctccacagcatcctctttgttcttcctataacactgcaccctgcctcaaggatgggagttttatgagctcttggctcctctctcaatttcttccaaattgtattaaatctgtctgcaagatttagagtttgtagtgtgtggtaggaataattccttagtttcaatctagttggaagtactttctcaaagtgttgtgcttgttttattcatttccatggctttcagaaggggatgttgttgtaaattgtccttcagatggcattcttccccatggtggggggcagtatatctttcctgcaggcatttgatatggagaaaggataccgtccctgatattgttctcagtgcctttcccacccttctctggtctccacagtaacagagggacaaatatctggaagctacaatcctcaggattccattcagattccacaaatgagggcattctggcccaaggtggcaggccgaactcaatgagaaaccactatgctctggaggcagctgcaggtggataagtgaggatcagtcatgttagacatgggatttctgcctgtgactttggggtgtcctcctgaaaaatacccactttgtgatgcacatggctgggatcattggcagtgtcatgtcctggattttctgaaagtaaccaacctgacttttgcttccctagccttccaacgtttgtggaatcttccagtcccctatattaatcttctttcttctcagaaatacctagatttgcttttgattttgtgatataaccctgactgatacagaaagaagctcatggacttctgggggaaaaggggatcagaaggtcaaagtgatgtctgtctacagcctggccccagaaatccctaactgacactgatagagaaaaactactgatcttcaggcagaacctgaaggcccagcttttttcactcaaggtttctgggttattggaacagttactttgcataagcaggtgaccagataatgggggagggggcatttctccacatcccatggaacccctggattcagctcactgagtgtcttagaaacacagcaaagatatgagtggcctttggagatgggggtactggtacccagagaaagccccagcagtgccctgggagtctaatacagaagatccagccatgtccagtaagcatgagccagagaaggggatgagaataaaactgatgttggacaccaactgacaaagcactctgcaaggtttattcctaagcatttgtgagaaatacttggatacacaacaaaataacttggtaaggcttggaggagtagctggggttctgccttattaggtaggatgagactaccaaaacaggatgagtgttagtagcatgatgctgtttgaaacaacaggccagggtaaagtgggttacaaagttgttgtctgatacagctatagcctggagtggtcaccagaggactgggtggcatggtaggccagatgttgtaggagactatagaaggaaccagaaagaccatagaagttccactttagacaaattataaatgaactttccaatgactgcccaaaggtgggctgaggaagggacactatgtgagtggtaataatgagctcataaatggcaaaatcaggattggaaactcaagcattctgatttctgacccgtgcttttacccagtatgccatactgcaccttggtaaaattttacacataagttcttcgtattattaattttaagggagagacagaatgataggataaaagaatttggccaatggtatagtctagtagactctgaaatccttagaaacagatgagaccttcagccgagactactggaatagtattcattctgggtcaaatggtgactagttgtaggttgagtactaacatgcacatttcctgatttcttctgtgatggttgagattaggagaaatctcttttcttgaagatatgcataattcttaacagacaaactggctaaaatgttgagtattacaaagcattccatcttggttagggttttgccttttgaagtcattatcttatgaaatgactatatccttaaaagaattaatggataacatagttataactcattaagcatttagggtaaaataagatgttctacagtttcccttaatgcatattataaaaagcatgatgttgtaatatagataagagaaagggagaaaggtgacttctatgacatggtagaagcaaaaagcccattttggggttcggggtcaggtctggatttaacatgagcagagagatctaataggacatgtcttggacttagaatcagacaagccaaggttggtttctatatttcctacttagaacctgttctgatttttttccttcatctctaaataatgtcatgatacctgcctgtcttatataccttcaaagtttcttatgagaaatgaaataattatcaataacaatgtataaccgtatagaattattggcaattggtggtagcaaggaaaatgatgtgtatcaacaaaagatgccacagatcctagttttatttagtaccacaagttacagtgccacagatcctagttttatttactaccagattactgtgcatgattttacctttcctggagcattcctcttgagccacgtttaaattgccatcactggaaatgtcccccactgtagccttgacatctggtccggtagacattttggttctctcttcctagggactggcatttacttactgaaataaaaagaatacaaaagaaaatacagggagaatcttatatgatattaccccaattctttctaagaactaggagcaaatgttgctgtataagaaaagtggtagattagggtttatgaaaactaacttgtcatcctggctctatcactaaccaattggttggtctttgaaaggtcgcagtttaccctgggtcttagtatttatatctcgcaagtgagaaatctggcctggattgccttcataaattgtaatatcctttctagttctgtgttcccatgtctctaaattgatactagtatcaaatggacatgaaaacttgacaaccttatttgaaatttcatctaggagattccagtggattaaattacctgaaaaactattataaacacctatacatattacataaaatatagcaaacacccttttacgtagctgcaaagacagtaagagatatctccaccgagttagatgtctgtgctaacttcagtgaccatgagattgggtcacagaagcatcaatttcagtgatgtgggggcctgagatctaagtgcctgtggggatgaaggatgaagccttaggcccatgccagggaggcgattataagggagattctaatatagagtcagatgcctcacaggggttcaaaacttggttacagaggctcttcccctttcaacaataacagtgacaaccctctttgtcctgagttatggtttgaaaataaagtacttcacctgaaaattgtgaaagttcatatctaggttatggagaattgagggttggaattcatactgtcttcattgtctgagaactcatccccagctaaaaaactgaccaaagaatcaagcccagtctgattcactcaaaacagattacacagaattactgcagatgaagctctatatattatgagctcaaaataaaaaattataaacactcaaaaaagtgatccatccaaaacaagttttcagactcaatgtgtagcaaaattaaactactgcgaacttccaaaaatagaataaactgacaaagacattatgtaagtatgctttaaataattgaagaaataaaatatggaccctagaacataaaaagataccaaaaagaataggcagatttaagaaagatactacttgaaatacaaaaaaaattaggcattaaaatttgaaactaagtgactagacatagctaatgaaagaattagcaaaatcaacggtaatgagctatgtaaattgtacagaataaagctcagtgagatgatgagggatgacagcaaagttaagaacctggaaaatggagtgaaaaggtccaatgtatgttgaataggacttctaggaggacaaaataaagagaactgagaaaaggcaatactttaggaaataacggataggaatttttcagaagagatgaaaccacaagatttctcagattcaggaatcaaaatgagtctcaagctagagaaatgaaatgaaatttacacctaaacatatttaaggatactgcaggacacaaaaagagcaaaacttatttataataatagataccatagaagatcacttacagaaggggagaaattaattacagcattctatcagatatggagtagcatttgctcaacttcttcaagctaataaaaaaataaaatacagtaaattggtaaaaagtaggaaactattggaataatatatgaatatagattaagaacaaacatgggaaaatgtgcttcgctttgctatcaaggacatggatattaaaagaaccagatcctattatttcttacctatcagttttcataaacattttaaaaaactatgatcaccaagcttaggcaaaaatgtggggaaatgagctattgtttgagggagtcaagctgcatcctcccacttgtattgctgcttcacggtgtgtaccagagactaataagcacagccacacagaataatatgtttcaggacattccttaaagcaatatttgtaaaagcaaaaagtcaggagctaactaatgattatttaatatttgcatagttaaatgcagatattttctgaaatactatacagctatcaaagaattggatacatatataaaagcatataaagatttaaaagacaggtaaacaaccaagtatctatagtcttcaagagattcacctaacatctaaggattcacataaacttaaggtaaagaggtgggactagatattccatgcaaatggacaccaaaagcgagcaggagtagctattctttttttgtttgtttttgttttgttttttgagacggagtctcactctgccgcccaggctggagtgaggagtagctattcttacatcagacaaaacaaacttataagcaacagcagttgaaaaagataaagagagacattatatagcaacaaaaggactacaggaaaatatcacaatcctaaatatatatgcacctaacactggagctcttaagtttataaaacaattactactagacctaagaaatgagatagacagcaacataataatagtgggggacttcagtactccacagacagcactagacaggtcatcaagacagaaagtcagcaaagaaacaatggacttaaactataccctagaacaaatagacttaacagatatttacagaacactctacccaacaactgcagaatatacattctattcatcagcacatgggacattctccaagacagaccatatgataggccacaaaacaagtctcaacaaatttaaggaaatcgaaattatatcaagtactccctcagaccacagcagaataaaattggaaatcaactccaaaaggaactctcaaagctgtgcaaatacatggaaattaaataagctgctcctaaatgatcattggctcaacaatgaaatcaagatgaaaattaaaaaattctttgaactgaacgacaaccgtgacataacctatcaaaacctctgggatacagcaaaagcggtgctaagaggaaagttcataccattaaatgcctacatcaaaaagtctgaaagagcacaaatagacaatctaagtttacacctcaaggaactagagaaacaagaacaaaccaaacccaaacccagcagaagaaaagaaataaccaagatcagagcaaaactaagtggaaattgaaacaaacaaacaaaaaatacaaaagataaatgaaacaaaaaagctggttctttgaaaagataaataaaattgccagaccatcagcgacactaaccaaggaaaaaagagagaagatccaaataagctcaatttgaaacaaaacgggagatattaaaattgataccagagaaatacaaaatatcattcaagactactataaacacctttacgtgtgtaaactagaaaacctagaggagatggataaattcctggaaatataaaaccctcctagattaaaccaggaagaaatagaaactctctctgcaaaggaatggggagggtaggaacggccatgcaggcattgaactttgtctttggtgtttacatgtgttacaacaataatgtaatttgaattattactgtaattaaaaataaatttcagggacacaggtaggctgagatgaaaaaggtgagaatgtttttagagacagttgctggtattctctgtcaggtattcactctcactccaggaaagaaaggaggagggcactgccccgtcacttcaagtcaaattataggagctgcctgcaaggaggtcattcagggagcttgacatatgtcccctatgtgtgtgtgcatgtgtgtgcataaaggtgagtgacacatgcctcagaatctaagggcatgaggtggtgactcttggtctgaggctgcagagcacagcaaaggtctacaccacactggaggctgtgatacgtcccacggcagcagaggtgaagaagcacaggtggagaccagcaggtcccttgtgaaccagatacggatgactcaggaaaaatccagtttacaatctcttaaatgacaactgtctggagaagccacacgaccccaaaagacagggcggactgcctgatgcccaacacctgagaaaggaaccctaactgctgagttagtgaacacatatcacccctgacatgggaggactggtggatgcccccagtggggtacaataaaggattcagcattgaacattcatccaacccagagaccaccaatgccaggtcacaagagctccagctaagaaagacacttcctgcttcttgcttctaactccctacccaccagccctggaaagatcagaagccacagctagcaagaggggtgagaggagttgctgacagagaaagggatcaagaaaccaaccaaatgatcccttccctccccaggcccaaactggagcagcgggttggggggcaggggaaagaaggtatacttttagatcaagtttggaattttctggttttcactggactggacctattaattaaaaaatgagattatttgaagactacaaataagcaataaatctattactactgacaatgatcagagaagttacagcaccaagcagatataaagttacagcaccaagcagatgtaaaggaataaaatgtaaagggataagcagtaggtgctggtgaaatgaaatcattttccatgtgctctctgtgaaggactattcttattaatataaaagaaaatagacctgatcctttggtgctattgtgtttaaagataagtggaaatgttatgtaacgtaccactaaagctggtaagtaagcaactgacagagaagttgcctcaatgatgtcattcaaaaccacagatgttagaccatggaaccctctagtctgcactggaattcgaaaacacactcaaaattgaattgaaatccaaacaaatactcattggcaaatggaatggttctggtaattctgaaaagaaacttggtaaaatgaggggactgaatagtctgctggaaaaataatttgcttatcatttattttcacacctcagggcaattagttgaattgaaaaaatcatatcagtcacaagaactaaagacatagctttcagggcaacatttttttccacaagctatacccacacagactcttcgagtgttccaatgtctaagagttcactggccgcaagttcattcattgattcagtaaatatttattgaatcaatgaatgcaatgttgtgctttcatagctccatctcctgcatgactgaagaacttagttctcattaaattgccctctccttttacttattataaccagaaatcaattgccagttttttcagtaacaggcgataatggttttgctggcgttaatgagagcagtgggaacagacagccgagggtgaagggaggacagtgctgttgtggggacagcgtgatgcaggcacagacagtacacctgcgagaaagttacatcccaggaggggcacatatgaaaagaaagaagtaagaatgccacatggtatgaaaaaaacaagagtagcattgacagcaactaggtcattagcatcaggagaggagggcaagcactctgcctagtctaaccacttacctagtgtggttgtgtgaaatggttatatttgagctgaaacgggaacactgagaaggagacagcgctgagcaagaacaattccaggcagaggaaccagcaagtttgtcacgtttttctaggcagaaggtagtccaacatggcgatgcagagtgaatgaggaggttaatggtaggagatgagatcaaaggggtgggcaggatggtctcgatctcccaaaatggccagaccattttgggtcctataggcctggtaaggggactggatctactatggccactgtgtggcacatgggctgtaaaggacaagattgagaaccaagagactgaacaagaagttgtttcttcacctgtacaagtgttgatggtggatgggctaggctagttgtggtgaaaaagaccacattcaggacctgttttggagatatgccactaagacttgctaatgaggtgtatatgggaatgagagaaagggaagaatcatcagagacttctagacttacggcttgagcaaatgagtgaatagtgttgcactcaaagaagttggcgaaatgagcagggagggcaacaggttccagaggaaaagcaagaactttattttggacacttggggttgagactcctgttagacccagaagggaagattgacaggtaagttttgtgtctgtgagtccatagctaagaacagaagggcctttgtagaaatataaatgtgtgagtcatcagccttatctatttattttgaaaccaggtaaatgaggaaaaaacagcaaagaaatggagccagccattcttatatcaatttctcatcagtttttcttgccaagactgcttgtgtctgttctttttggattcatatgcaccctgttcctctgctagttatcagtccactgtagaatgagacttttccttaaggtgctgggcagagctattaacagctcaaatgtcatcttaggtggtctcagcactgaacatttttcctccttatgagaaacagcccatggctcttattcacagtttgcaaataaagtcctctgccctaaactcttcatcattaactacttcccaaagccatattagatttcatttattttgctttcccataaattcgctggaaccaaaccagaaccgtttggttttcattaattttttaggcatgatgaaaatcttcctctctgagaattcagtattggcatttattgtctcactgtggatttgatcaatgcttaaaaaaattaatgtacttcacaaaaacaatccaaatatatcatttagtttctgtctcttcctctctctctttcttcctctgtgtgtgtgtgtgtgtgtgtgtgtgtgtgtgtgtatgtgtgtgtgtctgtctgtctgtctctgttcagctatacttttagaaaatttcattctcttgaattaattccctgtagttccagggctcttaatgcaacatcccttctcacttaccagaattatctcaggacacaggcattctcttctccactcccacaatctctgcccctaaacagcaaattaagctgctctctaacagaaacagacccattcccatcatctcaaaagcagaatattaagggtaaaagtttgaaagctaactaacctgagggaggaagagtgcaggatcctcattcctttcaaataaatattctaagctctttgcaattgtctaattctgggaggtaaataattacccaaaacctttagcccttatgttaccagcttggagaattttattggcccagtggtttaatttttaactttacattttattgtttgattgataatcaaatcaagctcattaaatcttcctcatgcttcaagcccagctgaggtcacctatgtcttccctcatccttaatcagaatcaatgtcccttcttataaggatcctgacaccccacatgtttcactgacagcactatccccttctggggtctctcagagttattataatcttcatggagatggggtatattttgccccttttgagtcccttttccaccatcctgctgtttaatagaactgagctttccaaagaggagagacttaatacattttggtcgacttgagtgatttttatggttttctgattgtaattttttgcacaaaggccattgagttttccatgaaaattaactctgtgattctcctcccttttatggcaaaacatttcagaagactcatacatatttgcattctggttccccacctctagttttctcatgaatccatcagcaacaagacagcccttagcaaagccatcaccagcctctctgccagcaaatccagtggtcacatcccaggccccatctgtcagtgcttgacagattccaccactcgttccttcttgatgccttgtttcatttaattcattcagatctgattttcctcgtgtctcattggttgttccttgtcaatacgttttgctgaatccttatcttttctctggtttctaatgttgatatgcctaagactctgtccttgaacttcctccctatctaaactcactcccaaggagatctcagccagtcccctttcctttcacacccaattctgacctcttctctgagcttcgacttcaacttcatccatctctccttgagtacccattaggtatctcagtcttatgactgcaagcagaactgaatctccctccaaccctactcctggcccaggatcccccatcttggttaatggcattaccatttccctgttaatcttgccaaaaaaaagtcagccttcattctatactttccatcaacattaattccaacagtatgttctatcagttccaccttcatctctttccattattttttattttctccattcctatcacaatcatctatcaccagggtaaataaaatgattatttaccgggccccactgtttccattctctctcttttaatccaccccacatagcaggcagaatgttggaaatgtacatatgatcatgttacttactggtgtaaaagtcttccaaagccttcccagagaacctaggagaaaagagagcaaattcaccttcctgaaggtgctccaacaccttacatcaccttggacacaccaaccttactgacctctgccctgctgtccttccctcactaaattccaactagttctgccttgtccatgaagttcaaggcctttacacttgcagttcctcctgtcagtgatgcccaattccccaagatgattgccaagtgttttaccaatgttgttagaaaagtaaaacacttgaaaatagattttccaagaagcctctaatatggtcttgattttgtgtcagcctaggctaacttgcatatttgtgtcttagttttaataaatcttttttaatttttaaaaattaaaaatagatcaaagcttatagaataagggtataaagaaaatgtttggtgttttttttttgtttttttttgtttttttgagacggagtctcagactgttgcccaggctggactgcagtggcgtgatctcggctcactgcaagctctgtctcccgggttcacgccattctcctgcctcagcctcccgagtagctgggactacaggcgcctgccaccacgcccagctaattttttgtatttttagtagagacggggtttcactgtgttagccaggatggtctcgatctcctgaccttgtgatccgcccacctcagcctcgcaaagtgctgggattacaggcgtgagccaccgcacccggcctaaagaaaatatttttgtacagcagtacaatatgtttgtgttttaagctgtgattaccagagtcaaaaagtttaaaaacatttaaaagtttataaagtcaaaatgaaatagtaagctagaatttattattgaagaaataaaatttttttataaacttagtgtagcttaagtgcacagtgtttacaaagtctacagcagtgtacaggcatgtcctgggccttcacattcactcactgcctcacccagagtaacttccagtctcacaagctccatttatgataagtctcctagacataccattttttatctttttactgtaccttttctatgtttagatatgttcagattctcagatatcactgttttaattgcctgcaatattcagtatagtaacatgtggtacaggtttgtagcctaggagcaatgggctagaccacataacctaggtgtatagcaagctctaccatctaggtttgtgtaactgcactctatggtatccacacaacaaaactgccgcacagcacatttctcagaatgtattcctatggttaagcgtcgcgtgtttgtattatagcaaatatacagcacatgctctgtggggagaagaagcagtagatgagtttctgtggccagcattattaattggctaagcaaaaccacatttccaaatttctgtgccctagcttgtatctactataaggcatataggaacaaaaacttcatttctgtggcttccttgaaacaaatggggcctacacatttctggccattgatgcataaaaagaagtaggcctgtgtctcatctttttttttcttttttctttttccttctgccgtaacagtggatatcaggtcttgaggtatggcaagtacctgaggctcattagacaacagcaagatgaaagccaataaactgatgatggctctatcagtcaggataagctaagttacactgggataacaaatgacccaaaaatctcagttgcttataataacaaagttttatgtgctgttcacaattcatgaccatcgtgtcttggctacagcttctcaccatgttttcctcacttaggggcccagtttgacaaatcaggctttatttggaatatggatggtctcatggcagaagtaaaagagaaattatggtgagccaagtgcttgctcttacaggttttgcctaggtgtcacttccactcaaatttcattgggcaaagcaagtcagatggccaagcccaatagaaccaaaatagagaaatacaattctttccagggcagggccagggaaaatttttgaacagtcatataagctatcactgtccaagcttcaattcaaaattatttagttagtaaactatcctttctgcacacaaaatatacttaatcccttcctatgaaaagccaagtcaaagtctcatttaattatagcttcagggctgatgttgacaattttatgatattatctcgtcaggttgaatatgacttgtcttgctccagaaactcatgaactaacgagactaggtgtctgcttcccctacacacccatgcacacccaatgtgtcatgctaggacacagaaaagataattgcagacagaattgcacaggagtttgtagttcaaagaaatctgagatcatgtgggtagctatttcagtcttcctcctatctccgcatatgtgataatccctaattaatctgtggctgtgcatgccatgagtaattcccctaggatattatttttcacaggtcttggctccatgctctggccagtccttccttttccaatatctcctttgaccatatttgaatagtccttgcagactgggcagaatactaggcccattgctgacaaaaaaaatttttttaaaatacgacacccccctccccccacacacacaagtgacataacccttgataagtcacagtctcctttatccaggttggtagttctgtggtattatgtcactcaaaatcataaccagtttcctatacaagtgcttctccttccctcctttctctctctctctctctctctctctctgacatgggttactttgagcctaccaggcttcaatagaaaagccataacctttgcttcattatttttatgaatggttaccaccttgatttgatacttgcacaagaccaagctttaaaaggactttcttacttaaatcatttctcagttttatctttaactgttgggagttgagaaatagtatctttcaactcagtaagtctacagtttttagtttctctcaatttccttcattctgattttcaaaccagctaattactttttcagattatgtcttgttttattatactttgtgaaatatagtcaatagtaaatcacatgatttacattaactatgccaagaacttcaccaaaaataataagctcaatagggaaattacctataaattcatttctaaagttttctaaatgtttcacctatgcaaattaagtactactgcccttctaaactctaataacagcttcttttctgctcctatcccatccctgaagccaatgccccaaaaaaggcggtgctttgttttattttgtttttaatctatggcaacaccctatgctacgccttgcactaatttctgtgttggttaggaaaggagaagttaggctgtggtaagagatgaagccttaattagtggcatacaatgtaattttatttcctgcttcaagatacatgtctagcacaggccagcagcagctgtgatccacatcatcttcatgttgggaccaggcttataggcagcttccatctgaaacattacagccagtctcatggcacagaaaagagagaatatatggagaaacttatggctggaaacatgttatttctaattaaattgaattgatcaaagtaagtcacatgatccagatggatattaatgcagccaagaagtatgaagaaggcagcaagtatctgtgaacaataatatattctaccatggggtcgagtagaaaaataaaaaaaaaaacttgagtccctctggctttattgaactggtataccagatctgaactgcctataaattgggaaaaataaaaatctatttgtttaagccattacctgtatacagttcaagaagtaagcagtgtctaatttgatatcaaactcacttgtattgagttttattttcaatgacttcatttttttaggttttgtctccttgtagggaaaagaaaaagagatcagactgttattgtgtctatgtagaaaaggaagacataagaaactccattttgacctgtaccctgaacaattgctttgccctgagatgctgttaatctgtaactttgccccaaccttgagctcacaaaaacgtgttgtatggaatcaaggtttaagggatctagggctgtgcaggatgtgccttgttaacaaaatgtttacaggcagtatgcttggtaaaagtcatcgccattctctattctcaataaaccaggggcacaatgcactgcggaaagccgcagggacctctgcctggaaagctgggtattgttcaaggtttctccccatgtgatagtctgaaatatggcctcgtgggatgagaaagacctcaccgtcccccagcctgacacctgtgaagggtctgtgctgaggaggattagtaaaagaggaaggcctcttgcagttgagataagaggaaggcatctgtctcctgcctgcccctgggaatggaatgtctcggtacaaaacacaattgtacatttgttcaattctgagataggagaaaaactgccccgtggcgggaggcgagacatgttggcagcaatgctgctttgttattctttactccactgagatgtttgggtggagagaagcataaatctggcttacgtgcacatccaggcatagtgccttcccttgaacttatttgtgacacagattcctttgctcacgtgttttcttgctgaccttctccccactatcaccctgctctcctaccacattcctcttgctgagacagtgaaaacagtaatcaataaatactgaggaaactcagagaccggtgccggtgcaggtcctccgtatgctgagcgccggtctcctgagcccactgttctttctctatactttgtctgtgtgtcttatttcttttctcagtctctcgtcccacctgacgagatatacccacaggtgtggaggggcaggccatcccttcactcctcccattttttcccttttcttctagtctttataaatagtttattggtgttttatatatctattttcttagtttctgtaatttcttatggtgttttattatctcaagatctggagtaggatgtccaatctttttgtgttctcctgattcttgctcatatgggattgtttcaggtgtgttgtgtaatttcagattgtgagctcatatttaatgagtttcacctcagctaaccctgccatggattgagagattgtttctccagagaggttttttgtttgcctctgttcagtaacaccaatctgagaccttttgtgttcctgactgtcatagacatagtactgatttttcatcatgaaacaagacattggggtttaggttaaggtatatttggcccatgtattaagaataatgttattcttgttttactaagtgttttttcatgtaaaataagtaacaaatatacacatatgcccttctagcaaattttgagttttttgaattcacttttctgaatcttttggcttggaattataaattccatattatagatttccaaatgtcaatatatcctaggcatcttagtcaatttgggctgctataacagaataccatagactggatggcttaaacagcagaaatgtatttctcacaattctgaaggctgagaagttcaagatactgccagactcagtatctgatgagggcccacttcccaatttgtggacagctgtcttctccaactccaaagagttgtatcctctagtggtgaacaacagagaaagcatgctctcatgtcttttcttataaaggcactaatctcattcatgaggaatccagcctcatgatctaatcatttcctaatctcatcccgttggtggttaggattttaacatatgaatctgagggagactcaaacattcagtccataacggtaggtttcttggaagaatatttttggctaaaatatacttgaagaatttgtgcagctttggaggtgtagtgttatttgttggctgatttactgacatcctagagtcatattctccaatcagacagttgagctgaaggctgcaagtttacatgcctcctttcattgtttctagtccaaccagcatttaagcctagctcttacattgtggaaatggaagccataaaataagatttccccatggatctaccatgatctacatatttattcttctttctcaggagctgtgttgttgtcagaatgccagaacaattgcactttgcttctttaccctgaatgccctaacccggaagaatggcaatgttgctgcaggaatgcactgggttgattactctgctacctgtaggaggtgctaaagtagatccactttgatactggcatcctttctgcagccttaaacatcatgagtttctctgttggtgatattgttggtgaactgctttgagaggcccctgttattacaatcaaagatactttttagcatactgtgaacttataagagttgtgacaaaagtactgttttttattgtcagtctatccctgatgaatcaatcagtagatttttggctctgtttcctactttgtgactaaaagaagttgcattacatattataacttaacctctaaagtggcataccatcaatcctgccatattgtttttcattggttgcacaggccaaccctggtacagggtcagaaggggatacgcaaggttggaatagcaggaggcaggaataatagggtgccaccttagaagctagctattatactaggactacaattaagtcatccaaaagtatgatactgtcttatagttgaccatggctaaattctatgcttaataacttgtctaatattccacaacaaggcatagggtggtgataagaatttgatttttttttggaggtttctgattctaatggcaataaaactatcttactactgaacttaggatgctgctccttcttttgggatgtattcattcaacaatttttataatttatcccattacccccagtttattaagagctttaaactttaaagagcccatagctagcatttttaatgcattttagcaactattgtcaggaatataatattttatcagtattgacttatttagttaattacctttataaatgttatactggaatcatggacatccttgcactttgaagaggaactccatgaggctccacctgaaaataagctgccgaaggatcatcaaaactaaaggtttttcagagcaactaagttttaaaaataagagctgtgattaactatgctttccatatttatatgctatttatgaatcataccgttaatttgataagacaggtaatatagataagacatgatgcatttttgttgaatttattatctgaagctgcagtaaacatttaagttcactagattgataacggctaatactatttattgttaggattgcgaaatctgctcatgagtgatcctctctgtcttttaagtcaaatatgtgaatttacttccaagtgtatctttaaagacttctgaagcaatcttgtgcaatggcactttttctacaaagcctatcaggatcgttggctgaactttacagatgaaatatggtagaaccaatttttcatataagggagaagctctaaagaaacaactaataaatgccctgatgatgcccacatgggtttggtccctcagacctttcagccactgtatcagagtattgtgagtaacggattagttccttctagaaagaggccagatcatctgttttggttactttgatgatttgttattctgtaagtctgaaatagaaagacctggagcctaagaaaaggcctccaacttagggaagtctgtaacacaaagactgagcaagttttactttttctctatgttttttagtgaagggaaaaggtgttcttgccatgatctggccttacccacattgggaaacgtgtgaatttcagaccaaagaccaagtaaatgttaaagtattcctttctctctcattgtcctccatacacgtatttcgtttggaggcctctctcaaatgtatagtttgtagatagttatgtgctggtatgtttttaacaactggctctaagagaaaagtgaatacgtacatatacatacacaaaacatttacacacctatatccatacatatatatgttaataaaatccatggtaccacttgcaagttaaagtaaaaacttccactaacatttctgtatataatttgagaaataaattttaagctaaactgctttcttgattttcagtttagacctataacttcagaggaattactatttcttgtaaaaattctatcaatttttagaattttattgccaacaatagtgtcacaaaatcagactgcaaactgcttgattactatctgtttgatcagagaagtcacttacacattaactaatgggtgcagtcctgacataaaagttggttatgtgcttttatttctggtttcaaaaaaaaaatgaaggaaaatgaaagtatgtcaaaactttgctcagatgtcaatggcatgagcaactacttgctgaattggataatagttttggggtactgaaataatatttccttaatatttcgggctattcagaatgtaatagctatagatatgtcacacttttaagtttaatctacattattaagattttctccaagattttcttaagtctagacaatcaataataaagtcctaatttatagtggttgttgatttccatggtgtaagaatgtccaccaggctgatttccagctacccacacattattgaatgcagagttgggaagagatgcacaatagcataccattaaatagcatttctacaattcagatagtattgacataaataacctcaagagcatggagagtaaatactaaaatgtactgtattttcacctttctaaatttaatttaactgtaattttatataatttaatttttaataatggtggtgtttaacaaccagtttgcaaaattcctgcaattttaataattggtccttgtgagtaagattgcattcatttgagccagctccagcacaaccctggctctgtgactgcttatagagattaagattaagtgactgcttaagagaatcccaactttctgtctcaagcaaactggacaggtgtgtttcctcatacttcaccacttccccattgcaatccatccacactgatgctaccagtttcttgattactcacacatctgaccatttcactcctgtactcagaagccttggatgtctactttttaaattagaggttccaatctccttagcatgccacacaaaggtttgtgtcaactgaccttaagctgccatccagtcatatctccccactgtatgtccatgttctctagtcatattagattagtctttattactcaaagaagccatggctggccacaccctagtgccttcaatgactctcttctatctccctgaatggaccttgcccttttctctgcatggaacttagtgacacccttttccagatctgactcaaatattcttctccttgggaaacttttctcactctcttctccctccagtcagaaccacatgctcaacccagtaattctcatgaacttttgtacatatatctgctatagcacagctttctttcacatttatgattttctgaaagcatgtggtttatttatttatccattttattacacataaactccttgaaacattacctaattttcccaggccaggagcagtatctgtcatatgtgcatgctcagtaacccttgtttaatgtggatgacattaagaccttaactatactggcattgcaagcataaatcatgtactttcacaatatagtttttcttaataaactacttaattgaatttcatattattctgtttaggacttctgcatctactctagtaattgagattagcttcaggttgtcttgttttcctttcatctagttttgatttcatggtaacactaactcacagaattacatagaaggtgctatattttcctatgctttgaattggtttataaaacctagaaagttttttttaagtttctggcaaaaatagaaggcatctcataaagaatgtatcatcagagaactatattcaaaagtcattggaaataatctgttctctgtgtaaccatgttaccaatacaaaatacaatttgtttcattcgtttcagtttgctttcagtgtcagagtttgcttattttccttttgatttaattttatttcttgagcttgtaaatcattaacatggtttaaattgttactcctttttacaaaaaaaagtagtactcaatacacagttttttcaccttttttataaaaacttcaaatatatcatggagatttctgtaccaacacatggagatgattctcattcatttccatggcttcccaggtgttctactgtgagtctgttctagacattactcaacatttcccctgtggatagactttaacattatttccaattttttatattacaaataatctgcatgtacaaccttgtacatctttgttgtttcatatatgtggagttgtattttcaggatagattgtcaggagaattcctgggtccatggttaaggcatatgttattttgttaggttttactaaattccgcacaaaatgtattaatttgtgtttttattttattattattttttgagaaatggggtttccctctgttgcccagtgcagtggcaggatcatagctaactgcagccttgaactcctgggctcaaggaattctcccacctcagccccttgagtaggtaggactacaggtgtgtgccaccacacccgactaaatttcccaccatacatattataccattgtacacttccaccagcagctgtatgagtgtgcctatttctcttccagccttggagtccccagtaactaggattacaggtgcataccaccacacccatctgtttttttttttttttgtattgttttttgtttgtttttgtaaaacagcatttcaatatgttgcccaggctagtcttcatggtctcaagccatcctccctccttgacctctctaaatgatgggattataggcatgagtcactatgccccactgggttttggttttataacaaaagtttcctgcccaggttcccagtcaggcccatttatgcaaataaaggatttaaattcacttagttctgatcagtcaatgtaacttagttctgattggtcaatacagtcaagtcctgatatggctgaactctgattggccaccatagctgaacactgattggttggcttccaagcccagaagtctctgtgccggatgattcttttaaccttgggagtggttgcccagaggctttggctgtagttttaccttggcaccaacaatgaccggtttggcttgattatagaaagggaagttttgtgatacttttacaacatttttctgagaacacagagtatttgaatgctccctcacccagctgtggccctctggttctgtttgaagtttgagaccctcagtttgtcacagggagtccattttgtctgtcggccaaggatatacttcaacaatgtgatattttgtatacattttttttttagacagagtctcactctgtcttggtgtgatctccactcactgcaacctctgcctcccaagttcaaaggattctctgcctcagccacccgactagctgggattacaggcatgcacaaccatgctcggctaattttttttttctttttgtatttttgctgttgtttttgagacagagtctcgctctgtcgcccagactggagtgcagtggagtgatctgggctcacggcaacctctgcctcctgggtccaagcgattctcctgtctcagcctcctgagtagctgggattataggcggcccatgaccacgcccagctaatttttgtatcttcagtacagacagggtttcaccatgttggccaagctggtctcaaactcctgacctcaggtgatccactcgcctcggcctcccaaagtgctgggattaccggcgtgacccgctgcgccctttttttttttttttttttttggattcttagtaaagacagggttttgccatgttggccaggctgatctcaaactcctgacctcaagtgatacacccaccttagcctcccaaagtgctgggattacaggtgtgagccacagtgcccagccatattttgtatactttaacaatgtgatattttgatacatgcattcaatgtgtaatcattaaatcagggtaattaggatatctatcgcctcaaatgtttatcatttctttgtgttgggaacattacaaatcttctcttttagctaatttaaaatatataatgtgattattaactatactcatcctactgtgctatcaaatggtagaacttattccttttattttctacctattaaccaaccttacttcattccctaccacctcctccacctttcacagtctctggtaaccataattttaccttctatctccatgagatcaacttttttagctcccacatatgactgagaacatgtgatatttttctttctatgcctgtcttatttcacttaacatcctccaggttcgcccacgttgctgctaatgacaggatttccttttttaaggctgaatagtattgcactgtgcatatatagcacatttttaaattccagtcatccattgatggacacttaagttgattccatttcttggctattgtgagtaatgctataattaatatggaagtgcagatattttatatattttcttaatgtgttagaattgagattcattttttgaaccattttattttcagaattatctttataaaaatctcagaataaactcacttttctgagaaaggagctcatcagtaaagtcagtatcttgcattccatatagtccattctttggtggttaaattttttgcaacttacattttattgtaattttaaaccacccctacggttatttattcttttcctaatgaaattagaagttcagtctaataactgttgtaatacaacaaataacttatattaatcaataatttctaatatttgagaaacccaatttaaaaaaaaatgactttgtagatgcttgaagttatatcttgtaaatatccaggtgtttggtttgttttttccattgtctggagaatgtggatcatattttagttttctaagtaactgaggtttaggatcattgtcttcccttatgtcagtcagttcctgctccagcctgtgactttacatttctcttcataaaattttaatttatttttataatgttatttgatcccagatttctccagctctggctttgttttccctagtaactaatggatatgagttatactgttgcctcatagctaaaaggggctggttttaactttttgttttgaaataattataggttcacaggaaggtgcaaggctagtatacagaggttccctgtatccttcattaattttatcccagtggctttatcttaattactatagcacaatttcaaaaccaggcatgtgacattggtacaatgtgtgaatagttccatataattttatcacgtgtgtagatttgtgtaaccatcacaatcaaagtacagaacaattctatcatcacaaagatctccttaatgttacaccttaataaccacacctcatgctatcccctcagcctcaccatcccaaacccctggaaaccattaagttattctccatccctatgactttgttttgaaatgttatataaatggaatcatatagtatgtaatattttgatattggctttattttcagtcaacataatttcctagaagtccattctactcattctgtataccaatagcttttcttttttgttgctgagtaatatttcatggtataaatataccacagtgtgtttaaacattcactcatttaaaggacatcttaattgttctaaggcttacctattaaaaacaatctgctatggatatatgcatacagatttttgtgtgagcataacattatagactgaatatttatgtcccttagttcatatgtttgtgtaccctcaattcacatgttgaaattctaacttccagtgtgatggtattaggaggtggagttttgggaatgtaattatgtcataagtgtagagccctcatgaatgagattagttcccttatgagaagcgaatccagaaagcttgctttctatctctcttctctctctgccacgtgaggatacaagaaggctatccacaaaccaagaagagttccctcactagagatcagatctgccagcacccggatcttagacttcccagatttcagaactgtgagaaatatttttgtttgtttgtttgtttaagctacttggtctatagtatttttgttgtagcagcccaaactgactaaaacacatacattttcatttctctgggatgaatgttccatagtgggagtactagatcatgttgtaagtatatgttttgattttacagaaactgcaaaatgtttcccaaggtgatctgtaccattttatagttttaccagcaatgtatgggagatcaagttttcccatattcatgccatcatttgatgttgtcaatttttaaattttagttgcccagtaagtgtgtagtgatacctcatcctagtcttaatttacactttcctaatgagcattaatgttaaacatctcctcatgtgcttttttgccctttgtgtgtccttggcagtgaaatgtttcttcatgaatattgttcattttttactgggatagtttggttttttattgttgagatttgagaattctttatattaacatagatcaagtattttaccatatatatggtttgcaaatatattctgtaagtctgcagcctgtcgtttttttcttcacggagactttcacagaacaaaagcttttactttttttttcttttctggattgttttgatttcatgtctaaaaactttttgcatacatctagactcaaaagacttttctcctacatattttttctaaaaggtttatagttttacatttttcatatttaaatatatgatctatatgagttaattttaggcaaggtgtaaggtttaagtcaacatacatatttttgcctattgctctagcatcagctattgaaaacactatccttccttcattaaattgttttttaatctttgtcaaaactcagttggtcatacttgtgtaggactatctgtgtgttctctcttctgttccattgatctattctgccattactacacagtgttgattactatattatataataagtcctgaatttggttacagttatccctaccactttattctttttcaaaatagttttagatgttctagttccttttacttgtacttttaagatttattgtgatttttcacataaacaatcatatcatctgtgaatatagggagttttattttctcccaaatccatatgcccttaatttctttttcttgccttgttgtactagcaaggacttccagtatacagttgaatttaattgtgagtgaacattttgccttgctcctgatcttagataccaatctagaatccaggtagaatctgaatgtctaggattaaggggaatcagaagaaacatgttaagaataaaacaatttatataatgtaggacttatatttctctgtcgtaacaatcgtagagaagactcttttgaaggaattcctaatttttgttattatattttgaaagggggaaactgtcagtgatctagtaacattgttatttcattggaaggcagtaacttttatttccaaaatcatgttatttgggtgccatatgatggtcatatattactggttgtaatagcagttgtaaccacccaatgggtttcttttgcctgctgcccagataaagccaatttatcaatataaggaaattgcaatagagaaacagtttaatacatgtaaaacaggctagaagggagactagagttttattactactcaaactaacctccccgaaaatttggaggctagggtttttcaaagatagtttggcaagcagggggctagggaatgggtgctgctgattggttgagaaagcaatcatagggatagggaaaatggccttcctgaagctgagtccacttctgagtagtggccataggaccagttgagtcaagagtcatggatccagtggggccatccagtcatcagaaatgcaaaagcctgaaaagacatccaaaaatccaatcttagattctacactaatgacattatttacaagagtaattggagaagttgcaaatcttgtcacctatagaataatggctggtaatggaataatgtttcaactacaaattaagaccctctcatcctcctaacctggtaggctttcattagttttacaaaggtggtttaatttattgagaagggctattataacttaaactagaaactaaatttctcccaaagttagcttggcccgtgcccagaaataaccaagggcggtttggaggttggttaggtaagatctaacaagatctagcaagatgaagttggttaggtcagatctctttcactgtcataattttctcactgttacaatttttgcaaatgtgatttcataatgagttcagttggaccatgtaattttgtacaatttaatggaaaagataatagggtgttaattttatttttactgtgtagaaagaccttgagaacaatttagttaaatatggtccagttctgataaatttcaggattttaaaagaatcttggtgtaacagaagacactgagagtcagacctgcccatcccactggtctgatatgggttcttaacagtagaaggaaggaatgggttaatgaccccatggaagggagtcaaaatgttctgaggatccaaaaatcttctcaaagcaccagccataccccttgtttggctctaaatttgtcttctaattgctttacagtattaaaggaaagagaaaaattccatcttttagcttaatttcatgcttcttccttattcttatcccttctggcacaccctgattaagaacaaagccatttaatctcaccgaaatgagtactgagatacggggccatggttaaagaccaaacacatttaattgactatgatttgggggagaggtttttattgtgtcaagccgaaaattttgcttaaatttgtcagacagatgttcttacaaaagaaactcattattgagataaattaaggaggaaagggtggggcccactaacagttctcttctagggtaaccgtagactagaaagaaaagctgctgggactgaagtcctcagagagtggaatctgagatacacagacattccccctaccaccccacccccaccaccttctctttcaacagccacagaagtttttatttctgatgtcacctttattttttaaagtgctccaagagcaagagattcagccactggcagctctggattaattttctaaaattttttatttgtcctgcaaccctataaatatgtctcttcaatctccatgtctgaaaatatcagaaaagattcttactggctcagcttgggtggcatgcccaacctttgaaccaatcatggtaccccagtgagtgcagttcctttattgattaaacctgagtgcagagtggactgccctgattgaccattttcatcatcccaatcttgttctgaagagcaagtcatgaaccacttgtgaaatagaacatacaataaaacaatagaacacaacacaataatttagaaagtaatgtcagaatgcttccaccatagcatattgtttttgaaaacttttgttttagctcttggtatgtacatgtttccctaactgtgactttggtcatggaataaaaggtatttcttaaatgtttgttgtagttaaaaaaaaaaaaagtgaaaaaacttttagctctactgtatggtttgggtacttgaattcagtcaatgttgatgtttccagattaggagtttgtgatgtgttacagcagtaagacagttcccttgtttggtcttttgcagaacagactgcattagagcatgattgctcacttaatctctctgctcctcattcacccactttagagggtaatcagatgtacttatgtcccttctgggctttaacaccaagtattatgtgtccttgctcattctccatttcatttgtctttaatccccctacattccctattttccacagtataattacagtagaatattgtcatttcctttagcaaatgtttactatggctttctgaatttataaatgaaaaatagccaacactcaccaaaaatgttctgttttacttattaaaatcccttgtcatataatacaatctgcatgaactaaggatgatagattaatgccatcattttgaagcagctgcaattactacattgaacataagcgagttactgaaatgatattttttgaaacttgatcacagctccttttctgaaagggtgtgtggctctgagaactgttgatttccaataattatttcccagttaattgtggggcattgccctgcagttgttacttaaatctgattttattttccttctactagtataggagaatctttttaataccctttttaaagatttgtctaatcatcaagaacattattaaataacagtgattttaaaagtcctctaacaacaactactagtattccactaagaaacaaagattatccatctaaacatattaacaaatgctttttaagcatctactgagtttaagatttatttttcctttagcaaacaggtttgcattttactcagcattcaaacatccttacactcgtagatggatcctggtttatcactgttaactttttaattggctaccagagttgattgctcatatttaatggaagatttgtgtatatttacttataactgagaatgtgctgcacttagtagcatgccttcttcattcacttttgggatttttttaataatttgaaaccatttcgttagctgtagatttatccttttcttaaatgtctaagaagaagcctgatatttgaggatgttagctcattggtaacctcatttttttccccattcatcttaatcctcactgctttctaggtttaatttaagcaatttctattttttcagaaattcttacatttcttcaatattttcaaatatgttaacataggttgttttaaactatgtccttgtaaccttaaaacaattcctaaatatcgctatctaaattaagttcccaggaggtttaataattgttttcaacaaatagctcttatatttatttaattctataggtttagggtaataattttatggacacaaggattgtgaagaaaataacttttggccgtgtgcagtggctcacccttgtaatcccagcactttgggaggctcaggtgggcggatcaactgaggtcaggagtttgagatcaacctaaccatcgtggtgaaaccccgtctctactaaaaatacaaaaaactagccaggtatagtggcacgtgcatgtaatcccagctactcgggaggctgaggcaggagaatcactggaacccaggaggtggaggttgcaatgagattgtaccactgcactccagcctgggcgacagagcaatactctgtcatacacacacacacacacacacacacacacacatacacacacacacacacacacacagtattaggctttggtttgagatataacccacatactaaaatattagtatctttatacttataaatacgagtatttataagtatgaacatatttatatctcagtgtgtccattatatctcaaaccaaaggctaattataggtttgtatcttagtgtgtatgttataaaccttataaacattataaactttattatagtgtattaagcacttcacataagtaaggtatcacatacctgtatgtaccttttatcttttggtttattaacatagcatggctacggtcttctagacatataaccatcctagaattctcggaaggtaattctttggcagaagaaaacatgcgccctaggagtatgtttagatatgcccattccttgactgatgtccatacagtcatgctctcccaacaagagttgtgctgaaagctgcaagtttacaaatcttcctttccttctaatcatttagtctaattcgacactctaactaaaattcaacccccaaaatatgattccccatcttcacattatttttctcaggaattacataggttgtcacaataacatcctaatttgtttgttcattttcccaagaagaatggcattttcccttccaggagcctgctataatcactgctctgcctacctgaagtaggtgctgaaacagttccacccagaaacatcaagttctgctgtcaatactaccgagtattaaaggaaactgcttcggataccccaataaccagaactgttctgagtcctgtttacgaaagctgtagtcttattgacgaaacagcattttgtaatccttttgtaaactagctctttctcagaaattgagtggctctgaaaagggcctttgatttcagctttggggtttttgtttttgtttttgtttttgtttcttctagacattagacattcaagtcacttcgctggcttttacaacttgggtggttattcatactggactttgtggtagtggctcccaatcctttgggacagcagcacagcttggatgttgggcaaaacgtcaccctaagccattgtcactcgggccagcagcttgtcgagctccttgtcgttgcggatggccagctgcaggtggcgcgggatgatgcgggtcttcttcttgttccgacggcgttgcccgccaactccagggtgtcggaggccaggtactccagaaccgccggcaggtacgctagcgtgcagcccccgaccctctcggcatcgttgcccttgctgagcagcccgttgacaccgcccacggggaactgcagaacctctctgaatgaatagcgcgtacccttcccccgagtttccctagtctaagacatagcccaaaactaaaagttataacggaaaaagacacccgttaaaacgggtactcagcgtatttctagtctgacagcagattgtggattatctgattgattggctgatagccatctatccaatcagagaaccttactgctattgccttatttacatactctacctattatccaatcagatgttggatgcaaatgacgtaggttgagggccatgcctataaatatcacgcttcactccagtcaaacatcagttagtgatctccctgtgaacttggaagataaacatgctggagcttgcttcaaagggcactaccatttccgaaaagggctttaagaaggcagttgctaaaactcgaaggaggacaaaaagcgcaagagatgccgcaaagagagctattctatttacatctacaagctgctgaagcaggtccacgcggacactggaatctcttccaaggccatgagtatcatgaattcttttgttagtgacatttttgagcgcattgcctgtgaggcttcccgcctggcgcattatgacaagcgctcgaccatcacctccagggagatccagacggccgtgcgcctgctgctgcctggggaactagccaagcacgttgtgtcggagggcaccaaggctgtcaccaagtacactagctccaagtaaaacatgatagggccagcagatgagctccacaaaccaaaggctcttttaagagccaatgaaagtttctaatagggctgtagaatgtttattttattatagagtatgcctcgttgccagactgataattttttcctagactaggcataacatggttatctttaagtctaaactttgcattaatcaactgtatctgccccagtattggtgaaagctaaaatctcacagccgaggcaattaaatgggagctcccgtaatcctgggttcatggggatattctttctgtggacagtgccatggggaaatacggcttttttgtctatgacgttttctactacaaacactctacgatgacagcaaaaaaggcctggagctccccacttagggaagtctggcactgagcattaggctgtttgctttttcttgactttggccataatgtgtgcaaaacattctccaagtccgggtggaccagctccagcaccttgtagatgtaaatagaatagctctctttgcagcatctcttgtgctttttacgctccttttcttgcacattatgaaaagtgatcaggctaactccccttgaactgctggaatttgaggtccaaagcctaaggtttctgcgtctctgtgaactccagtaaactgcttactcaatatcacagttcttatgttgcttagccgcttaagaattatctccacagggatttccagttgatcccaacagaactgttcctgaacttctgcattctctatatccatgagtaccaccctattcacatggttgtccaagccagaaatgtattttttccctaatagtctctgttcaacctccatccacttcagtctctcaagatatggtaattttacttcctacatatttctgttgtctgattatacaccatctccaccgctaacatttttgtctgcatactcatgatctcacacctgaattagtttccaattaatctcactgctcttaatcttgcctccctaaaaaccactctccacccaactattttcattttttaaattgacaaaaattgtgtatttactgtgtacaacatgatgttttgaaatatgtatacatcgcggaatggcaatctaattaacatatgcattaccccacatattttttatgaaaacacttaaactctactctttgcaattttcaatacaacatattgttaccaactataatcagcatattgtacaatagagctcttcagcttattcctcctaagtgaaatttcatatcctttaaccaatatcttcccaccactccccaactctagccactggtaaccaccactctgctacttatatgagttcaacttttttttaattccacttatgagatcatacagcatttgtctttctgtgcctcgctcatttcacttaacatcctccaggttcatccatgttgctgccaatgacagaattctttttcttttttgaggccaaatagtattctattatgtatgtatgccacattttctttagccattcatctcctgaaggacctttatgttctttctatatcttgtctattgagaataattctgcaatgaacatgggagtacagatatctctttgagaaactgattttatttcctttcaatatatacccagtagtaggattgttggattatatggtagttctatttttaattttttgaggaaattctatactgttttccacaatgtatgcactaaaatattaccattttcaatcttatttgaagcacaaatattactatatcacacattttaaaaaatattttgaaaactcaatttggtattgttttattaatagtattaagtattttattgcatgcacttagaaatttatattaagctgtgtataggatcagctagacttgcaaagaaatcaatagtacaataaaagttttgaatgttggagctttttggattacggatgctcaacctatattgcaaacatgtaaaactcaagaaaatctatcaagaaaccaataggaaaataagtcaattcagtgaggtactagaaggatattaaaaaaaaatgcacggaaagcagtcttacatatataacaaaaaaagttaaaaaataatgaataggaaatacctcatttacagtaacaacaaaaacaaaatacccagaactatatttaactttttaaaatgccaaatatatatgaaggtagatgatcagttcacacccatcccgtggttttctgtaggtgaatgactcaggcagcacctgaactagctcagttctagaaaatggacctgagaggaacgggtcctctgggaagactcctcttgctttcaatccaagacccagtggaatagactgactcttcctgcctttactttatcctatcctctctgcatgaacacttgcaactgtaactagtatgatggcaaagtcacagtgtggagaagggcagaggcaagactgcagggtagtggagccagggctgtgattatcctattggtggaacttctctgcctttatgttgtcctgtttggttgcattacttatctcaaccagttcagctagcatttcctattatttgcagccaaaatacatctgatataaaagctacatgaagtttggtctgaaaacagtttttatttgctggtattcctacttatctattgcccaaataagcctaaaagtccttgggtaatcagggtagtctgacagtggtcacaaagtcgacaggttatttggcagctatgtgatacctgctgttttccaaggtgttagagaagcatgaatccctgattagagatgatcccatccccaatacaaggtgagcatagatgctagatgccccttccccccaatttgtcacctccctggaagatttcccagctaaagcatgcaggggctttgcagggactgtcttactgttcacaaaagtgtgggggcacttattttaacgggtcttgttatacattgatatatttttttgtttgtgtttgagacggagtctcgctctgtcacccaggctggagtgcagtggggcgatctcggctcactgcaacctccgcctcccgggttcaagggattctcctgcctcagcctcccaagtagctgcaattacaggaacgtgccaccacgcccagctaattttttgtattttgagtagagacagggtttcaccatgttagccaggatggtctcgatctcctgacctcgtgatctgccctcctctgcctcccaaagtgcaggattacatgcgtgagccaccgcgccggccggtactaactttttaatgtagagaaagcacatatacatatccaaaattttgttaaaagataaaggttaaatgaagatgcgttaaacaaattgagaattccagctaaccacaggtttccaggaagtaatatttgatccatttttaaggtggctgaaatcagtttaatgcttgggagctcttacagatggagtccaacaaccagtaacatgacaatgaaggaaactattataaatttaagaaaattaagggacattttaaatccgtttaattcctgctaaccagatttgtgagttctccagagttcgcacaatcatttccacaccttgacttacctgtggcacaaaacgtaacttcctctaaactattccctttttgtgaggtcttaaaatttgggatcataatgcaagttatactgtctatgtcgctgcgctttttagttttattatgtgtaatgctaaccttaaatataccagtatcagcatgtagcttttatacaaactagggggtttttttgttttgttttttgagacagtctcgctgtcaccaggctgtagtgcagtgacgatctcggctcactgcaatctccggctcctgggttcaagcgattctcttgcctcagcctcccaattagctgggactacagtgcacgccaccacgcccacctgatttttgtatttttagtagagacggagtttcaccttgttggccaagatggtctccgtctcttaacctcatgaaccgccagcctcgacctctgcaagtgctgggattacaggcgagtcacggtgcctagcaaggattgtcttgctgcaactagttcgtctaccctcggcccacagctgatttggatatattcgcagtggctcacgcctgtagtcccagcactttgggagaccgaggtgggtgatcaccagatcgagtttgagaccatcctggccaacatggtgaaaccccgtctctactaaaaatacaaaaattagccgggtgtagtggtgggagcctgtagtcccagctgctcaggaggctgaggcaggagaatggcgtgaactcaggaggcagagcttgcagtgagccgagattccgccactgcactccagcctgggagagtgagactccgcctcaaaaaaaaaaaaaacccttacggttagaaactacacaaaaacgaagcccacagctgtttcagtatgtttaagtggctctgaaaagagcctttgggttagaaatgacgtttacttagcaggcttacttggagctggtgtacttagtgacagccttggtgccctcagacacagcatgtttagccagctctcccggcagtagcaagcgcactgctgtctgaatctctctggaagaaatggtggagcgcttgctgtagtgagccaaacgtgatgcctcgctcgctatacgctcaaagatatcagtgacgaaggaattcataatgctcatagctttcgaagagatgccagtgtccggatggacctgctttagcactttgtagatgtaaatagaataactctccttacgggtcctcttgcgctttttgccttcctttttctgggtcttaacgacagctttcttaaagcccttcttggaaatggtagcacctttagatgacacctccggcatagctaccacacacttctgcagcgttacacggttcttttccagggttacacagcactttccagtgctcaacagctcttcagtattaaacagctccaaatgacctcagctccaagtctcgccaagtaaacaaacagaactggaggatgaaagatgcggtatttataggcacggccctcaaacgccgcgttcggtatccaaaatctgattggacaatgggaagtggcgtgaatgcaaatgaggcgattctagtacgactttctgattgggtagacggccatcagccaatcagatagcaaatgccaacctcagtcagactataaataggcccagtagcagccctagaaatgtggttctcgtgttgctgcaatttgatgcgaggagatgtctggacgagggaagcagggaggaaaagcacgcgccaagtctaagtctcgctcttctagagcgggtttgcagtttcccgtaggccggatccatcgtctgcttcgtaagggaaactatgcagagcggataggggcaggcgcaccagtgtatttggcggcagtgttagagtatctcacagcagaaatccttgagctggcaggcaatgcgtctcgcgataacaaaaaaactcgcattattccccgccacctgcagctagcgatccgcaatgatgaggaactcaataagcttttgggcggcgtgaccattgcccagggcggagtcctgcctaacattcaggcagtgctgctgcccaagaagactgagagtcaccaccataaagcccaaagcaagtaacttaaggttgtcattggtaaaaagacttctgtgtcagaaaaaacaaaaggctcttttcagagccacctaccgtctcagaaaaaggctgtacgttacaaaacgttactgctgttaaccagccatcttacttgcctgtcacaaatgcccgtttaagcgcatttcgggaatgtacggggactgaattttcaaggagcgttccatcggccattagtttgaggtaattttggttatatatgtcactgggcgaggtggcttaacgcttgtgagcagtcagtacttgcacttcagtggaggttggagcgggagggtcgttcaagcctggggcttgaccgttaacataattgagaccctgtccccacagaaactagctgggtctggtgatgcaggcctgtagtcccagctgttcgggaggctgcggtgggagggttgttcatgagtccgggaggcgaaagttacagtgaacgaagattgattgctccactgcactccagtctgggtgacatgagcgagactatctcaaactagatttatgtatgttagttatgttaagggttacacatggaagtgaaaattgcattacaagcaggagaggtgtaatcttcctgtttaaatccaggtaacatcagtctggctggttaaagtacattttagagaatttcctttcaaatatggtagtttcacgaaatactcataattaaatgtggcatgtaagtaagttaatcttaaaatttgggtaagcatatatatttgatacctgtggtttcacgtactttgtaaagaataatagaattatttcttaaaatgtaagtaaaatatgtcaaaaagaagccttacgccatatgtgatggtgagatactagtgttagactcaggcaggaatgggactagaaggccgaacataatttgaagtttagaaatttggaagagtatatgcttcaaaagttttgactgttgaaaagaggcaaaatagtttgttgatctgtgtttgcagtttgtgctgtaaacaccaagagaaagtgaaaagcaaaacccattcagtaacgctgccaaataactaaattaaaaattattgtacgatattcaacagttgaccttacctcaaaaaaaaaaaaaatcatttggttaccaaaaaaaaaactgctaaacacttgatgtctacacataataaggcatgtatagaagcaggtaaagttctataaaataaaacatgccgagtaaggacaatcaagttacaaaagtatgaattaacctgcatacataataaataagggatgcagttagggacggcaaaaattgaagatatttgaaaacagaaatggcaactatatgttgaataaaactgggtaatatttagaacatggcaaatgtaaaacttaaaatcaggatataagacaaacctaaacagatgaattccaagtaattaatgtagatactttgtcaagaaagtggcacttaacttctcagacttgccaaggcagaggaggagggacttgactttatagaagagaacctgtgtattcttttattccaaatgcactacataatacttttatttctatctctaatgcaatcctattaaaattgcattaaactaaatgtttagatagaataaaatatattaaaaaattgtgaatacatgttacaggagacatgcccccttgatttttcaaaacaatttacctacagaagtttctgattcttctttttttggagccagagtctcgctctgtcacccaggctggagtgcagtggcgtgatctcggctcattacaacctccagctcccaggttcaagtgattctcctacctcagcctcctgagtagctgggattacgggcgcctgccccacgcccagctaacttttgtattgttagtagagacagggtttcgccatgttggccaggctggtctccaactcctgacctcaggtgatccgccagcctcagcctcccaaagtgctgggattacaagtgttagccaccgcacccagccttgatttcttcttatagaactttcacacgtttcatagagtttatctccaggtattcttttttattactgtattttggggaaatattagaagggtttcttttattatgttttctgattgacgatgttttacagatagaacattcttgatattcgtactggtttgtatttccttccttattctgtcatttctgttgtccagcttttttcctctgtggttttccaggtaggcagaaaaatcatataattttgtcctgttgttttaaatagttgactttgtctaaatgcattgtctaatagttacacgtgataataaaaatggtgatattgacttattttcccccccaacagccttcctctgtcgcacagacgagtgcagtggcctgatctcagctcactgca

SEQ ID NO: 423 - DNA, 68998 bp, Homo sapiens
  source 1..68998: mol_type = genomic DNA; note = NC_000018.10:2847006-2916003 EMILIN2 [organism=Homo sapiens] [GeneID=84034] [chromosome=18]
agaaggagaagtaggaacgagaagccggagggggcggccgcggagcactggttggagcgccgcgaagcgcccgagcctcttgccttcgcgggcggcgccctggccgccggcagccttgtggccggtgccccgatccgccgcgctccggacccgggcaggcggggcgcgcccgctgcgcgcgggatgtggcagcccagacggccctggccccgcgtgccctggcgctgggcgctggcgctgctggccctggttggcgcggggctgtgccacgccggcccgcagcccgggtatcccgcgcggcccagcgccaggaacaagtaagtgcgcgccccttggctggccccaaaccgcctacccctccccggcccccagttgagccccagagctgccctgccaaagacgacgagcggcagccgggggcctcccttggacttccccgggcggctccctctgcgggggaccgcgcgctccgcagccggcgcctcaggcagagctgactccgggggcgtgggcgcagagagcgtcccgcagacccgggcgatccgaaaacgactcccaggaattccatgagcccctgggaccatgggtgcttttctttcccgtcttggtcgggtccaggcgcgcgctctccagaggcgcacccgggcaccctccggcgtctgctcggtgaagctcccgcctccgcagagggcgacgggcccccccgaccctcgctcggtctggtgccgcagtcccctctcccctggcctcattgttctccgggtttaccccgtgcccctctccctctctctcctgcaccccaggaactggtgcgcctacatcgtgaacaagaatgtgagctgctccgtgctggagggaagtgagagttttattcaggctcagtacaactgtgcctggaaccagatgccctgtccgtcggcgctggtgtaagtcctggagccggggagcgggcggggcgcgcccgggccggggcggtgggggtggggtggggttgctgcgctgggctccagtccctccggtaaatcccttccagatccggtgaaaagcccgcagcggaaaagcgctccgagcgctcgcggggcaccggccacgctgggctatttagggagtgggtgctgcccgagtgagtggggaggatgcgcgcgcctcgggagtgtggggtcgcgggggcgtaggagaggatgaacaaagctcccactcccacttctgttttctccctttcaatgtttgtttgtaacataaggcagctgaatctaattggatccatattgtgtgttctggggcacacagaagattccaaaatgtatactgctaaagactattccgtataggattcgctgagaggtttggctaagtagtgttctaaaacgagtgagttctgtccgtatgtccccataaaacggaatcttccagttttgtagatgtctaagctaaaacctcaggaacactttgcttaaaagtgtggctccccagcatccctccccgcaacttagatttggagattctctagagattgtgggagagaatggccgttaaagacagggggaagaattaatcatctttttgcttataaagatttccccatcttaaaaaaaaaaaaaaacaggaagcaatgcaataaagtacaaatgccgttaaatacatgacactcattcaattgtcatcaggcaagtctttgggggttttgtatcagtctgataccggaagatgggccagtgtgaataaatggctgttgaggaacacatgtgatggctgaaattaattgttttccactaagaataagttgtttgtcttagagcacagttgtcattacagcagagaatagtcagtaggcggatctgtctttggcaaaaccaagggacagactggaacttgtactccaggaaaccttattccagagaacagtagatgagcctgtagtcttatgggaagtggtcgctgggtccaccccacgtgggcttctggaggagctgccaacagggttcagctaattcctgctcggcaaaaacaaagtaaaacaaacagaaacttagacgaggtccccatttcctaatatacagtggaaaacgctgaaattgaatgcccagctaggctatctctttgagttggatacattgtcagagagataaggtactgtcatccaaccttaatctcttagtaagattgagacctcatcgtctatggccagcagtcaacgacatcagaaccaagcaaggtttttacactgtgggagtgatacaaactaagtattcaactcagtttgaatgcatttgtttaaaattagaattgagttattagtcaggaatattttattcatcttatacaagaactgcatggtgtggcttgctataaccttaaaacttactggtgacaattcggagataaatgaatttttcattttgggaggtaatgcatttttgtttaaaagatggcttgtttttattttctcaaattattttagctgcttggaaaaccaaaggatgatttaattgttctatttgaccaaaactcagtgaaacttggctgtcagtggggagtgaatcgcctccagattggcaggtcaatgcaaggcagtgggagtgcatttttgccacccagtgagtaggacaacagaattattataaaaaatgacagatgtttctgttgttttattaaacaaagccaaaataagtgacctggatgttttatttcaataataaccatataaacaatacaagtgcatttttacattttaagtactgcactgtaagtgtgaagtttaagaaacaaagactgagttgatgaacctgaaaatcttgacattagcttcagcagtaaattcagtcttgacttttttcagtttctttagggatggaacagaatggtttatcttatttttcaactgaggaatgcttcctaagatttcttttttgttttttgttttttgtttgttttgttttgagacagagtcttaccatgtcacccaaggtggggtgcagtggcgtgatcttggctcactgcaacaactgcctcctgggttcaagcaactctcattcctcagcctcccgagtagctgggactacaggtgtgtgccaccatgcccagctaattttttttttttttttttttgtatttttagtagagatagggtttcaacatgttggtaaggctggtctcgaacttgagctcaggcaatccgcccgcctcagcctgccaaagtgctaggattacaagcatgagccaccatgtctggcccctaagttttgagaattggtggatgaatgaagacaaaggaaggagccttctttttatacttaacaaggaggaatggctgtttcacatggaattgttcagtgttttctgaggaatccagaagcctgagtcacctgggacctgtggaaggaaacctgaggttcttttttattattattgttttttagagacagggtctcactgtgtcacccaggctggggtgcagtggcaccatcatagttcactgcaacctctaactgttcggctcaagcgatcctcctacctcagcctcctgagtagctgggattacaagcagaagtcactgcatcctgctagttttttatttttatttttttagggatggggtctcactatgttacccaggctggaaaaaaacgttcttcagaaactcactctagagtgactgagggataatttgtgagcagtgttggaagtacagggctggaggttggccgagatgctggagatagaaacgcatttctgcagttgagagtgacggacaggttggcatcactgaggccttgacatggttgagcagagctgagttcttagggacagtggaggggaaggaagaggaagagctgggcaaggagagagagtgaagcaaagatattggtggaggaaaccccatcttagagactcaggagaagtcctggaggcttcaggctccagaaaggccatgggttagtgagcaggaagcaattgtttctgcagaaagaggccattcaggtcagtggggtgcaggcattgtaatttgtgtgagattgagggagtgagtcatgaagaaacttagttatacagaaaatgatatcatgggaaaaaggctctgatggaaaaaaaaaaaaaaaggagctgaatagtagccaagcaggtaaagaattacttagagagagatcggggccaggcaggatggctcttgcctgtaatcccaacattttgggaggctgaggcgggaggatcacttgagcccaagagtttgaaattagcctgggcaacatagtgtgaccctatcactataaaaaaaaaaaatagcagggcatggtggtgcatacctgtagtcccagctactcgggaggctgagatagaaggattgcttgagcccaggagttcgaggctgcagtgagctatgatcacgtcactgcgctccagcctgggtgatagagtgagatcctgtctcgaaacacagagagagagcattctgcctatctggggacagaagtaaagtagccatagagagagtgctccgagactgagggtgaaaccgctgggaaatggggtgtgatggaggtactcatttaaataacaggaggagggcttctgcgcccagccatgtcactgggccctgacagcctccttagctgtagagactgactacaggccgcaggtgccttgtcagaaggattagacggtgccctgtttacatgtatgaaaagccttagattccagattgtgaatttgaatattgttatgtgcaaccaggaacagaaggggtttttatataagtgggcattttaagtaatcacttttctgatactataaagtaccttctatgtgccaggccccatgttagggctttccattccatacattagtttatttagtttctgcaacagcccttcgggttgaatagtattgtctccattttaccaaggaggaaactgagatgagccattccctaagttgcttgtgatcacgtgagggtagccactgagccgcctgctaatccagggctttgcggactgccctctgtctctatagcaatgcagaatgtgcctgtttgtttgtcttagtgtgtgctttcggtaggttgcacagtactcaactactaagagcatttacaccttctttcataaaaggcaattctcatatagaagtgttgagaatgcatttctgtgtgcattcgcgcgtgtgcatgcatgtgcctgcatgtgcccttaaccctctctactgtgggtcatttgcctatgacgcatgaactatgtcatttttcacactatacagtttgttggcttattttaatgaagcactggcagattgaacgcttaaagttgttattagagaggcgagagttatcggacatactgcatggaccagtgagctcgaccgcttcaggacttccacatgtatgttcccgagctcagctgccaacatgaaacttgtcacaggggaatggtgttaaaagcaggcttccagaaaaagaatttaaagcccatgccctaatggttgtgatactagttttgtgtgtaagtaattgtgcaaaaattcgttttttcttttttgagacagggtctcgctctattgcccaggctggagcgcagcggcaccatctcggctcactgcaacctccacctcctgggttcaagcgattctcctgcctcagcctgctgagtagctgagattacaggcctgtaccaccacgcccagctaatttttgtatttttagtagacacagggtttcaccatgttggccagactgctctcgaactcctgacctcaagtgacccgcctgcctcggcctcccaaagtgctgggattataggcgtgagccattgcacctggcccgcaataataattcttaacacctataaagattcaccatcacttaggaatttaaaattgggatgtcttctctctctgtgtctctctctagtgcacaggtactagatgtgaggagggctctggatcctccgggcacaggattgcttcaacaaaacatgatttgtcttccctctgtaaattcctaagggtggctcaatagaatctgaggaagaggagaaggaaaggggcaccatcccctgggagataaggagaggacacagaagggacctgtggactctaaataacacctagctgcatgctaggcatttaccattcagtcctagttcccaaggtgggtctaagggtggttttcccctcctgaggtaattgttttactttatacttctacattaataaagccaaatctcttaaaaatttcattgtattggggaattttcccaattaatcctaaaaacccttggcagcttgaacagtctggtagatcctgccacccccccagcccttgggacattcccagcgatcgcccgtcagtgtggtggacgcagcctctgaatctggactctccggagctgctgtaaaagtgcagaggttctgccttggtcatgggctggttttagggacagatatgtggagacatggaatcggagtgacttggaattctttgaggcactgggcaggttgacatccgtgggattgaggctgaccgcagtgggaatatttccttaaagtgcatcgtgagaatgtgacgagccctgccatgttcattgttttccattcttatagcaaccctctggggtcactacccccattttacaggagggcaagtagttaggaagcagcagagcctgccttcaaacccaggcctgttattttcaagcctcgcactcctcccgctccacacctggcagcccctggaggtctcaatccacagccgggctgagcaccctgagggtgcatgtgtgatgcctaccgcagcgggtgctgcattgccagcctccctgtcagggtggaatggcaggagggaagggcctgacatttcttacagcctccaatacccattggtagtgtttggacgtacggctggtagaaaacagcaccgtgtttcttctctttattggactggcgttgttttctttcatgcttccaaattgtcccatcacctcctgctcagcctgatggttttagtattgggggctttgggaggtgtctggtccacagatagcctgcattgttggtgaagacatccaaggaccccagaggtgaggcaggattattccctctgagttcactttgcctcccaactcagggctgagtttctgtagggcccagagttttctctttctgacaccacacactgacttgggcttatcagcatctggccacctcccccctcagcccctcgaggcctgtgttgtatcttggtggaatttttcctattagctctttttctaaaaagatcttaccagtcgggggagggatctgggtggggccaacacacagagcctgtgctgctgagataaggcctgccaggaatttgcagcaggtgttgagttccgtggagttcaggacacctctaatcctcctcaggttccgaggggagcagatggttgttcagttggcagaaaatttgtcttattagggagtaacctcagccaggaaatgtggcttaaaacacacacacacacagaacatttggctgggcgtggtggctcatgcttataattccagcactttgggaggctgaggcaagaggatcgcttgaacccaggagttcaagaccagcctgattaacatagtgagaccttgtctttacaaaaaatagaataaactagctgggtatggtgctacgtgcctgtagtcccagctactggagaggctgaggcgggaggattgcttgagcctgggagttgaaggctgcagtgagccatgattgcagtactgcactgaggcgtggatgacagagtcaaaaacaaaacaaacaaaaaaacccagaacagaacatgtaaggctgcagggatcgggggaaagaaaatgagggcttacatcttccagagccagttttctgttttctacatctccaggaacagaataactttcagttcaaaaagtaccttttgtgtatagctttgggggaattttctttccttcagcttttaaacaaaagtttcgccatcaattggctgttaggaggcttgttccttggcatcggaggtaacttggagtcagctgaggaagactgagctcgtgtcagagactcctgcacgggagggctggaatcccaggcgcccagccctcgagagctgcagactgttgctattttgagtttctttctttgggtttccattccttatgggccccttggggctgctccctagaatctccagaccttcctttcaggtttcttatttctcttgttcctgtctccttcctaggttcccagtggaggagatgccatgcttgcagggcccttcggcatttccagaacatttccacaccattattttattcttaccacaagttcagccaggagactaggcagggccgagactggggccttggaaaaagaacttcatgctgaggggctacactttctaccttcgtcttacacaacagtgaatagcattcaaataggggtaatggccttacgaaaagcagcctgctttttgttagaacttgtcttaattaagctccgtaactggtcttcctctgttgatgtgttccacccacggtggcacgtggtatttgagttaaaatcctgaggtagccggaaaaggggaggcaggtggggccaggctgcagagaacggcaagtgggtgggaactccatccaggttgggtgggtggctgacgtgcttcggaagaggagacagaagagttgtcctacagcctgacatctcccaccaccaagctgtgtgatcacaggcgagtcacttagcccgtctgaggcacactttcctcacgtctacatgacagggttgtggggaggaggccccagtgcgggaacacagctgacagaacttttaaaaattgcgctgtcacactaacgtactgcatacccagcaggcacgtctggtgaacactcaccgttttcattgtttgtcggtttggaatgttattgcctcacaggtgattttatctttgaggactttgggtttgaagttaatgcttacggacacattggagaaaggctaaaatgctcacggttgaaatcgttaaattcagtgaattaagataataatgatgctggcttgcctaagatgaactttaagtgaagctcagccgggcacggtagtatgttcctgtaattccagctactcgggaggctgaggcgggaggatcgcttgagtcaaggagtttgaatccagcctgggcaacatagtgagacccccctctctaaaaaataaaataaaatttaagtgtaaaaaaattaagtgaaattcttagaaattgcactggaagccgagccagcagtgcagtctctttggggaaatgcacataagtgattatggtcaaagtcagtgctgaagtagcctgtgggtatttcttactggttctgcaggtgtctgtgtgcctggagtaggtcagtaaagaaaggttagctagatggtggatgttgctgtgagtggtggtaaactagtgccaatccccaggtgatctatcccaccgcccctaatgtgttccttgaattcttttagaaaaaaatcctcttcctcgtgtgcctaatattgttgttactaacatgtgctgcgtgtacataatgaagtaggtgccgcatccaacagttacacagaactttacatcctgtctttaaaaatcaaaagcggggaaaccgtaccagtggtgaggttccttctagtctcccacacaaatgttctgatttatcattggccgcgtgacttctttactgctcagcgttaactacttccatccttgatgaagtagttttctgggcttaaaaataacaacaaaccacttgataacatggtacagctgagcatgatttctccttacaaagaaccattttcctgggagaatcgagggaggagccccttatttttcaacatgacagcagttcacactgaagggaaaataatgaaatgactaaaactaaacatgccagtaagttttcttctttccttcctgttttaaaatggtgatgagggctgaaacaaagtagggagcattcaaatgagccaaattcctggttcgaaaatgctgtaaaagcaaacgtttctgggtgtgtcacttagaaggacccagaaggactcagctgccctttttttgttccacctaagaaaatattagaagatgagggaatacgcctaagaattactctttgcagtgtcagcctttcaggacaatgtattttattatgtgtttggttaaagaaaaactgtgtaggtgaagttttttaagtggatcatttcaatggaagaatttgctgagactttgcagcttttccccaacttttcccatctctgtgcacctttgtgattgcacaggttctgcctaatgcatggccttcattaggttatgttttacagagatttactctcagtccatcagaagacaaggcacaagatgtttccctcttacttgaagtggtttccctacatctgcttgacagggatgttgtgagaggataatgaggtaaagacctaaaagtgttttctaaaccatagtggtgacaatgctgcttgtttttctgctaactgaagcttttgcacatatcttgaaacggaggaggaaagccgagggggcgattgcgacagaactcagggcgtgggacgagttttgcaatccagcccttcttggggagaacctctctccattaaagcgactctggcttgcctttagcctttgaatgaaggactggggcagggaggcatggtcaagcctttcttaatatttcacacattccagaaccttgagtccggtctgttgtgctgacgatgctctggcctggtttatgtcaggcatctctgaccttggagattttgggcagctttcagcaggagcagcagcctgctggtgccaggaagcaaggtcagggcccccactccaccacgatgggcaatgcgccctttcccatcacaacaagtttcatcacctcctggccactctcgagatttgcgagtcattctgttgcattgctgctgaaaataactggcaaggcaaggcacagatctccttctcacggccggtgcagggggaaagcagaaatgccgctgtatctcgtgtctggaaccaaagagcaaagcactttctagaaactccttgtcagaatcattaccggaaaatgagtaatcccaattaggaagcactttttgttgtattttcttttttatttttttttatttccataggtttttggggaatggctggtatttggttacatgagtaaattctttagtggtgatttatgagattttggtgcacccatcacttgagcagtatacacggaacccaatttgtagttttttatttctcacccacttcccatccttttcccctgagtccccaaagtccactgtgtcattcttaggcctttgcatcctcatagtttggctcccacttatgagtgagaacataatgtttggttttccactcctgagttacttcatttagaataatagtctccaattccatccaggttgctgcgaataccattaattcatccctttttatagctgagtagtattccatcatatatatatatatatatatatatatatatatatatatatatatatatgtgtgtgtgtgtgtatatatatatatatatatgtgtatatatatatatgttccacagtttcttttttctctttcttttctttcttctgattctcactctgttgcccaggctctggagtgcagtggcgccatctcggctcactgcaacctctgcctcctgagttcaaatgattgtcccacctcagcctcccgagtagctgggattacaggtgcctgccaccatgcccggctaatttttgtatttttagttgagacggggtttcaccatgttggccaggctggtctcgaactcctgacctcaagtgatccacccaccccagcctcccaaagtgctgggattacaggcgtgagccaccacacccggccctataccacagtttctttatccacttgttgattgatgcacatttgggttggttccacatttttgcaatcgcgaattgtgctgctgtaaatatttacgtgtaagtatctttttcatataatgacttctttgtctctgggtagatacccggtagtggggttgctggatcaaatggtagttctacttttagttctttaaggaacccccatgctgttttccgtagtggttgggctagtttacgttcccatcagcagtgtagaagtgttcccttttcaccacatacaagccaatatctattatttttaaatttttttgattatggccattcttgcgggagtaaggtggtatcgcattgtggttttgattttcatttccctgatcattagtaatgttgaggattttttcatatgttttttggccatttgtacatcttcttttgggaattgtccattcatgtccttagcctactttttgatgggattgtttgttttcttcttgctaatttgtttgagtttgctgtagattctggatattagtcctttgtcagatgtatagactgtgaagattttctcctactctgtgggttgtctgtttaccctgctgactgttccttttgccttgcaaaagctctttagtttaattaagtcccacctatttatctttgtttttgttgcatgtgcttttgcattcttggtgatgaagtctttacctaagccaatgtctagaagggcttttccaatgttatcttctagcatttttatagtttcaggtcctagatttaagtccttgatccatcttgagttgatttttgtgtaaggtgagagatgaggatccagtttcattcttctacatgtggcttgccagttatcccagaaccatttgttaaatagggtgtcctttccccactttatgtttttgtttcctttattgactatcagttggctgtaagtatttgggtttatacctgggttctctattctgttccattggtctatgtgcctatttttataccagtaccatgctgttttggtgactatggctttatagtatagtttgaagtcagataatgtgatgcctccagatttgttctttttgcttagttttgctttggctatgtgggctcttttttggttctataagaattttaggatttttttctagttctgtgaagaatgatggtgttattttgatgggaattgcattgaatttgtagattgctcttgacagtatggtcattttcacaatactgattctacccatccatgaacatggtgtgtgtttccatttgtttatgtcatctatgattccttttttttaatatactttaagttttagggtacatgtgcacaatgtgtaggttcgttacataggtatacatgtgccgtgttggtgtgctgcacccattaacttgtcatttaacattaggcatatctcctaatgctatccctcccacttcccccaaccccacaacaggccccagtgtgtgatgttccccttcctgtgtccatgtgttatcattgttcaattcccacctgtgagtgagaacatgtggtgtttggttttttgtccttgtgatagtttgctgagaatgatggtttccagcttcatccatgtccctacaaaggacatgaactcatccttttttatggctgtatagtattccatggtgtatatgttccacattttcttaatccagtctatcattgttggacatttggcttggctacaagtctttgctattgtgaatagtgccacaataaacatacatgtgcatgtgtctttatagcagcatgatttataatcctctgggtacatacccagtaatgggatggctgggtcaaatggtatttctagttctagatccctgaggaatcgccacactgacttccacaatggttgaactagtttacagtcccaccaacagtgtaaaagtgttcctatttctccacatcctctccagcacctgttgtttcctgactttttaatgattgccgttctaactggtgtgagatggtatctcattgtggttttgattgcatttctctgatggccagtgatgatgagcattttttcatgtgtcttttggctgcataaatgtcttcttttgagaagggtctgttcatatcctttgccactttttgatggggttttttgttttttttcttgtaaatttgagttcattgtagattctggatattagccctttgtcagatgagtagattgcaaaaatgttctcccattctgtaggttgcctgttcactctgacggtagtttcttttgctgtgcagaagctctttagtttaattaaatcccatttgtcaattttggcttttgttgccattgcttttggtgttttagacatgaagtccttgcccatgcctatgtcctgaatggattgcctaggttttcttctagggtttttatggttttaggtctaacatttaagtctttaatccatcttgaattaatttttgtataaggtgtaaggaagggatgcagtttcagctttctccatatggctagccagttttcccagcaccattcattaaatagggaatcctttccccattgcttgtttttgtcaggtttgtcaaagatcagatagttgtagatatgcagcattatttctgagggctgtgttctgttccattggtctatatctctgttttggtaccagtaccatgctgttttggttactgtagccttgtaatatagtttgaagtcaggtagtgtgatgcctccagctttgttcttttggcttaggattgacttggcgatgcaggctcttttttggttccatatgaactttaaagtagttttttccaattctgtgaagaaagtcattggtagcttgatggggatggcattgaatctctaaattaccttggacagtatggccattttcatgatattgattcttcctacccatgagcatggagtgttcttccatttgtttgtatcctcttttatttcattgagcagtggtttgtagttctccttgaagaggtccttcacaatccttgtaagttggattcctaggtattttattctctttgaagcaattgtgaatgggagttcactcaagatctggctctctgtttgtctgttattggtgtataagaatgctggtgatttttgcacattgattttgtatcctgagactttgctgaagttgcctatcagcttaaggagattttgggctgagacagtggggttttctagatatacaatcatgtcatctgcaaacagggacaatttgacttcctcctttcctaattgaataccctttatttccttctcctgcctcattgccctggccagaacttccaacagtatgttgaataggagtggtgagagagggcatccctgtcttgtgccagttttcaaagggaatgcttccagtttttgcccattcagtatgatatttgctgtgggtttgtcatagatagctcttattattttgagatacgtcccatcaatacctaaatcattgagagcttttagcatgaaggttgttgaattttgtcaaaggccttttctgcatctattgagataatcatgtggtttttgtcattggctggattatgtttattgatttgcatatgttgaaccagccttgcatcccagggatgaagcccacttgatcatggtggataagctttttgatgtgctgctggattcggtttgccagtattttattgacgatttttgcatcgatgttcatcagggatattggtctaaaattctcttttttttgttgtgtctctgccaggttttggtatcaggatgatgctggcctcataaaataagttagggaggattgcctctttttctattgattggaatagtttcagaaggaatggtaccagctcctccttgtacctctggtagaatacagctgtgaatccatctggtcctggactttttttggtttgaaatctattaattattgcctcaatttcagagcctgttattggtctattcagagattcaacttcttcctggtttagtcttgggagggcatatgtgtcaaggaatttatccatttcttctagattttctagtttatttgcgtagagatgtttatagtattctctgatggtagtttgtatttctgtgggatcggtggtgatatcccctttatcattttctattgcatctatttgattcttctctcttttctttattagtcttgctagcggtctatcaattttgttgatcctttcaaaaaaccagctcctggattcattgattcttttgaagggttttttgtgtctctatttccttcagttctgctctgatcttagttatttcttgccttctgctagcttttgaatgtgtttgctcttgcttctctagttcttttaattgtgatgttagggtgtcaattttagatctttcctgctttctcttgtgggcatttagtgctataaatttccctctacacactgctttaaatgtgtcccagagattgtggtacgttgtgtctttgttctcgttggtttcacagaacatctttatttctgccttcatttcgttatgtacccagtagtcattcaggagcaggtttttcagtttccatgtagttgagctgttttgagtgagtttcttaatcctgagttctagtttgattgcactgtggtctgagagacagtttgttataatttctgttgttttacatttgctaagcagtgctttacttccaactatgtggtcaattttggaataggtgtgatgtggtgctgagaagaatgtatattctgttgatttggggtggagagttctgtagatgtctattaggtccacttggtgcagagctgagttcaattcctggatatccttcttaactttctgtctcgttgatctgtctaatgttgacagtggggtgttaaagtctcccattattattgtgtgggagtctaagtctctttgtaggtctctaaggacttgctttatgaatcttggtgctcctgtattgggtgcatatatatttaggatagttagctcttcttgttgaattgatccctttaccattatgtaatggccttctttgtctcttttgatctttgttggtttaaagtctgttttatcagagactaggattgcatcccctgcctttttttgttttccatttgcttggtagatcttcctccatccctttattttgagtctatgtgtgtctctgcacatgagatgggtttcctgaatacagcacactgttgggtcttgactctttatccaatttgccagtctgtgtcttttaattggagcatttagcccatttacatttaaggttaatattgttatgtgtgaatttcatcctgtcattatgttgttagctggttattttgctcattagttgatgcagtttcttcctagccttgatggtctttacattttggcatgtttttgcagtggctggtaccggttgttcctttccatatttagtgcttcctgcaggagctcttttagggcaggcctggtggtgacaaaatctctcagcatttgcttgtctgtaaagtattttatttctccttcacttatgaaacttagtttggctggatatgaaattctgggttgaaaattcttttctttaagaatgttgaatattggcccccactctcttcttgtagagtttctgctgagagatcagctattagtctgatgggcttccctttgtgggtaacctgacctttctctctggctgcccttaacattttttccttcatttcaactttggtgaatctgacaattatgtgtcttggagttgctcttctcaaggagtctctttgtggcattctctgtatttcctgaatttgaatgttggcctgccttactagattggggaagttctcctggataatatcctgcagagtgttttccaacttggttccattctccccgtcactttcaggtacaccaatcagacgtagatttggtcttttcacatagtcccatatttcttggaggctttgttcgtttctttttattcttttttctctaaacttctcttctcacttcatttcattcatttgatcttccatcactgataccctttcttccagttgatcgcatcagctactgaggcttgtgcattcgtcacgtagttcttgtgctgtggttttcagctccatcaggtcctttaaggacttctctgcatttgttattctagttagccatttgtctaattttttttcaaggtttttaacttctttgccatgggtttgaacttcctcctttagctcgtagtagtttgatcttctgaagccttcttctctcaacttgtcaaagtcattctgcgtccagctttgttccgctgctggtgaggagctgtgttcctttggaggaggagaggcaatctgatttttagagtttccagtttttctgctctgtttttccccatctttggttttatctgcctttgatctttgatgatggtgacgtacagttggggttttggtgtggatgtcctttctgttagttttccttctaacagtcaggatcctcagctgcaggtctgttggagtttgctggaggtccactccagaccctgtttgcctgggtatcagcagcggaggctgcagaacagcggatattggtgaacagcaaatgttgctggctgatcgttcctctggaagttttgtctcagaggagcacctggccatgtgaggtgtgagtctgcccctactggggggtgcctcccagttaggctactcagggatcagggacccacttgaggaggcagtctgtccgttctcagatctccagctgtgtgctgggagaaccattactctcttcaaagctgtcagactgggacatttaagtctgcagaggtttctgctgccttttgtttggctatgccctgcccccagaggtgcagtctacagaggcaggcaggcctccttgagctacggtgggctccaaccagttcaagcttcccagacgctttgtttacctactcaagcgtcggcaatggcaggtgcccctcccccagcctcactgccaccttgcagtttgatctcagactgctgtgctagcaatgagcgaggcttcatgggtgtaggaccttccgagcctggtgcgggatataatctggtgtgtgctgtttgctaagaccattggaaaagtgcagtattagggtgggagtgacctgattttccaggtgctgtctgtcacccctttctttgattaggaaagggaattccccaaccccttgcccttcctgggtgaggcaatgcctcgccctgcttcggctcacactgagtgtgctgcacccactgtccgacactccccagtgagacgaacccgatacctcagttggaaatgcagaaatcacctgtcttctgcgtcgctcacgctgggagctgtagactggagctgttcctatttggccatcttggctccttcccctctatgatttctttcagcagtgttttgtagttttccttgtggaggtcttttaccttcttggttaggtatattcctaagttttgtttttgtttttgtatctattgtaaaaggggttgagtttgtgatttgattctcagcttggtcacttttggtgtatacgcttttggtgtatatcagaactactgatttgtgtacattaattttgtatcttgaaactttgctgaattcacttatcagttctaggagctttttggaggagttttagggttttctacgtatataatcatatcatcagcaaacagtgacagtttgacttcctctttacagatttggatgccctttatttctttcttgtctgattgctctggctaggacttccagtactatgttgaatagagaagtggtgagagtgggcatccttgtcttattccagttctcagagggaaagctttcaacttttctctgttcagtattatgttggctgtaggtttgtcatagatggcttttattacattgaagtatgtctcttgtatgccgattttgctgaggattttaatcataaagcaatgctggattttattaaatgctttttctgcgtctattgagatgatcatgtgatttttgtttttaatttggtttatgtggtatatcacatttattgacttgcatatgtgaaaccatccctgcatccctggtatgaaacccacttgatatggtggcttatcttttcgatatgctgttggtttggttagctagtattttgttaaggatttttgcatctatgttcatcagggatattggtctgtagttttctttttttgttaggtcgtttcctggttttggtattaggaggatactggctttatagaatgatttagggaggattctctctttctctgtcttgtggaatagtgtcaataggattggtaccaattcttctttattttatttttattttttatttttttaagacaatagtagttatttattttgtttgtaggtctttatttatttatttatttatttattgatcattcttgggtgtttctcgcagagggggatttggcagggtcataggacaatagtggagggaaggtcagcagataaacaagtgaacaaaggtctctggctttcctaggcagaggaccctgcggccttccgcagtgtttgtgtccctgggtacttaagattagggagtggtgatgactctcaacgagcatgctgccttcaagcatctgtttaacaaagcacatcttgcaccgcccttaatccatttaaccctgagtggacacagcacatgtttcagagagcacagggttgggggtaaggtcacagatcaacaggatcccaaggcagaataacttttcttagtacagaacaaaacaaaaagtctcccatgtctacttctttctacacagacacggcaaccatccgatttctcagtcttttccccacctttccctcctctctattccacaaaaccgccattgtcatcatggcccgttctcaatgagctgttgggtacacctcccagagtgggtggtggccgggcagaggggctcctcacttcccagtaggggcggccgggcagaggcgcccctcacctcccggacggggcggctggccgggcagggggctgacccccccacctccctcccggacggggtggctgccgggcggagatgctcctcacttcccagacggggtggctgctggacggggctcctcacttctcagatggagcggctgccgggtggagggactcctgacttctcagatggggcggttgccaggcagagggtctcctcacttctcagacggggtggctgggcagagacgctcctcacatcccagatggggcggcggggcagaggcgctccccacatctcagacgatgggcggccaggcagagacgctcctcacttcctagatgggatggcggcggggaagaggcgctcctcactttccagactgggcagccaggcagaggggctcctcacatcccagacgatgggcggccacgcagagacactcctcacttccccgacagggtggcggctgggcagagactgcaatctcggctctttgggaggccaaggcaggcggctgggaggtggttgcagccagccaagatcacaccactgcactccagcctgggcaccattgagcactgagtgaacgaggctccctctgcaatcccggcacctcgggaggccgaggctggcggatcactcgcggttaggagctggagaccagcccggccaacacagcgaaaccccgtctccaccaaaaaaatacgaaaaccagtcaggcgtgggggcgcgcgcctgcaatcgcaggcactcggcaggctgaggcaggagaatcaggcagggaggctgcagtgagccgagatggcagcagcacagtccagcttcggctcggcatcagacggagaccgtggaaagaggagagggagagggagagggagaccaattcttctttaaatgtctgttaggatttagctgtgaatccatctggtcctggacatttttcttgttgtattttcaaaatgctaacatacatctgtgatgttttgtgttattttacacaatatgtcagtttgaagggagttttttttttttttaatcctgtttggctttcttccttaatcattgatccaatacctttaaaagaacaaaagtaaatattagacctgagttctctataggcagaaacaattggttatgtgtctgaagagtaatctgatacatttttaaaaaaccaactctagttaaacctacattctgaaactttgacaaagacttaatgatgctgattttagtttctatgtaattgaaatatgttattgcatagtcaagaaaagacttctctggtacttccctttcacagatttgaagagatttaaaaataccttaatgcagaaattacatagttaaaaaaaaaaaagcttaattgaagtataatttacatgagtaagccacatatttgaagttgtacagtttaatattttgacatatatacccgtgaaaccaacatcacaatcaacatatcccttgctaatctctccctccagtttctctccacgtaccccctccctgggaactgctgatccactttccctcactagggataagtttgcatattttaaagttttatgtaaatagagtcatacaggttgtactctcttttgactggcttctttcattgaacagaaagattttgagattcattcatgttgtagtatgtatcagtagctgatttttttttttgagatgggatctcactatattgcccagactggtttttgaactcctgggcttaagtgatcctcccacctcagcctcctgagtggctaggactccaggtgtgtgccactgcacctggctgtagttgattactttttgttgttggatagattcctctgtgtgtgtgtgtgtgtttgtgtgtgtgtgtgtgtgtgtgtgtgtaccatcatttgtatagttgctgaagacgtggtgaaatacagagtgggcaaaataacttttactgatagtaaggatacttctcggagtttctgaagaacaactgatatgggaaatacattacagatatagaacactagataataatggactaggcatggtggctcacacctgtaacacgacactttgggaggctgaggcaggtggatcacttgggctcaggtgttagagaccagcctgggcaacatggcaaaacccagtctctaccaaaaatacaaaaattagctgggcgtggtggtgcacgcctgtggtcccagctactcaggaggctgaggtgggaggatcgcttgggctggggaggttgaggctacagtgaactatgattgtgccactgcactccagcctacgtgacagaccctgtctcaaaagaaataagtaaataaaaataaaaacataatgaagtaaaaaacatttcacatttatagccctggaaaatgttggattaaggattcataattagcataagccattttgaattgtcagaaagctcaacaggcttgaaagaagacttattatttgaagactatttgtttcattaaacaaatatttttgttcaaagcctacatgtggcccagaactagtttctacagtgatacagtaaggatctttctgttggcttctggaagtgcacatctagcaagtgaattgaaagataaacataaataattacgacataaaaggtgggaatgagaattgtagtaagagaaacacaacgtgctggggtgttcagaggtagaagaaagttatttccagccaggaggaatccgagaacttgtttgcaagtggtgacgtcttatggctttgaaggaagcttctagttgaatatatgcagatgtgagagaaggccaaggtcagcgtaagccaagacacacgagcagggacctggaggtgggtgtccacagggggtcgtagatcaagacatcagcagggttggttctcctgagggcttcgagggaaggatctgttccaggcctctctccatggcttgtagatgtccgtcttctccctgtgtctcttcacataatcttcccttctgtgtgtgtctgtctctgtctccaaattcccccaccaccctttttttctttagctacctgttaactaaattttccctggtttctaaggacactagacctattggatcagtacccactctaatgactttgttttaacttgttttaacttgatcacctctgtaaagaccctatctccaaataaagtcacattttccggtactgggggttgggactccaaaatatctttctggggggcacacaattcagtccagaacactgtggttgggagtgtgggctttcttatccatgcagaggagggtcatgaatgctttcattggggacatcatcaaatttgggcttttcccccctttttgtggaggatggggtcttgctatgttgcccagcctggcctcgaactcctgggctcaagtgatcctcctgcctctgcctccctaagtattgtgattacaggcgtgagccaccacacctggcagggacatcatcagagctgtgctttcaaatgctacccagctgtgtgtgcaaaacgtacttgggttgggggaccatgtggggtgaggggcacaggagggactcactcaggagactggcagtccgtgccagaatggagggggatgcccagctggcagtggagggtgtgagcattgggcctgggaccgcagttcctcctgctccacaggttctgaggacgtggagatttggcactgagcggggatctgtgtgctcctctgttgagggtattgctagaaaggaccacgtgttgcaaaagaagttgaattagttcatggcctgtcatttggaggttatggcaggattgcttttatctgagagacattcaggacctcattattcatcacctgattgtcggaaattaactataacccttcatgtgggcaatggagtccattattacggaggtaatccaagtttttagttttattgcaaatgtttgccttatggtaaataaatacattgtatataattttcatttctgtaaagctttattgtttcaaagctttttccttttttatcctttcaatgtctggggggcaaaagaggagcaaatgttataaatcttagttgatatttgaggtaactgaggattagagcagggttgggtcttgtctgatgtaactgatctttggccaagctgggactagtgcacctcagttgttatggatgatagagataagtttattgttcatatagtttccatatcagtataattgcttcatattgaatactgacggctcaagaaaggccgtggtgcctgggtaccacctggtaggcatccaaaggatgctgctgttgctcaatgaatggatgaaaaagcatgtgtttttagcttgtctttccttctactaagaatcacgtgatctgggttgggttttcaattttcagtcatggagactataaatttgaacaactgtccatggcttgtattttttaaatggaattgtgagagatatagtctttgaaattggtttttttaaaataaaaaattcatatggggtcccaccatgttgcccaggctggcctcgaacccttatgctcaagcgagcctcctgcctcggcctcccacagtgctgggattacagccatgagccaccatgcctggactgaaaatggtttttaatactcgatgaaaaagcagtagcttgcagctaaaatgatgtgatacagtaggttctagttaaatcaaccaaagtaatgatgtaaattgtaatgtagattacttacttggcaatctcagtgtgacctttacatgttttttgctaagctgtaagtgactctctgatctatgacacagctttcaaattgcgagggttcatgtcacgccactatagagaagagtttggtgttaccaagaggatacagtgaccaaagatataactgttgtttgaaaaaggtgaatactaaacacatagggaattattttaatattaattgtgtggcttctttgagaataccatgtctggttttatattttatttgcaaaaattgattgaggcaaagtgaagtctttttgagtcgtgggctagcttatgcccatgtttattattaagaggacaagaaacactgcttaacccacagatcttaagtgttttatttaaataaaacaacaaaataatgcagattatgtgatttaaaaaaaaaaaacaaaaccaaaaacttaattttaaagaaatgggaagcaagccacctatatttaacacttacaggccggggccgggcatggtggctcatgcctataatgctagcactttgggaggccgaggcaggtggatcacctgaggtcaggagttcaagaccagcctggccaacatggcgaaaccccatctctactaaaaatacaaaattacccagacatggtggcacatgcctgtaatcccggctactcaggaggttgaggtaggagaatcacttgaacccaggaggcagagattgcagtgagccaagattgtaccactgcactccagcctgggtgacagagtaagattccgtctcaacaaaataaataaatagctgggcgcggtagctcacgcctataatcccagcactttgggaggccgaggcgggtggatcacgaggtcaggagatcgagaccatcctggctaacacggtgaaaccccatctctactaaaaatacaaaaaattagccgggcgtggtggcgggcgcctgtagtcccagctactcgggaggctgaggcaggagaatggcgtgaacccgggaggcggagcttgcagtgagccaagatcgcgtcactgcactccagcctgggcgacagagcaagactccatctcaaaataaataaataaataaataaaaatttaaaaaatggaaaaaatcgtgaacagatgtcagttgggttcctcttcaccccaaaagtctatatatgtgtctcattcctcttgaagtacaggagttgtagcagccccaaatcttccctgtagacgggcaattcccaaggcttagtgtcctgcggcctcctaagttctgcgctagctctctgaaccactctgggttggccgtggtatcaaaccttataccctcaagttctccaatagaagtacagtcccacaagcctgcataagctgtgaggactttactgatgactgtcaaaacacaaatgacttaaaggacatcatagttgtcaccaaccttaaaagtccgttggccaccctgatttgtcctggagaaaagctcctctttccttcttacccccgcatggccacctcctccatcaccgctcccgtttaagagcaaataaacacattcatgttgtataatagtatgtattagtagttgattacttcttgttgttgttttttttaagagacagtgtctcattatattgcccaggctggtctcaaactcctgggcttaagtaatccttcctccttagcctcctgagtggctaggactccaggtgtgcaccactgcacccagctgtagttgattactttttgttgttggatagattcctgtgtgtgtgtgtgtaccatcatttgctgaagacatgcggtgacatacagaatggggaaaataactttgcatcagttcttctctttatctcgctaagcagccccctcccctccttggtgctgtccatccctccaggcctggaggtgggttgggctctggcacttttttccagaaacaccatgccccttctgagcagagtacaggcgaatgaaaacatctgcacctcactatgtgaagtgtgaatttcaaaaacatagtaatactgtgttagcctggactatggaagaaatttgaaactaggttataatgtttgggtccttttccttccatatggtcataaattagaacagaaatataagtgttcctgtgttttcaaatctagattttttaaaaacgagaagaaattttccgaaaggaagaaactatgtttaaatctgcaaagaaactcttaatgtctccagattttcgatgcttctgagtgactggcaccgtttacaggcgtggcctgtttaagagcttgtcagcatctgtggccttcacccaaaggtctgaaattgattccaagtgggatgtcacggccacttctcttgatgtacaggatctaaaagcaacactgagaacagtggatgggcagctacatgctgaagtgtggctggaggatgtggcacctgggaagagaaagcacagggtgaccaaagtccttgaagagggaggggtgccggtgctgcaaaccagtgaaagcccaggtcaagggaagagcaggagaaaggatgtcagtcattcttgtgacttttgtaggagaacttgggccattaaaaaagaaaggaagtaatcaaaatagagttgttcagcagctctgaatagaaagggttggatcacaagtccacggagggagggtcgcttcatggtgagcaccacgctcatggctcaggccagcagatgttctcatggccgtgccgtgggaacactcggggagctgatgagggagggatcgtgagaccagtgttctgtgattctgcctccaggaatgaggaaacatgatgtctgtttcagaatgggatagtatagaatgtatttggctgaaacagcctgcagcagcaatggccctccccaaaataattctttaggagggtgtgtgggcctccatcaagtcttcgatggttcagccatgccagttagctaaggctcgtgggatgccccacactcactccccacctccccacgcttagggcagtgccttgagttttgtgatgcgtctcccacagtggaaggcatgcatgagctatatttcaaggggttgggcgcagcctgcagttggagatgatgtcatttttagccatgtgagtttgctcagaaggaaggtacggctctcctagcaaatctaagaataacaacttcactgtctgctgcagccaagttgggaccaagcctcgcagcagagctgctgtggttttctttcatcacctttcttttggactgtagaatagttctgtcttttgggatatgaggggtgataaattgtggggaaaacttctattcattaccctatatgatcagggcaaaaatactgagaagtgaaaaggattttagattttttttttttttttttttgagatggagtctcgctctgtcacccaggctggagtgcagtggcgcgatcttagctcactgcaacctctgcctcctgggttcaagcgattctcctgcctcagcctcctgagaagctgagacaacaggcgcgtgccaccacacccagctaattttttgtatttttagtagagacggggtttcacaatgttagccaggatggtctcgatctcttgacctcgtgatccacccgcctcggcctcccaaagtgctgggattacagacatgagccaacgcgcccggccagggttttagattttaaaagctagcttgttactctatgtgataaggaaattaattcaagaggaaatggaaaaataagcagcttacaattgtgatttctccagcagatatatcttttgtactgggaaacagtctcctgtagaatattttcattttgaacacactgcattggtcttagatctgttattttaaaaatacgtacaaagcaccaggcgcggtggctcacgcctgtaatcccagcactttgggaggccgaggtgggtggatcacaaggtcaggagatcgagaccatcctggctaacacggtgaaaccccgtctctactaaaaatacaaaaaattagccgggtgtggtggcgggcgcctgtagtcccagctactcgggaggctgaggcaggagaatggcgtgaacccgggaggcggagcttgcagtgagccaagatagtgccactgcactccagcctgggagacagagtgagactctgtctcaaaaaatatatagatatatgtacaaagctacattgtaatctgatttttatcagggctcttcaaccttttagattcactggatacattttgtgtttcagaaatatatttgcccgagcattctggcttttagaatttagatgaattttcctaaaaggccaagtgaaatatttcacatttctttgctttcatgttattaatttctccatgtagagatctgattaaaatatgtgatgtagcagaaagagataagatgaaaattctgattttggcatttgatgtgctttaagctgcaagaaggtcctttggttccttgactttatctggagtgggagactgtttcagactgtggaatgtttgcattggaagggatctccggggtcagagtgcacctcctaacatgcagagattggctttatagatgcacatggtttcaaatggccaatttttgactgtcagtaggacaaagtagattcaaatgggaaatgtttcttccactggacagaactacttttccttcgacctagttttgaaatcacttcctatttcagactttatagcctctactgcccaacatgtttagcaaagtgtcaataaatataaaaagccctctttttttttctcataccacatcgtctaagacaaaagcttattttttattcattgactgacagttttttttttttttttttacaaacaaaacatttgtcataagtagtttctagaaaatcagtctactggctgggcgcggtggcctgttatcccaacactttgggaggctgaggtgggcggaccacctgaggtcagtagttgagaccagcctgaccaacatggcaaaaccccatctctactaaaaatacaaaaaattagccaggcgtggtggcctgcacctgtaatcccagctactcaggaggctgaggcaggagaatcacttgaacccaggaggtggaggttgcagtgagctgagatcgcacctctgcactcctgcctgggtgacagactgacattccatctcaaaaaaaaaaaaaaagaaagaaaaccagtccactgtcttgcgaatttctaaattagaacactgaagtcaactttgtaaaagtgaattgctgtgtaaaaaggaaggaaattctgacacactgtgacctggatgagccttaaggacattacgctaagtgaaataagccagtcgcaaagagacaaatactctatgattgcactcaaatgaggtataagagtcatcaaattcatggagaatgtacagtggtggtttccagggactgggggcagaggggaatggggagatggtgtttaatgggaacagactttcagtttgggaaggtgaaacagttctggaggtggttagtggtgatgattacataacaacgttaagtgtgcttaacaccgcacaattgtatgcttaaaagtggttaagatgctaaatttcaggtggccgggtgtggtggctcacacctgtaatcccagcattttgggaggcggaggccggcagaccacctgaggtcaggagttcgagaccagcttggccaacatggcaagaccctgtctctactaaaaatacaaaatttagccaggtgtggtggcaggtgcctgtaatcttagctatttgcgagattgaggcaggagaatcacttgaaccctggaggtggaggttgcagtgagccgagatcacgccactgcactccagcctgggcaacagagtgagactctgtctcaaggaaggaaaaaaaaaaaagaggctaaatttcatgttatgtgtattttaccaaaacttgaaaagaatgaattactgtggctggaatgaactgctctgtggaaacttagtgcagtagcggattccgggtaacccaacccagtctgccctgtgtgagaattggagtcttctggcaatgctcattttccttctttggggcaggcagttcttcccccctgcctggctagggtacttcctaccatccctggggaaacacctcctttctggtttcttcctccatcctcccggctccgttccagtcaatactgtgttcccacacacatgaatggagcaagaagagctggctccaggcctctgggggcaaccaatgactggaaggagagggatttactaaaagtcggctctccagagaaatcccattaagcgagtgtccccaagggggcaacgggttttggttctgtgcagttttagtagcctgtgtcaaaataaaacccaggtcagtgctgtaaacacaaggcaaggagccttgccttgtggagcagctggcgagatggtcccctgggatgattccctctgggacatgtgggtattttcagggaagattccattcgtaggtctggaatggatgtcgggggagagagaagatgggttgatgggggttagggatcaagacgtgaacagatgcgcgcctgctgctgattactcaacagtctcatgaatccccagcgcagccctgtcaggtagaatattctgcgatgatggagatgttcacgctgcccaacactgcaagtgcggccactggcatttgtgctgttaagtctgtgaaatacactagtttgactgaggaacaaaatgttcaatcttaattggtttaaatgttaacagccatgccaggcgcagtagctcatgcttgtaatcccagccctttgggaggccaaggcgggcggatcacctgaggttgggagttcgagaccagcctgaccaacatggagaaacccggtctctaagaaaaatacaaaaaaattagccaggcgtggtggcacatgcctgtaatcccagctactagggaggctgaggcaggagaatcgcttgagcccaggaggcagaggttgcagtgagccaagatcgcaccactgcactccagcctgagcgacagagagagactccgtcctccctgcccccaacaccccccccaaaaaaagaaagttaagtatattaatttgattgatttattttttgaggtatggtctctgtcgcccaggctggagtgcaatgggtgtgatcatggctcactgcagtctcaaattcaagggctcatatgatcctcctgcgtcagcctcccaagtagctgggataagaggtgtgcatcaccatgcgtggctaacttttaaagatttttagtagagatgaggttttgctatgttgcccaggctgttctcgaactcctgagctcagcaatcctcagtccttggcctcccagagtgctaggattgcaggcatgagccactgtgcccagcctagtatattaatttttaaaaatgggatgttatagtgaacaaaaccaacaggaattctatcctcatggggcttacagtctggcagggaggacaaacacggagtaagcaaacacaagtgtgaactgaggcgtgttatgaaggaggtctcaacttgagtcagtagaaggagtctttgtgggggtgacatcaagtggaggtactgtcattttgttttaacagggacacttccagtcatatggtccctggacgctgacacaacttttccaggacttttttttttgacaccttccttctcattagaatctcctgggccagtctagtgtcttgacacggttgctgaacccattaaaatgggaaacccttgttttcacctccgaaaagggttttagaggaagaggcgggcaaaggagacttggctggaatgggggagagttcacaggggcgaggcggcagggcgacaggcccagggttacagccccaagggccgcccccgcccatacccaaggcacctgtggacggggctctccagagggctggggcaccatcacagtcacagccgaggctgggaagggagccagggctgcagccgagtccgcccctccagcgctgcgcagccccgccgccttaacttttcctctggctgcgggtccctcggcttggccacccccacactgcagttagttgactgattctgtatcgagtgagcatctcccgtgtgctcacagcccggggcccctggggatgcttgggccgcctgtctctgtttcatgtcccctgcctggtcctcttaggagggtggccgattccctgaagggaggaagtgggtcctgggtctggggcttttccactttggctgcacttgacaacgacttggggacttttagaaaggtacgagcaccctccaccaattaaggtataattttgctgaaaattccttggcattttctaaagctcactagctattttcctgcagtgccttgggtgatgaagagggtgacccagaatcctcctttgttgctccccatcctctaggaaagcttctagctggctactgtcttagtgggaacccctttctgctgggaaaatcccagtagggatttgggattggacaaccctttcatctccacctccccctgagctcccaactgagcccgagggctgactagcagggcccaaggccacctctgagatccagctttgtcatcgtcatgcgacatccctagggagctttctcaccgcaggaggtggctgctgatggattccaactgttgatgccagccaggaagtcctcttccccatgctagacttgaaaacttgtcaggagcgcctcaacctgaactcccttggccagaaactcaacagcaggcagattagacgcggagcaggagtggggaacatgtgtagagtgggaggggtgggggctccaggctccagggaactttcctacattaggagctggggagctggccccaaaataaaattgccttgaaagaaaagaacaaagtgtgttggcacagcaaggcctttcttccgctctggggcatgacagaggtcacagcccgctgctgggctggagtgggggccgttcctcttcaatgggcacaggagtgtgctctgcctggcctggctcagcctcctctgagacagcttcatgcaggcctgggccgtcatctcctggccgatgaacaaaacccgagagcaaacacatttcacattcagtctgaatgctcagaggaaccacgtttttctgagattacacattcttccagcattatgctctacttgagaacgcaaaacaatccagcgcaatgatgctttcttccctttttacattttcaaggaccacacagaggactcctgctaggtggtggtggggaccgagggctggtgtgtacctggccacgggtgggatgctcaggaatgggttggccgaagtgggggttgcctaccttcttacccagcccttagggccttctggaacatctccaggtggggccgcttcctccaatgtaaggcatcgcctgagagaacggctgtgtggggtgcagggaggaggcttgggtttaacggccctgccccttccgggctgtttgaacttggataagtcgcttaaccccatgagcctctgttttctcacttgtgaaaaggggaaaatgtatagtagggccttggtggaggtggacagcaatgagagaaggaagagcctggaaggtctttcctctcctcatcctcccaactgcccgagcagcccttgtttttccattttactaccaggcttcctcttcagttttccttggaaaaggctctctggagctttctaacatctgcatgcctggctgccaccccagaccccttaaatcaaaacctctgagggtgagacccaggcgtgggtattttttcacagtttcctgggtgattctgatggctcaggctaagaaccactgccctaaagatcaaggcaaacaggccgggtgtggtggctcatgcctgtaatcccagcactttgaggttgggggatcacttgaggccatgggctcgagaccagcctgggcaacatagtgagaccctatctcttaaaaaaatttttttaaattggctgggcacagtggctcacacctgtaatcccagcactttgggggctaaagggtgggtagatcacctgaggtcaggagttcaagaccagcccagccaacatggtgaaactatgtctctactaaaaatacaaaaaataaccaggcatggtggtgggtgcctgtaatcccagctacttgggaggctgaggcaggcgaatcgcttgaacccgggaggcagaggttgcagtgagccgagatcgcgccattgtactccagcctgggcaacgagagtgaaacatcatctcaaaaaaaaaaaaatatgacccaggcatggtgcctgtaatctcagcattttgggaggccgaggtggaggatcacttgagcccaggagtttgaggttgcagtgtaccatgattgtaccactgcactccagcctgggcgaccaagtgatacttatctctacaaaacaaaaaacacaacaaaaaccaaaggaaacagggacagtggaaggtgctaggaggtctaatgggcttggcgggtcctagctgtcggcagggccctcttgggattctgcagggtgcctagccagtcccagcggggtggatcctatacccagagtgtaattgtcagtgtgtgaccctcggggaggatgtcaaaggtccagcacatgatttgtgctttcctcagggaggtaactttgaagtccacctgccacagggctggtgcttgggagggagttgctttgctgggtaaccccgctgctgctattgtcccgcctccccccatgggcagctctcagcaaccctgaaaaagtgacactcagcctattgctttctgggaattggctcaagaagaaggccagctgctggtgctggtgtaagaaatgaagaggagctgaagagcttcaagagagatgatttgcaaggcaggaaatcacaattgggctgaagtagggaggccccatcctgtgtggctgtggcttttgcctgtgctgtgagcaggggccgctgcgggggctgaactcctggctccttccctggtgagcccgggactgcagggctgtcaaagtctgttgtgggcccaggcccggccttgagtctggaggactttccagctcactgcaaagctctctgtgtgatattccagggcatgaggggatgtgcactgtcaacaggactttttgagtgcttccaattctgcttcctgatttctgtcattgacagtatgaaccagggcatctttgtaaaaagtggacacaaatagtgtgagctgccatctgcaaaagctggtggctacctttgctagcatcaggaaagggaggtgcagcggtaaacacacagacatgatggagagcagggtgccagggatgtttctttctttctttttattttttttgagttggagtcttgctctgtcacccaggctggagtgcagtggcgcgatctcggctcactgcaagctccacctcccgggttcacgccattctcctgcctcagcctcccaaggagctgggactacaggcgcacgccatcacgcccggctaatgtttttgtatttttagtagagacggggtttcaccgtgttagccaggatggtctcgatctcctgacctcgtgatccgcctgcctcggcctcccaaagtgctcagattacaggcgtgagccaccgcgcccagcctctttttcttttttttgagacagtctcgctgtgtctcccaggctggagtgcaatggcgtgatctcagctcactgcaacctccgccttctggattcaaacaattctcgtgcctcagcggtagctgggactacaggcatgcgccacaacacctggctaagtttcgtattttttgtagagactagatttcaccatgttagccaggctagtctcgaactcctggcctcaagtgatctgctggcctcagcctcccaaagtgctgggattacaggcatgagccactgtgcccggccaggaatatttctttaaaacacaaaacaaaacaatctctagtgacacctgaaacaaatccccacaaactgaattgtagaacagaagtttggtgaaacaaaagctcagtttgggggctgaaaagtatccttctcaaatgggagtcttggtggagattttctaagctgtgtgttccccttgctgggaaacgggtgctcagggcaggtggaggattggggagcccctgccttcctgaggctgatctgagttaggctgaaccccccagtcagatctggactgaggagaccaacatcccctctgggccagcctggagagcaggcagggtcctgcatgccctgagtcctctttatttgggtctagcgccggaagttgcttgtaacggcagccagtaaagagagatgccatcccttctgtccacaggtatcgagtgaacttcagacctagatatgtcactaggtataagacagtgacacagttggaatggaggtgctgtcctggctttagagggggagattgccaagaaggtcccaaagaccccgtgaagaccctccgccccacgccggctcggcctcgaaacagcttgaagaaagccacaggtaacttcttatttgtgctattatgtatggccacctttaatatttccggtgctccttcaaacaacaggatttgtgctttacaatggtgagctttgaatggccttcgaataacacacatagatacctgcagtagccacatgtgacaaatttattctcaggagcagtagcaattgtaagacaaacttccttgcaagtaaattgctttgctagggccagcttgttgtgaaagccaatgccttaaacatcagggtaggaaatgccagtgggttcagacttgtgtcacctggaggcacagctgtgaagagattcagatgtaatgatgtactgtttgtttttacttgggcccatacatctgaatttaggggggttaaaattgttttttattttttatttttttgagatggagtctcgctctgtcgcccaggctggagtgcagtggcgcaatctcggttcactgcaacctctgcctacctggttcaagcaattctcctgccttggcctccgagtagctgggattacaggcgcctgccaccatgcccggctgatttttgtacttttggtagagatggggtttcaccatgttggccaggctggtctccaactcctgacctcaagtgatctgcccacctcggcctcccaaagtgctgggattacaggcgtgagccactgtgcctggccatcacttcatctttttaagttcagtcacaataaatgcagcctaggttttcttatgaaattagatgcttaaatgattatattttgccatgaggtgttctcaggtttgaaactcgtagttcttcccaacattgtctgtaaaaatagattttaaaatgactttttaactacaaaagtaatgcacatcaattaaagaatgtttgaaaaatatttaaggatacataatctcatgactaaatgagaactactgttgacattttgttatagaaccttactctctttcctatgtctgtacattgattttgttaaagaaaaattcatttatctcacaaatatttattgaacttctatatctgtcaggctctatactgggtacttggaataagtgagaaaaaaggcagacagagtccctgacttcatggaaggcagacattagagagtaattacaataattcatgacagatactgggatggagggaacatgacatgggggctggtggattgtaatcatttatttttgttttgtttcattttagtttttgtttgacagaagtttaagcatattgtagtttaataagttgaatagctttataaggactaataggaaaaacaatgaccaccctgaaaccctttttctcattttcccttcccatgggtagtactttaaactcttcagatgaatcttttggaatttacctccatatctattggtttttcattatggaaggtgagaatttaactccctttcatccactcctcaacacatggctcctatccccccatcccttccatacagttagaccatattctttatttactcagtattcagtgtttacattgtagtaactatgtagataatgtttacagctgagccatgtggtgtactatgaatagattttctttcctacgcagctttttgattccttacagttaaatcattgtcttatgtttttcctttgcttagttttctctctttttattgctatttcaacccaactcttctctggctctctaaatgtcccctccatatgttcagacacagcattttcatcttcttgaagaagtctcccttgagccttctcacttgccctacctggacgggacatcctcttttcctgtcttcacccgaggatcttaacttgcccctctcctgttgaattccctgtttcctgtgtcccctgctccctctttcttggcttagccccttgctttgcttgagcatgtcctttagtagcttcatgagacaattacatgggaagcaaactttttaccactttatagtatgaacactattttttattctagcttcagaaatctaggtcagaaatcactttccttcagaattttgacaatagtgctcagtttttctctagcttccaatattgctgctaaaaaaacaccaaaacttttctgactcccagttttttgtgtgtgacttgagtaggtttttttgtctccctcctccttttattttgtccttttagtgggattttaggaaggagtaaaaagaaatgcttttcctctgatatagtttgaatgtttgtcccctccaaatctcatgttgcaatgtgatcttcaatgtgggagatggggtatcatgggaggtgtttgggtcatggaggttgatccttcatgaatggcttggtaccctccttgcggtaataaatgagttcttgctctgttagtacacgagagctggttggttggaagagcctggcaccttctcccttccctcttgctccctctcgctccctctcttaccatgtgacacactggccctcttttcaccttccgtcatgagtagaagcttcctgaggtcctgaccagaagcagttgctgacaccatgtttcttgtacagcctacaaaactgtgagccaaataaacctcttttcttcacaaattacccagtctcagatattcctttatttcaatacagaatggacaaacataccctgaattcactgtcattataaaaaaaatactatttttacaactttttctattttagagacagggtcttgctctgtaacccaggctggagtgtagtggcatgattactgctcacaaccttggactcctggactcaagtgatcctcccacctcagcatcccaaagtgctggggttacaggcagaaccactgcactcgacctggaacttattttttattgaataacctataatggacaaccttccatgtcatgaaatattctacaatactacttaatggcttgagagaatgtgagttattgaacaccatcctctactgttggtcacttaggttgtttgtaatttttcactattatagataatatatgaatatgcatcttttcctgttaaatttttgcactcatttctgattattcactagaataaatttcttgaagtgtaattgtagggtcaaaagattctgagtattttgatacatgttgccaaattatcctttgaaaaaaatgcaatttgcacagtcaccgtggtatatgagcaaagcatttccttacatcctcaatcttcccccctttgccgccctttgtttttatttcctttgcttagaatagcattccacttgcacatgattcagtaacttgtttttttctttagtgtcttaagagagaataacggccgggcgcggtggctcacgtctgtaatcccagcactttgggaggccgaggcgggtggatcacaaggtcaggagatggagaccatcctggctaacacagtgaaaccccatctctaccaaaaatacaaaaaattagccgggcatggtggtgggcacctgtagtcccagctactcgggaggctgaggcaggagaatggcgtgaacccaagaggcagagcttgcagtgagccgagatagcaccactgcactccagcctgggcaacagagggagattctgtctcaaaaaaaaaaaaaaaaagagagagagagagaataaatatttcagtaaggaaaacaaggtgttatttgtagctctctgcaaaaagaatgattcttggggatttggatatctgaatttcagatttggttttaccactaacttgattttaataaataatagctgctattatgagcttgtgcaaaagttcagaggaggaaaaaacaatgatcgttgaattcaaatatctacaacattctgaattaatttccaatgttttccagtgtaatatattaatgcattttatttaattgcaacctatgttgtgtttgattttttccactttatatgtctcactatagttgccaggtttgtcagtgttaacctctttcagtatttctttctttctttttctttttctttccttttcatttctttcttttcttttttttttttttttttttttgagacagggtctctctctgttgcccagactggagtacagcggcactatgtcggctcactgcaacctccgcctcctgggttcaagcgatttttctgtctcagcctccctagtagctgggattacaggcaccagccaccacacctggctgatttttgtatttttagtagagatggggttacgccatgttggccaggctggtcttgaactcctatcctcaagcaatccacccacctcagccttccaaagtgctgggactacaggcatgagccatcatggctggatgcagtatttcttgtatcctgctgtattcagggcatagtttgtttcttattgtcctattgctgcaggtttcaatagtctcctttttatttacctctatgtctatcaatttatcttcattttatgactcatcactatcattccccccttattaaaaattaataattgtttctttcttttggattttttccttggtgttttctcaaaataagattacccaaaattcaatgtttgcattcttcttctttttttcttttcttttttttttttttttttttttaaagatacagggtcttgctatattgccaaggatgcccttgaactcctgggctcacgccatcttcctgcctccctagtaactgagactacaggcacacaccacctccctgaccagctttcaatatttgcattctttgacgtagtgaatcttactatatatggtcagacggtgctgttgctaggagacactgatgaatagttgctttatctctgttgctttttgtctcccaaactgcaagcagggctaaacaatgtctgtgagactctttgagcacagagatgttaatgaaagtaaaggacaaaacattcaggcactgctttgaggataacatcagaaaatatgatatcatatgatatcaccatccaacagctaatgggtggatcttgctaaagtggtttcttgtggttttactgtatgcagtcaactcttggggtgtggctgcagttcactaatatgggaatgaagtgttcatatgataaagcggataatgaatatttcccctcagggtgaaagagaccattgattatctaataggtgtcatgtacatattattttaacagctctagaagctgttcttctttatagatgagaggattatagttcacagaagttagttaacttgctcaaggacaaacagtaaatagcagagccagaatgcaagtagaggtctatttgactacaaagcccatactcttttctactgtaccacagtacttacctacaattgtgtagtgacctgtaagtgaagatgtacatgtattttgtaggtaccttgtttattgtcttggcagaatctggctaaaggtagaaaatgttcattcatgtccaactttatctttgtaacagataatgaacccagccaattctcagagcccaggaagactttgtccccaactggtacagcacaaccaagctggggggtagatccaaaagaggggcctcaggaacttcaggaaaagaagatacaggtgctagaggagaaggttcttcgactcacaaggacggttcttgacctccagtcttcccttgctggagtgagtgaaaatctcaaacatgccactcaggatgatgccagtagaacacgggcaccagggctcagcagccagcaccccaagcctgacaccactgttagtggagacacagaaacgggccagagtcctggtgtcttcaacactaaggaatctggcatgaaggacatcaagtctgaattggctgaagtcaaagatactctaaagaacaaaagtgacaagctggaagagctggatggaaaagtgaagggctacgaagggcagctcagacagctccaggaagcagctcagggcccgacggtgaccatgacaaccaacgaactctaccaagcctatgtggacagtaagatcgacgccctgagagaggagctcatggagggcatggacagaaagctggctgacctgaaaaactcatgtgagtacaagctcactggcctccagcagcagtgtgatgactatgggagcagctacctgggagtgatagagctcataggggagaaggaaacaagcctgagaaaagaaataaataacctccgagcccggctacaggagccttcagcccaggcaaattgctgcgacagtgaaaagaatggtgacattggtcaacagatcaagacattggaccagaaaatcgagagagttgctgaagccaccagaatgctgaatggaagactggacaatgagtttgaccgccttatagttccagagccagatgtggattttgatgcaaaatggaatgaactcgatgcaaggatcaatgtgacggagaagaacgctgaagaacattgcttttacattgaggaaacccttcggggcgccattaatggagaggtgggtgacttgaagcagcttgttgatcagaaaatacagtctctggaagaccgtctggggagcgttctcctacagatgaccaataacactggtgcagagctcagtcccccaggggcagcagccctgccaggagtgtcagggtcaggagatgaacgggtcatgatggaattaaaccacctgaaggacaaagttcaagttgttgaagacatttgcctgctgaacatccagggaaagcctcatgggatggaaggtgccttgccaaacagggaagaccgcgcagtacgcgacagcctgcaccttttgaaatctctcaacgacacgatgcacaggaagtttcaagaaaccgaacaaaccatccagaaacttcaacaggattttagttttctttattctcaattaaaccacacagaaaatgatgtgactcatcttcaaaaggaaatgagcaattgtagagcaggtgaaaacgctggcatgggtaggttcactaaggtgggtgagcaagaaaggacagtggacaccctgccgtccccccagcaccccgtggctcattgctgcagtcagctggaggagaggtggcagaggttgcagagccaggtcatctcggagctggatgcttgtaaggaatgcacgcagggggtccagagggaggtctccatggtggagggcagggtgtctcatatggagaaaacttgcagcaagctggactctatctcaggaaatcttcagaggatcaaggaggggctcaacaagcatgtcagcagcctgtggaactgtgtcaggcagatgaacggaacgctcaggtcgcattccagagacatttctggcctgaagaattcagtccagcagttctacagccacgtcttccagatttctactgatttgcaagatctggtcaaatttcagccatcagcaagtaagttgaatattacaattctatttcttgtatttctttgcagcacgcaacaacattttaaaaataattttttgttcatttttgatattgttgaaacttcatgaggtaaaaatgtgacagtattatgctagattttggacagttcacggaatgaactaaatgccatcagtcctacccaaatgtggttcatagattggtgcctgaattatctggtgctgagtagcaataagataaatatatattctcagtgttaatatttaggaacttctaaaataatttgacagactggttgcagtggctcatgcctgtaatcccagcactctgggagtcaaaggagggtggatcacctgaggtcaggcattcgagatcaacctggccaacatggcgaaaatccgtccctactaaaaatacaaaaattagctgggtgtggtggcacgcgcctgtagtcccagctagtcgggaggctgaggtgggagaattgcttgaacctgggaggcagaggttaaggtgagccgagattgcatcactgcactccagcctgggcaacagagtgaggctccatctcaaataaataaacaaacaacattgcagtatttaagcacatgatctacgtaatttacaaaaatatcagttcacaacacattgaaaataaaaaaggaaaactggttcttcccacagatggatagccaaatattatctgtagaatcaggctggtgagctcagagttggggtcagatttttggcataacagcttggggcagtgggtgttgtcctctcttctacctagggagtctcctacgtacctctcttcaagcatcactttttatctgtgtcgttatcatcttcagggcttagctgatggcagataggatgctgtcatatttgtttccagacacaggaccgtggatgagagcagtttagggacaggaagtatctaaagctccatagtgcctgcatccaggaagctcagcagtagtgctgagagcaatgctggctacaccttaggcactcaacaaatgtttgttgaatgaatgaatgtgaatgaatgaataatatatgtaataagatttttttgttacttgtgggtgctaaacgcagccttctcaaaggacagagcttctcttgtacctgggtttgtactctgagacagcctccgacataagctagccctctctagtcggagtctgggcgtgaaaggaaggaagagggagctcgcgtttttgaacactttctatgtacagcactggcttggtcacttcagggggactgaatcctatcatggcctcacagaaaggctgttttccaacagggaaaatgtgcccaaagtcatgtggctgttcagtgggggagccaggatggaaaccaggccaggctgcgtccaagaattgttttcttgcagtccagccatgatgactgtgtgtctcccagaactgagtgcagacttacttggtccatggggacttgttgaggggcctgctttgtgctagaaggaacctattcctgacctccccctccctgttttcttttctcccatccttgcctttgggacttttacctccctgacctggttccgctctgggtgacacaggcccttgcacaaggaactgagatttcatggcctctgtgaaccttgggattttatgatcaagtcccagatgagacataaaacccaaggcagcgtaggctagaacgtgggaagcaggcgagctctggcttggtcagggagagccagggccaggtcctggcagctcaggagggtggagagggtccgaggtaggtgggaaaatgccctggatgtccccagagcactgtgcttatcttgcagatgacgagtcacctaggcccaggaggaccaggaatctggccgccacccgagtgtccagcccactgcacctcactatttataacccagcccttcccccactccagggccactcagctcctctatctctggaatgttgagtagaggtcacaagaccatgtatgtgttcatagaatgattgtcccttgtggtgacaacgctgtctggtctgtgtcttacgataacaggttgaatcagatatttccagttgatttggaactccctggtggcgtgggaagctgtgttaacattttcgcatttgtctgttgcagtaggagttggggggtgaattcttttaaaagagaatgtgccatacaaaacattatccctttggactgaactcattgtggtgagtgtagactgcatggagttttgagaatttcattgattggaaaagagccagaaataaacaagcagagcctcctctgcccttgtctagcatccaggtctaggagacctggaacctgagtatcagaggtgcatgggagaatctggagctaaggtcacaatgaaagtgacatgtcaatcagttaaaagtcaacagaatgtttattgagtgcctacgatgtgcaaggctcttgggggacctggagataagtaggcataatccttattctaaagcatttgcaatcacagtgggaaagagactcacaggtctgcagagagatgaatgagattgtttgtggcatagcagtttatccctttagttcataagctcttactgagcccctattatgtggtaggtaatggctgtgtgggggagtatgtggataaaagtctgatggggaaacaagcagacagatggtcacaggaatggggtgtggtgtgcatgagccaccttgagtgttcagagaagcacccacagtggaagtcagggagggattctcaggagagagccctgagctgagccctcagtgtaggtatttaccgagcagagtacagaggctgatggggtgaggaataaggtgagatgagagaagcttccaggaggaggtgttactggatctgattgagggatgggtgggattcagaaagcaggaggggaggacattgtggattagctatttattgctttataacaacccattccaaatcttgctggcttaaaacaacaaagatgtattagtttccattattctgtaggtcaggaaccccggcagggcttggctcagcggttcttctgctctatgtggcatcagcttgagtcgcccactcagctgcattcagcttgcggttgactggaaggtctgtgaagactcagtcatatgtctggtgcctcggtgctcctccacctggcccctctctccatgtggccaacctgggcttcctcacagcatggcggtgtcaagtagtcagactatggcgactgtcaagggaaagtggaagctgctgggcctcccacaggctagcccagagctggagtggcatcactgccacattctattgtcaaagcaggtctgctcttgaagggtgacgtggctggtatgtttggggagggaagggggattaatggtggtcatgatatctaccacagtgagcacagatccagaggtgaagatgtgtgatggttttggaccagtaagcagatcgccagaccgggaacacacactgtggtgtttctactcagcctgttgccctcttcacagatcctgtttcctttggaagcatcactgaggtgaggctgaattatccaagaagcagccaacaggggagaagaagggccttcagctgatgcttaaatagatctaagtctcttttatatccttctgttaagggcatatatatatatagcatatgtatatattgcatatatataatgaataaataaatatatataattgtttttgagatggagtctccctttgttgctggggctggagtgcagtggcgtgatcttggctcactgcaacctccgcctcccgggttcaagcgattctcctgcctcagcctcccaagtagctgggattacaggtgtctgccaccacatccagctaatttttgtatttttagtagagacaaggtttcaccatgttagtcaggctggtctcgaactcctgacctcaggtgatccacccatctcagcctcccaaagtgctgggattacaagcatgagacattgcacccggtcagatatatatatatttgagacaggatcttgctctgtcacccaggctagagtacagtggtgcaatcacagctaactgcagcctcaactttcctaggttcaggtgatcctcccacctcagccacccaggtagctagtactactggcacgtgccatcgcacccagctaattttttgttatttatttatttatttttttagagatgggtttcaccatgttgcccaggctggtctcaaactcttggactccagtgattcgcctgcctcagcctgggattcaggcatgtgctgtaattacatgtgctgggaattacgggcatgagccagtgcacctggacaattttttttttggagatgggggtcgggagacaaaaggtccacaagtctgggcacagtggcttacgcctgtaatcccagcactttgcgaggctcagacgggtgtatcgcttgagcccaagagttcgagaccagcctgggcaacacagggagtccctgtccctacaaaaaatacaaaaaaatatatacttttgagaaaatggtccaggcagagggaacagcattctcaaaggctatgaggaagttcttttgaaaaacccagaatagtggtatggccaagcgtataagcaaggcagaaggtcatcagcaatgaggtcaaagcgagggtaggaatgagatcaggcaggctttctaggctgtgataaaggagttggattttaagtaccgtgagaaactattgaaggattttgagctggggagtgattacttccgttgaaatccctgctcatccatgcttgtaaacagtggaggattaactaatgtcctggacttagtaatcactcaggaaaattacctattacttaaaccctccataccctagaatggatgtttaatctattcatgactgaacttttctccctttctctacctataaacccccaggcctccagccttggaagagagagggcctgtaaacacagcagacacagggtgaagggccctggtggctccggtgatgctgtaggtggccacaggtttttttgtttttcttgctttccctttttcttgtttttaaaattagcgttcaaatagacagtataaaaagccttagaaatggctgggcgcggtggctcatgcctgtaatcccaacactttgggaggccaaggcagcaggatcacttgagcacaggcgttcaagaccagcctgggcaacacagtgagatcctgtctgtacaaattaaacattagctgggtgtggtgatgtgcacctgtgattccacctacttgagaggctgaggcaggaggaccccttgagcccaggagtctgaggctgcagtgagctatgatcacaccactgcactccagcctgagcagtacagcataatcctgtctctttaaaaaaaaaaaaaaagcctagagatctcccttttcagcattcacagcttcatgtatctcgtgtatcgatagtttttttgagcagaatctcatcacttatgaacaaattaggttataaatggaaaggaggctcgaggccctttattccctatgcagtgtagccacggagttgagccctccttcccagatggactcgctcccattttcacaggtgcggggagcatcaggccttcacactctctcagcaggcatcctcttttgttcctttttcccaagttgcccagccttacccccactcgagtctgagtgacccatgagtgattcatagggaattactcacaggtatccccacaagtgggggtgtgtcctggccacagggtctgcctcccaggcactgggtgaccagcagaggctgactccctgcctgggacccaggactagcccggcctgcagcccagtggcagcagcatgtggagaatggggcagcccgccctccccagctggctttagcttcccctggccccacacacaggttgagcctcagctggaccctgccttcccactgttcctctcccggtagaggaaggaaggggtgctggtggcgagcaggaagggaaggcagagggacgtagctgtgtgcaggggacttctctttccagatgtcacgcttccaagtagagacagatgtctcttagatctcagcacactagagataatggcatcacttcctttttctgctctcccacccctttctgctcatgtctctgagtaattttcatcatagcgtttcttttaggagtgctgcaggtttaagcgtactatttttattgagttaagctataagaatgaaaaagcacagccttgtcaaataactatttaaccagaaagcctggccagggcactgcctgatgccaacattctgacccctttgccccaactcaaaatcagctgagtttggggagagtttaggcccaaggtagcatgatggacttagagttttataaacatataaaggctcaataaattgcttatattcaggccatagggaactcctgacaactcgccccctttatcctgtaggcaccaggtttctacgatgccctttggttcgtgtaaaccgcagctgctctactgcatcttagccttgaacttagagctgcagtgttcggagaatggagctttcccagagctgcatgcataaatgcctctgggatctttaaaaaaaacaaaaacaaaaaactcctcggctcactcaggagatcgctgctcagcagcagggatgaggtgagggccaggaatttgtaattaaatttataactaaaaaaaaccgctagctctagtcctggaaattgaaggctaccccagaggcagagggatctacccaccccaggtaagctgtgcccaaaaagaaagaggaggtgggggggagggaggacacagaatgaaccactgactgacactgcgccaccaatagaagtcagctttgtgtgagcccacttacggactcgattctgttccagtttttgaggtctctcctggtggcttactcatttagctttatagtgagtcttaaaatcaagcagtatagatcctcctatgcgcttccatataaattttagaaacagcttgtgaatttctttcttgctattttattttttttcagcggagtcttgctctgtcacccaggctggagtgcagtggcacaatctcggctcactgcaacctctgcctcctgggttcaagcaattctcctgcctcagccacccgaatagctgggattacaggcgcccaccaccacgacccactaattttgtatttttagtagagacagggtttcaccatgttggccaggctggtttcaaactcctgacctcaggtgatccatccacctcagcctcccaaagtgctgggattacaggcgtgagccaccgcgcgcggcccagcttgtgaatttctaaaaaaaatttaaaaattccaagagctgctgatgctcagctgagtgagtgccttctctgtcggggttctgtgatagcaaattactttccagctcaaatgtattgccacagattttagcacacatgactaaagctgtatttatatttcaacatccacgagtttgtactttgcagaaatttagacgcattttctatatttagccctatcccacgagtttcaccattcttatgtctggattcttattattttggtgtcaatatggtcccttctgccttaacaaccaacacagtgctccctcttataagcttgagggttttttttttcattcaaaccaaattcaaaaacagcattcattcattcatttatttatttactcatttatttttgagacagggtcttgctctgttgcccaggctggagtacagtggtgtgattatatctcactacagccttgaactcctgggctcatgctatcctcctgcgtcagcctcctgaatagccagaactacaagcacacattaccatgcccagctactttttaaaattttttgtcgagacagagtctggctatgttgaaaggctggtcttgaactcttggcctcaagcaatcctcccactgcagcctcctaatgtactgggattgcaggcatgagccacagtgcccagctcaaaagcagtgttgagatggacatcgacttggagtagaactattccagggaatgcatgtttgccttctcagccccagggatacttttacatgcctacttgtgagccaccttggtggcctgccctcctgtcccgcaggggagaccaactgtttcttcgaaaaagcccctttatctaagctcaccccgggcccatttagcaccacaagcgacagtttctctgaattttctgatgagtccagcatttctcatgcttcagtccgtgatggtatggggttatttcccaggaactagagctttgccactcagcagagcagtcaactgtgaaagcatcttccatccatccgcctagcattctgtatgtcagcactttgatgctttttttaaaaaaaagtctgaagtcttgatcagcatctttaaaatacttctccagtttcagcatttggtcagcaggtataccttctggatggcagggagatcagatttcaccttcactggacttctgatgaattacacttaacatttgcacagtgttttacaaatagcggggcattaaaagggcacacccacatccattgcttggtctgattggcatcaatttctgcctggatgacaggagggcactgcaggttgagcccgttgcatggacaaggtttcagtggctttcccacagccgagtctcaaccacaggctctaacagctaaggccaggctttctccaacagcctcttctctgtgacaagacaccccttagttgccaagaacagggccaaccctttccccaggtctcctcctgcagcccagctgctcagggctcttgcagaaagcagggcttcctggagacagcaggcaacccctgactcctgtaatgagcgagggtgttagttcagggggaagacactcgtttttagcacatcagccccatgaattattggggattttcttaggaaagtctttgttttaataaaagttgaaattgatgtttggttttgaaattgacttttaataggagctttcgaggagagggaatggcctttaatccctacacgtcaggttcacccatggtgaggctgtgaccctacccgacccgtgcggagtgtcaggcaggcctggtgcagtgtggctggtctgtccctatcattcctcaggagttaaaacacatgaggagcaaccttggctcttatgaagaattcatttcaaatggtctgttcttgaattagaaacacatgttcagttcagaaagcagtcggctgctggagaggtctctttccagaatgagcagagtgctatccagcctttgttaggacttggtcataaatgtgtgcgttcggcaccccacgtgatgctgtggactaagccagagctaggagaggccagggctgggggcacccatcccagtgagacgtcgctttttcatgactgtctctgctatgatgtggcgggctgctttggagccttcagccatccacggcactcatgcacggactccccaaggagatccactgaggatatctggctcaaggaatatcttagttcattctttttcctctgccttccactagtgtaacaagtctgggtgttgagggtgtaatggatatattaaaatggattatagtaaaagacagaatgatcactgtcctataggtatcagaactgccttgttaggaccccagaatggcaattatttttggcaaaattagggttcccaacttaatggctggcaggaattagggtgcatggcccatagcgcctgtcatagataggttgagccttcttttattcacccaatacttaaattgttcaatgtcagttaccaggccttgtgctaggccctggggatggcagagaattaagatgctcaagtactcatcagtcagccagagaggaaaggtctgaaccacagaaagagcccccagaggttcatgttgtttcctggtgcagaggcaggactgttcaagcctgctgggccaatccaagaaggcttcatggaagaggtggttttgaactgcgacttcaggagtgggtgccgtttgtctcagtgagggtgctggaagaggccatttcaggggtgcacatggtaaaggcacgaagccagggaagtcacatgagagctgggtaccagtgagcatactgatggcagccaaaggaggcgggggactcagaacgtcaggccggagagagtcagtttgatttttacgagaagtggagaacaatggaagatttttgagcaaaaaataatatgattagaatgctttctaagagcattctggaaaaggtgtgaatgaaggatccaagcaatatttccaaattagaatcagctgggcttagcaacaaatttgtgtgtgaaggagcaggagggggagaccaaaggagaaggaagagtgaaacaggactctgtgcctggatgagggagaacaagggcggatttcagaggaaaagggtgatttgacgggttggtgaggacaggggagaaaataagggccagtttgggtggcctgtgctttgccattttaagatgctttgctgactaacttatcgagggttgaaggacagaggaaaattctgttttcccctgagttttagatagagagacatacgcttgggctaaaaggaagaaactagtggggaggaaggaaagagaggttgagaagagagaggagtgatgtcagatggagctgatccaagaagaggagggagggtggggctggggctcaggcagaggcgtgtgccctgggaggcaggccagcttctgagccagggagacggtgtccagagaggaggaaagaaaagaaagatgaggagtcaactcaagtgtgcttggattagaggggaaagggcagaaacaggccgtcagtgtcttctacaattatattttataaaaataagtaaaataacactaagaagctcataatgaaaaccagctcccctgttcccttccccatccttcttcccacgccccagaggcagccacatgtaaatcttccagctgtttcttttctttggtacttacctccgtatttctaaattgatttatcagctttagacattgtatattgacccccccttcctcccaattcccaacagagttatcctacagtcaatatgcaacatctatgctatgctgagctcaatagctctctaaggttgtgttgctttcctttttacttttctcttaattggtagtagtgttgcttatatcctatgtatctattttggagtcttcctacccttcaacagcctcttaatacaattttctacatcataaaaagtatcagatcatttgtcagttccattttttttaaaaattgacctccctcctggaattcttgctctttctgatctaacctggactggttattttctagacttttgcaataaggctttcaatctgagcctgccttcactactatcctagaaaagtctttagcctctctcccctttcttttactctctgttgctttttcatggtttactcccttgtttcagtagtgcacatttcccaatacctttttaagaaagggtgcgtgagagatggcattttataattttttaaatattgcctgtctaaaaatatctttattctactcttgtaattgatgggtatttttgctgggtacagatttcaaggttgacaattacattctagcattgtttgatgacattgttcccttctcttctagtttccaatactgttgagaagcctggtgatgccttcctgatttgcagtcactttttatattttttcccttgaaagtttgtaatatctcctttttatcttcagtgttctgaatgtggcttggtttattcctcttattcagtaattgtgctggcatctttcattttcttcagttctgggaagttgtgtgtttatttgataattctctccttaccatcccattacccctacataccagtttttctgatttctttttttctggaaggacttcctaggttgaccctttaattttcttatgatttccttcctattgatcatcatttcgtcatcatgttctaccttctgaaagatttccttgatttttatctaccaaccctttcatggaaatctctggttttggcaagtgcctttttaatcagcaaaggctcacccttattctctgactatcccttttgtatagcaatcaattcttgcatcttggatgcagtatcttctacttctctgagggtaggatgtgtttattttcttgcactgtgtctgtctctttagagttccttttctttagttggtgtggcttgctttggtccctgtcgttcacacaggcggctttcctcatatgtcaggtgattttgactttggttcacatttaatggggagacactagatagagtttcacgactgtgggcatcatagggtcaatttgaagaatcctcctatatccagctagaggtataagcaagtggctgggagcttagcagaggatggggactgtgagcctccttattcagggagcagactttcgcttagtgtttttagactggtatcttactcctatcttccactgtagctggtatctgcatgtttttcaatccctctgcctcagtttctctgtctaacccagcctttctcaaccagggttctaaagagatgtaaatcctgatgccattctattgtatggcgtgaactaacttctctgtatctagaatggaattagctctgtatcatcctcagggaaaactgagagagtaatcactcaaattgttttctcttgggcttctctcatggaacattggtcaggaaaggctgttggagaaactgcctctctcagggtgttctggcaacctgcctctgtgggtggggcggggggggggcatgtatttgatctgccatatttatcttagttttatttttttaatttttagttgttatgtgtacagagtagatatatatatatatggggtacatgaggtattttgatacaggcatgcagtgtataataatcggggtaatagggtatctattacccaaagcatgtgccatttctttacagacattccaattctactcttttatttaaaaatgtgcaaaagataattgctgactgcagtcaccctgttgtgctatcagatactagatcttattaactctgtctaactatatttttgaacccatcaaccacctccactgcccttctccccagcttagtgaggctggagtgcagcgggcgatctcggctccctgcaacctccacctcctgggttcaagtgattctcctgcctcagcctcccgagtagctgggattacaggtgcgctccactaccccgggctaatttttgtttttttgttttttttttttggatatttggaagagatgaggtttcgccatcttggtcaggctggtctcgaatttgggggctcaagtgatccggccgcgtcggcctcccaaagtgctgggattacgggcgtgagccaccgcgcccggcccgcttagggagttttaaaacaaaactagacggcaggtcgggaggcagccgccgatttttgtcgggtcctaaacaaaaatcaaatgtgttgcgctttggaactctgggcatcgtgggcaccaggctgacgggggcggcggggatggcgtttcttggcgagcgggtccctcagccaggcccgggtattgtcaggcgtcccgtggacggtcgggaggggcttcctggagggctcgttccgggaacgagttcaaaggaggaaagggcggcagcttccggcgccttccccagagggccgggagacgcacgccaggagcttcctccgttggaagtcccttccgctggcgacgtgggcgctgtggccgcggccctcgtggagcctgagccctcctcacggcctccgcgcagccctggggccccccggcagggtccctcggcagcccgcgggagaggccgtggggccccggcaggagtgtggttcagagacggtgcgggggtcggtggcctcaggtccctttcagtcacttgcgacgcacccgcggtttccgcgtgctgtgaaatcgggaattgttgatgccggagccaagagtgaggccggtttggaaagtgcagccgtctgcgccggagaggctggaaacgccccggccccgggcaggggtccccggcggcgtccgggtggcccgcggcgtcctcggaagatgcgggcggacgcccgtgtgtcccgctggcctgacgtcgcaggggtggccgcagagtcctcacggggaccccgctcgccgggactcatggaggggaccctgacggggcagtcagggctgaggtttcctaatcccgtgtgtttctttctccccgacgcccggcagaggcgccctcgcccccgccgcccgcagaggccccgaaggagccgctgcagcccgagcccgccccgccgaggcccagcggccccgcaaccgcagaggaccctgggcgacggcccgtcctgccccagcggccccccgaggagaggccgccccagccgccaggctccaccggggtcatcgcggagacgggccaggccgggccccccgcaggcgcaggcgtgtctgggcggggtctgccgcggggcgtggacggccagaccgggagcggcaccgtccccggcgcagaaggcttcgcgggcgcaccaggtgaggcccggggctgcgcggggaggagcgcggggctctcccggaacttccgcctgagcctcggggtctgctgaggggcgtggcggttcggggtccagccttcgggggggcaagttccgaaatgcagctttggaaggatgccgaggcccgagggaccgctcatgctagtccagcacacggaggccggggcacctcagggacagtgcagtcgtctgtacttagacatactgagtggccccgccggttggagtacgagtgccacacgggcagctcattgattcccagcaggaaggatcttggaagccagaagggtattgggagcttgggtagcagcaaagcaggtggcacagcagcgtggctaggcaggagggctgtctaccacgggcttcgggacttggggcagcttcctgagctctctgagctgcagttccttcaaccacaaaatgaggagagtgcaggacctcagaggcttactgtgaggatggagaaaagcccagttcagtgccccactgggaagtgctccccatgagttgtgaatgtctgcaccattactgtcgtggtgacagtgggggtggtgtcagagtagagacaggagaaggaagtgagcatttgtgggatacccaccacgtgccagggactgaaccctatctggatctcctgcagccctcccaatggcactgtgaagccagtgttgttttacagatgaggaaactgagatttgtggctataacagataaacagatgaccctgaatggggcaggtcatgtcatctgccatagatacatgcatagaacaatgcaaaccagtcagtcccctctgagtcagaccaggctgaccatcagggacatgcagacactggcagggctggggttgttccccatcggtgatagcctggtgcccccatggcccctgatgcccacggctgtctggaaggctgggtcactgctgagaagacaaggagacattttctctcaccagctttcttttttctattccttcttagacacctgagctgcggtgatcacagctcttaagcagatgtcctgcattttctaagataacacttatcttctgttagttccatgtatcatggatgcttaggctctcttgggctatttgttccctcatttgtccatccacgcacccttccgtgcatgcagcactcacccatgcatctatccgtgtatcccttccatccacccttccatccagccacccacccacacatgtatccgtgtatccacccatcgatacatccatccacccacatatgcatcctcatatgcagaggctggggcaccccagggacccacccacccatgtatccatgcacatatctgtccacccacctatgcatgtgcacatccttccacacatcaagccgtgcactcttccctgtgtgcatccactcatccatctatttgtccctccacttctgcacccacccatccatgcctccatttaataagtactgcattcagtctagttgaaggtagagctcttgaacagataacactgctagagggcaaatgttagttggcttgtgtgactctctcagtcacagagaagtctccaaggctccagtgcccatctctttctttcctgcagccagcttgccctcagtgccctcttccccgccagggataaatgggctagtgaggaagcagggacgggctggtacaaatgtgcctctgcttgaaggagggcagtgacagtgggtgcccttgttctatgtctgtttctatagtagtgaagactcgatttgaacttgtgaggagcagaggaaaaagggggctcagaacaaggagctggtgcttagggtcttgtttgacatgccatttcctttctgtttttcaggatacccgaagtcacctcctgtagcttccccaggtatgtctgctgagagaccaggagcaggaggagcggtctccttggtggcctctgcccctcctctgcatctcctgcctcctccctccaggctattagcacaaatcaagcctgggcccagcccttccccacccaccagcactgggacagccctctgctgactatagtggaccaaattccccaaggtttgctccccagagagggtcagagtcaggcccaagacaaggaatcttccctcctccatcatcccagctcattgagtttcccaaggggatcactgggtgggcctctgcccttgtgtggtcctgatgagcttcctggggctccaggttttactgatttattagtaaggaagcagctccctagatgatgatgcacccactgcctggcctggcctcctaatatgtgtgctcacaagtgtgtgcacacactcacacgcacatacacatgctcatctcatatgcttacatgcccagcctcacacacaccctcctaacaagagtctgtccggtttctcagattcctcagctgtcctgcctgctgatcctcagacagggaaccctctggctgttgggcatgaggagtttgcttcaccactttgggtgaaataaaatgggcctggcacctgggcctggcacgtaggcctcagttttccaggccctccccctggaggacagaagcacccgggtcaatccattccatcctttctctgctccaggagctccggtgccttctctggtgtctttttctgcggggctcacccagaagcctttccccagtgatgggggcgttgtcctctttaacaaagtgctggtgaacgacggggatgtttacaaccccagcaccggtgagtgtttgaacggaactggtactgtgtcctcctcctaccccaacgcaggtgggacccctcccaccatggctggctggttcccagcgtcccgtgggctcagggaggacgccaccctggagcagatgcccgagtgggcctgcactcctctgcccgactctgtgggctttcacgtagaacgtgtcccagctcgagggctgcaggctgcatgggtgtgtaacattttctagtcgtgaggtcaacacgctagtcctcagcattcaccactggggttgctattcattttttacagcagttatgagggctgtgccggcacagcccgccatgccctggccacctctgatagccaccattgcacccctctctcaggctccgacagtcatcctgacaacctgggccaggacaagcgggaggctccctcagggtctcctagtttatgatgaacagagccacaagagggactgcgctccccagagggcctcatgctctgcaacagaatcccttcagctgggagcctgagtctttctgcagcgcctggcgtgtccccctgccccgggttgttgctggaggtcccaaggatcatgggtgtggagtttacctccgagttccctgtgtcccatcagtgtccacctgggctgggctgctctgcccggacggagggcagctccaaggaaacagggtccaggggtgcctgggcccatcaggacagagctcccaggcaggtgtggggaggtccccacagcccggggtctttcctgacgtctctctctgccctcagcagtcactgttctgctcacgcactgtgaacagggcctcctggaggggggtggggcagtggatttcagggaggccttgccacccataagccactgggagggagggggacttggtttccttcttggtagtttttagccacccccagcctcacgtttgccctgtctagtcactgtctggctaaatcccatctgtccttagtcagtggctcttaactgttatgttagcaagcctaagttacctgcagaactcagagaaatgaattctcagtgccccaggctgattaagctggagcttggcatctaaggtcagggcgagagggaacgccacttactttccaccgccatgtagcttcctcctgggccccacagacctccaggcctctgctcagagtggcagtggcctttggggtcagtacatcagggaaggggaatccatacaggcctcaatgcttgcctcctcagaagaaagaatttgaccaaggggcatgaggcagagtgagactgaggcaagttttagagcaggaaggaaagtacactcggaagacggccaagtgggcgacttgagagattcaagtgcggtctgacaggtgacttggggtcttatacattggcatgcttccagggttgcgtccctttcctgattcttcccttggggggccgtccgcatgcacaggggcctaccagtgcctaagaggggggcgtgcgcagtgtttcctggagttgtgcatgtgcccacgtgaggtgttcttcctgtaccagtcaagtgttcccaggaggtcacacaccagttaaacaccatttgaaacatcatttttgcctcttaatgcacatgcatgagcttcatcgcccaactccggagatcttatctggaagcagctgatcatcagcttcaggttttgtctgactattgggcgactgcctttctgtggtgctggctgcaaccaatcattaatttagagagacagttaacaactgcaggaccatcatctgatggttgcctgacattcctagttggggtaggggctctcctgccctgctcccatctgcctgactgtaacaaggccatgctccccaggtcactctgcactgccttggccatagggatggttcgtctgcttggacaggttgggtggtgcttgcaggcagggactgtgacctatagtctcgcattcccagagctatctcttgtcttgcatggagcaggtgcagaaagaaaattctgggtgaactgagtgaggcttcaccacaggcgactctgaacaaaggtgaaggccacactcaaaacgccagggctggtgctggcctcagggccaggtaccttaggaagcatctggaaagccctcagttacttgctgttcaaagttgggaaggggactgggtagccagacctcttctgttttccagagcagattgaaggcttgggctcctgacaaccacttttttttttttttttttttttttctgagacagtcttgttctgtcacccaggctggagtgcagtggtgtcatctctgctcactgcaacctccgccacatgggtttaagggattctcgtgcctcagcctcctgagtagttgcgactacaggtgcacgccaccacgcccatctaattttttttgtatttttagtagagatggggttatccgtgttggccaggctggtctcaaactcctgacctcaggtgatctgcccaccttggcctcccaaagtgctgggattacaggcgtgagccaccacgcatggccaggaccaccctttttagctcctgggccctccgctttatgtccactcttggcttgttgtcagcggcaaggtccgatgtctgctgcggagcccgtgagtgatggccattcctgccggcatttggtgttggcactgactctcctagctgtggggccacctacagctgcttctgcttagcgaattgtgacatgtacagatctttccaccttcctcacctttggccaccacttcctttcccaccctgggcccagaacgtgtgggtcatgggctgagtatcagtgctcacttctggccattgcccagcatggggagaatgggcctcttccacgaggagcctggcatggcccctggggttacaaggtgccatgtctgcctctccctgggttggtggcaagcttcgtttttattggccctgcctcccgggtattctgcccagcagccaagctttgaggctgactttagcctttaggtgcttccaataaggaatgcctccaagaggcattcttaggcccatggcaaaaagtggtatgggctaaggtggcctctgcatcacgggtaggctgtaggggatgagcataaaaagcagctgaggcaggcagccagctaccatgggaagacagagatggctggtctcccaggcccaggttaatcactggggggccacttactaccatggcaagggctgtgacgacagcaggtgagcacagggtttgcctttctccccgcaggggtcttcacggctccttatgatgggcgctacctgatcacggccaccctcacccccgagagagacgcctacgtggaagcagtgctgtcggtctccaacgccagcgtggcccagctgcataccgctgggtacaggagagagttcctggaataccaccgccctccaggagctttgcatacctgcgggggcccgggggcattccacctcatcgtgcacctgaaggcgggagatgcagtcaacgtcgtggtgactgggggcaagctggctcacacagactttgatgaaatgtactccacatttagtggggttttcttatatcctttcctttcccacctctaaggtggctggggagatgtcaggggaaagatagatagttgtaaaaactctaaagctttaatatattcggtttgtatgtaatggaagcacggggctagagtttccacataggccccaacataaaggccttccctcgctgttgaggccaccatgccttactgcatccagccaggctgcagggagtgaggcacacggtgaacatggccactgacttttctgccactctaactggacaactggaagacttggaaaggcctccacctgtatctacactctgagggccctggactgggcctgagcttgccacagaggctccgtctgactgtgggctgggaggagggaggcaggggagagccggtcacggtggctggtctttactgcagggcagcactgtggccagctgtctgtctttacactgcatgcagaagtttaaacactgaagtgccgaagtggcccgtgccgccgcacagagaccccgactttagtttgggctgttccacgcttggctcaccattgccgcctgggacttaacctgctcaggcgggccttcgcccagctgcaaatagggatgcgttagagactgttcccaaagcttgttgggctccttaaatggcatgtacaatttaagtgcaaagacagggagtgtcaataaagatggaaagccatttccagttaacttttgttaatttaagtgtggtcccttacagatcgggagttgttgctaaaaagcaaactgaagaaatgttttgtttcaaaaagggctacagaaagtaaccttgagtaaaattaatctcagctacaaaactgttacccctccgcatccaagctatacacttgggttttgtttctggcttgtgaagacggaccagatgtgcacggaggtcaaggccccatgtcatctgcagctggagcggctcctctggggatgctgcactcagatcccacagcagctgcccaggctaacttgatccctgctgcttcactgcaccaatctccagcagacacagctcgccgagctcttgggtttctaagcagcaggaagctcaacctaacgctggccacacgctgacagctgagcccatctgagaacacggcatcttcacacagcgagacgcctccactgaggggaggcccgggagtatcaatctgtcaccagtggccacggagacctctcagcacccttagttcaaggtagtctctgtggatcaggttggtaacacctactggttaatcaagtcccactggggaaaggtttggacggtagaatcaagagctgcagtttccttggcccacaagatgctcttatgctgtaaaaaaaatgctttaagaattgtttgcaaatgaatttacagggtggccactggacacttcagagttccttatttactccccccgccacagctaggaagaccagcaagaactaaaggtttgccgttttactatttaaaatgtggacctctttgtccaggagcgggagggagaatggcatctcaccccattacaacagctggggaactggctaaagagagctgtcagagagtatccttggctgtcctaggaatgactcatggaaagcgccccagtgcagcagtgttttcaggaaaacccagtgggcacgcgccatcgccctctcctctcctctcacgctccttttgaaaagaccgcactcggcgcccaaggggacgtgctcaagagctgcaggggcagggcccaggcaaaaggtgggtgatgactacctgctgctttccctactccgtagatgggtctggaacatcgggtaaaacccagtcctcctctcagtgcatctctactcaccaacaatggtgaatctcagctctgtgtattcaagacaggcaaaacagaatatgcctcattatggctggagcgtgcctctactttgagataaagctggatgacaggtggatcctggcccacttaggagacatctttagaaagggaaaggctgtctttttgtacaggtagtagaacaacaaggtcagctgagcttaaggctgtggggttcgaagcagcccttcaagaagtcatcacccctgaagtagtgcctgcgagtcagtcagaggcataccaaaccctgagacagaatcaggcacaagttcacaacttttttttttttttggggggagacagtcctactctgtcgcccaggctggagtgcagtagcgcgatctcagctcactgcaacctccgcctcccgggttcaagcaattctcctacctcagcctcccgagtagcggggactacaggtgcatgccgccacgcccggttaattttttgtattttagtagagatggggtttcaccgtgttgcccaggctggtcgcgaactcctgagctcagccaatccgcccacctcggcctcccaaagtgctgggattacaggtatgagccaccacgcccagccaagttcacaacttctgatatcaagttgttgctgagaaaaggtcaggacacttcttaagtagagaaggactgtgacatcccctccaaacctccatgtaacactaacaaatggcctcatttacacgattaaaaacaaaatggtatcgtcaataaatgcaaaccttaaactgcatttgaaatta

SEQ ID NO: 424 - DNA, 17866 bp, Homo sapiens
  source 1..17866: mol_type = genomic DNA; note = NC_000016.10:1309152-1327017 UBE2I [organism=Homo sapiens] [GeneID=7329] [chromosome=16]
gaactcgcgggagcgtcaccgtcctgcgacgcttcagaggatccttaggcctcagtggtctttgacccccggccccaggacctgaccccaaggaaacctccgggacctgtggctggagaggtgaccgccaggcatccggggagcctttggagatctcggcttcctttttcccccgctgcttgccggcgtgtcctcgggtggacgcgggcagcccgaaggggagtttacagacgctccctcacatcggggacgcggctcctttaagggcgtaggtgtccagggcgccgcctgactggaaagtcgccccccggccgggctcctggggcggacccggggcgcgggcgcgcggcggcggggcgcgggcaacggggagcgctcggcggcgcgggaggcgctcggggccgggcggcaggagcggcgcgcgaggcaggcgtgcagagggcagccccgcgttaggccccgccccgcgcgccccgcccgcgccagggtcctcggagctgctctggctgcgcgcggagcgggctccggagggaagtcccgagacaaagggaagcgccgccgccgccgccccgctcggtcctccacctgtccgctacgctcgccggggctgcggccgcccgaggtgagcgcgtgcgggggccgggccggggccgcggggcgggggtcgggccgaggcctctactcctgttgggcccgggcccccgactgccccgcgccccgccccgccgagccgggccccgcgccgcggccgagctttccggggagcccgagaggccccgcgctcggcgccggctcggtccgcgctgctggcgccgctgggctgcggcccgagcggccgggccgccgcaggccttcggggccggggctcccccacttcgcccccgaggtgcgcctggcgcggggccggggcagccacctgcagccggggccccgcgaggccgcgccttcctcctgcgcggggagcggcttccggggtcacggtcgccccgcggacggataggatgggccgcggggggagagtcttggattgcaacatcgctggctcgcgggggtgggggccggcgagcgggcttgttttcggtgccttaaaaccaaaacaagtgtaagttttcttgtgcctctgaagatgctccgctggcgcttgctggggccctgaacgtgagcgcctcgctggagggggagttttattctgttttggacatctctttttatcggttgaatagtagttggttctggtagttaacgtgcgtaggaggaatgtaagggaatgattagttgggcttgtgatcgtggcctgtagtcacgcttgaatcgcagaatgaagtggttttgtttgtataattggaagttacgcttagtttctctgtttgcaaagtgcctgtctttggggagttcggtttgtttccttttacaggacctaccccaagtgtttcttgctcttcaagaaacgttgcctttgggtagagaacctatgcaacggaagacgggacggatcctcagtttgccctgattgctcattcagagaggtccgttccctaggccactgggtgattgctggtgtgcgcttgtatggtgtctcagggtttgggatcttgcttcagaaacattctcggggcctggggcagatcaggtgcggccaggtaagcgtctcccgactgcaggtgcttgggtcttgcagaagggaatacctccccaagcctgggagagtttgcatttgggtgcaggagggcctttaaaggcttcttgtgccagcctgtcgtggcgaccacccgttgtggagatcagtgcggtggagttgtgggaggtgagtgctttgctcaccctcagccaggaagttgctctgaagtcggtgctgtcaaccagcagagcaaggcggtgatccgagaagctaaagctcagccggttgcgggcgcccagcaggaggacagaaggcagactttcgggccgctcctggagtgcccggccctgtccccgtttctgcagtgtctgggccttgcctggctctaatagatgagggttgtttttgtctttgcatcataaaagtttcttgctctgaagcgtttagtaactactagccgttcactaagtgcctatctgtgaatttggaagggcaaattcgattttcagcggaattttgaacgcttgatctgtgttgtgattacattgtaacagattggccgctttctccagaaggccagtaggagggggtgcagggggaggggcctggcttctgtctgggacacggtgggtgtgcacctgtggctccttgccctggcggtgcagtgcctgtgagaccaccccgtggtgctgagtgctttggggcaggggacacagcagcagcagccaggtcttggcaggaggtctcgcaggaccacccctcacgacttctcacacctgagacagcaatagctaggtgctgggacgggggcctctaggcggctctgtccagtcctcagcaggagggctgcctgtggcagggtcccaggcccgtctggcctctctgtggcctggccttgcctggctgtgaggatagccttgcccatggtccttcagtgtctggagcactggcctgaggcttcagagacttgcctgatgcctggcctcgctcagaccccgggcacctgggaggtcgtgcctccttgaaatggccactcgccaggctgctttgcaccgcaccgggcacaggctgcggccactcaggaagcccatcctggggctggggaagcgagagctgtgagtcctcaagtcgcagctgggctgctccacgtgggagtggagggtggaggaacgtgtggagtttcggagtccagcccagtgcggagacagccttgaaaccgtggttggcgggcgctccactccgctctgggctcgaaccctgcctgaccatagctgtgccccccactttctccctgtctggcccctggctccccccccctcacttagaggagggcacggggaagggcaaacggtccagagggcgggcggcctgcgggctcctctgcatcatgtgaggagggcgtggggaaggacatcccggtggggcccggtctggggctgcctccagcccgggctgcctgtcttggacttagtcgtggacctggaggccagtgcccggctggcccctgtcaccctctcgctgtgacgccagcgcctgctgactggaggacccaggttccttcgcctgctttttctcaggctgccctgaggatctgtgtttggtgaaaaggagccaaattcacctgcagggcaggcggctctagcagcttcagaagcctggtgccctggcgacactggacctgccttggcttctttgatcccaaccccacccccgatttctgctctgctgactggggaagtcatcgtgccacccagaacctgagtgcgggcctctcagagctccttcgtccgtgggtctgccggggactgggccttgtctccctaacgagtgccaggtgaggctgcggcggctccgacgcaggtggagctgctgacctggcccctttctgcggctgcgaggtgtgtgaggttcgtgggcctccacaggtgtgggagccatccaggtccccagggcccttgtggctattctaggacagcccaagccgtagtagggacggccccccacagcttagaagacctggctcagtcccccagctttgtagaggtggctcttgtttggtgttgagatatcagacttgggggtagtagcttcagtgttcccatggactttgaaaaccagcacacacttaggtttgaattcttgggcaagttttgtatcttgagcgctgtttttcgtgggtaaaggtggccaccagtagggtgacagttgagggtggcattgaggctgctggccctgtctgcctggtgtccccagtgacagtgctggccgacaggctcccgccgagaacgcaaaggcgaaggtgccaagcccccgaggtcccgtgcagatgtgtggagctggaatctggcgtgtgtgccgctgcctctgatcagggacctggtcccctaccccatgctcctgccctgccctgcaggacccgtctgtcccctgaagccacagggacgtggtagtggctgcacggtctgggaagggtgtccccgtggagggctcctctctcagtgaggctgagcctctgccctgtggtacttgttctgctctgtcttcaacatggtgaaaccctatctctactaaaaatacaaaaattagctgggcgtggtggcacacgcctgtagtctcagctactcgggaggctgaggcaggagaattgcttgaactcaggaggcggaggttgcagtgagccgagatcgtgccactgcattccagcctgagcaatagaatgagactctgtctcaaaaaaaaaaaaaaaaaaaaaaaaaaagaataacaggtgtcccctggcccagcctgagtctcagttctgagcgcctgatactaaggcagggacccagcaccccacatccatctggggccccagccctgcctagtccccacctgatggtatggtgaggaccctgccatgtcagccaccacagggtggcagctaccccccagccgcagcggcccagcctctgaacatctgtctcctcaccttcgagcagaggccgcagcatgtgtcgcagaccagggctgggttggggccatggggaggggtcctacctgcccccgcctcccggtgatctgggcgccgctcacaaggcctcccctggtagacccccggggtcggacgacggcttgcaagaagagagtccctgctgggccaggccaccgtatgttaggagcaagcctgcctgctgcgggccacgtgcgcgtgctggggtggcaggagcccgctcgcctctcctgaccccgtgctctgcctcctgtgttccagggactttgaacatgtcggggatcgccctcagcagactcgcccaggagaggaaagcatggaggaaagaccacccatttgtaaggagggcttcatttctgtgtgcagtgccgcggacaggctccctcggctgaaaccgcgccctccctactgggagggagctggtcgcgtgcctgggctgggccggtgggactcgcaggccggttcttggtggttttgctcaaactagatgccgccacgctgatatgcttttgtggttgttttcttttctctcagggtttcgtggctgtcccaacaaaaaatcccgatggcacgatgaacctcatgaactgggagtgcgccattccaggaaagaaaggggtaaggggcgctgccggcctcctgcctgtcggggctcagcagatgcgtgcggcagtgccatggggatactccgctcagatccctgccgtccgtgacggccacccttgtcacaggccgcggtcaacagctcagatccccagctgtggcctggcccccgccccgtgaggacttgagctcagaaggtggtgctggcaaggttggggtgacagctgtgtccctaccgagggcatttctggttgagaaggaagcaggctgggcctggccgggcacagggctgagctgtggcagaggggaaggggctctgatgtgtgttgggagcaggcctgaggggcgggcagcctttgcgtgctggaacccgggattctgctgtgtccttccaggtgtggctcaggtcgcgggagctgggtttgcaggagagccaccccggcctaaaaccgtctactggagaacctcctggggcacagggactggcggcagccacctaggatgcctgcttggggccccgtgtgtctgtggcaagcagggcggcccatgtgcctgtcctctttgcccggctcacatgaagtgcttggccagggactccaggccggcttgcacataaggttcatgctcgtggactctgaaggaaggagagatccctgaggtgttggtcctgcccgaggccttgttccctccggcccatgccagcctctgggtttcgctctgaaactcacagcagctccggccccctgagctgagcagtcccagcaggactcagctttgcccgagacaggatgtggcttggatttgtcacttgtctgaggctctgctgagaacgtcccttgcccttcacattacggcgaggcaggtgcgcgcgcggccccaaggaagacgggagtggtgtcgggttgtggggtggcaaaggcgcctcatccaggcgggacctggggcaggggcttgcagaacaccctggggtgagggcacgggtgtgctcttggcgctgccggccccagtgtgcggcactcgttgccccccagcccagcccccgacccccgtctcctcctctcctttccaggagggcctttccgactcactctctgggcatggcagaggtcctgaccgcccccttggtggggctggtccaggcttcaggctggtatgggagccgcctctgtcgggcctctggcccccggtgtcctcgcagtcctggaggttgtgtcctagaagcgatccccttcctcctgggccggcctgcggcaggcaagcagcccatctcaccacggtttatttccccacagactccgtgggaaggaggcttgtttaaactacggatgcttttcaaagatgattatccatcttcgccaccaaaatgtaagtagctccctgttcagtgtcctggaagtcggcctgttcctgcggggattggagtcctctccaaagaggcccgtggctgtggccgtggcgccctggtccgggcgatccatggagctgggagggagtgagatcacagatttggaggtcggctttgatccctgatccccgcctcaggctgcagatgcgagtctgtttccagctccacgggtgggcggtgcacgtaatagacttagtctctcatcccagctaattggctgggaagctccagagtcctttgcagggagaggctgtgagatccaggctggagctcctgggctaggagtgcctggaccctcagtgattgttggcgatgaagacaggatttggtgcccacaagaccccagccctggatgggatggacgtgcagaagcgccaccactccgagtctcactggagggtttatcttgccccacctcactgctcttcctgtgggctctcgcagtctctcccacccggggctgcgtctgcagccgggcaggcatagagcaggggagcagcagagaaggcgcgagaagaaagggctgaggccaggttcgactttgagcctacagctaagttagtgatctcagtcagttcagcaaaactcaggagagggaggagagggccgccacgtccctgccgtcccatagctggaaatcggcaggccctttctgtggtgagttccacgcattaacacgtgcccagcacctagacagcgcctggccacggtgaggcgagagtgctgtgtaaaagcttccactgcaattgtcactcaagacacacaagtgttttccacagtggcagtgaccagaggagcttgaggactgctgacagcaccagctggtcgagacttgcttcatttttggattgtcctttgctgtttgattttttttttaaaccatgagcaggtattacttaagatgacttattttaattaagaaaaatataagaatgagacacagtagctgctttcattgattctgttcaaccgttgattggaattccaagcaaatgcagcaagacaagaaaaagaagtcacaacggaagaggtggggaggaaggccaggacaacagctcagtaaagctgaggtgcaaggctgggcacggtggctcacacctggaatcccagcacttttggaggccgaggtgggaggatcacctgaggtgaagaccagcctggacaacatggtgaaaccctgtctctactaaaaaaaacaaacaaacaaacaaaaattagcgggtgtggtggtgggtgcctttaatcccagctgctcgggaggctgaggcaggagaagtgcttgaatccaggaggcgggtccagtgagccgagatcgcgccactacactccagcctgggcagcagggcaagaccctgtctcaaaaaaaaaaaaagaaaagaaaagtagcacaggacctggtaaaggaaacaaagctaaataataaatataaaaatgaagtcgagattgaggtacacaaatctgcttttatatcatttcagcgagcaaggttttaaaactgccatttatagtagcatgaaatacgttggaataaatgcaataaaagattggttcaggacctctgtaccgaaaactgtagaatattgcaagggaaaccaaggccggcctgagcggtagctgagctctgccgtgtgtgtggaggggaacacacgacattgtacagacagcccttctctccaggctcgtctgcagattccatgtgatcccagttggagtcaagcacatcttgttggaaactgtcccatggacccaggaaatgcagaaacgtggaggccttggcttcttggtggggtggcgagacccaggctgaggctccgtgggtgcagagcacacccacccaccccccactagacctgccacgggacacggtgatggagactgcaggcttgctgagaagacaggcaggcagacccgcggacagaacgaggagtccggaggccacgcatgtggtggtttgggctgtgacacctgagggatattccagcaggagagacgagctctgcctcccaccatagagaaacagcttccagatggcttgtggtgcccaagcaggacagcgtggagaggaagacccgggatggtgtccgtgagccctgggcaggcagggatctcttcaccagggatgcagtgaagtgctggccggagggagattgacgagttgactaagttgaaattaagaatctctctttatcataaagactgcagttggcgccgggcaggagggcacactacagtgtatgtacgtacctcagccctcaccctgaatctaccaagagctcctgggaatcagtaagaaggctgccatgacgtccagcgtgtccctcacaggaaaggcctccacccagccagcaaatgcggcagggatgcctggctttgccaaagagtgaaagcctccccagtgggatctgccgtagcgcacaggggagcagacggagccgcggcgcagggcagcgggagcctcagccaccgctggagagagcggatgttctgaacgtttcccctggacgctgcctgccacaccagtggaagctgagctcatgctgtaggacctggctgttcacttgagtcagtcgagattcacagaagcacatacatgtgtccaccagaggcacagatgggtgccggtgtcacccccacttgccccagcccagacgtcctaggatgacaggtagggaagagtgaagaggccacatgatgcctggcggacagtccagacaggagggcaccccctttgtgttccttctttgaagcgcgggagcggccaagccggaggccatgaggaagtaggaggcagcctctaccttgggagggacaggtggacctggcagtgctggcatccagcatctgtgcctttctgcgggtaagttgtgatcggcagaagaaacgagattgagaatcagattaaattgaaattaggcaatttttgtttttgccaaaagattcccttagaagaggaaaaggtcgggccgggcgcgttggctcacacctgtgatcccagcactttgggaggccaaggcaagtgaatcacttaaggtcaggagtttgagaccagcctgaccaacagtggaggaaccccggttctaataaaatagaaaaattggccaagcttgatggcgggtgcctgtaacctcagctactctggaggccaaggtgaggcgggagaatcacttgagcccgggaggtgaaggctgcagtgagccgagatccagcctgggcaccacagtgaaactccatctcaaaaaattaaaaaagcaaaaagtcaagccccaagcagaagagccctgtaagacgtatcgcttgaggaacttctgcgaagcagtcgccaggaagcagcctgggccgaaaggggcgctcagcggtcaccagcaggcgcagcgtagcaccacggagtggctgccgtgcacctcacccggtggctggaatccgccagcgacgcagcctgcgtgagcagcctggaagcagcacggcttgagggccaacaccgtcaccccacattccacagcagcgcgctcacgcgtgttcgcactcaggacagccacgcagctgctggtgtcgcccgtgtgctcctgcggtgtgggatggtcgcggtgtgggacggtctgcggtggtgtcttcgcgttccccagggagtgtgccctgtgcatctccatggtacctgaagtccaggaagctgcctgcggatgttgcagttgggattacggggcagatgcagtggtcggtaggagcgagtgttcggggaagctgtaggtgttcgtggcgcgttggctttctggtaattcctccggctgcactagacatgccgcactgtgtgtccttccgtagcattgagagagaagagggaggatgcccaggtaaaagatgggaaatagcctagaatatcaactgtgatggtccctggtggggctaatggtggcaaacttttctgcttttttgtaaagaaataacacagggtcctaaaagcccgtatatcctggaagcagagggtctgcgtcggaacagccgactctggaagggcgttggctatgtccctggacgtctcctgcagctcctcccatctcccctgagtctggcccagctggaaaggatgtgggggccacaggttaagtggccaccctggggcctgtgttcccagactgcctggctgtgctgggagttctgtcctgggagagacacagcttcgtctcggctgcggccgtgtccccaaggctctgttccctgtgtgcaaaggtggatatgtcttcctttagtctcctcatggccacaatttaatttttttgaaaagtttttggccaaataacctggctaccaacccggggccccagtgttgggaggagggtgatgtggggaaggacgtgactctgggacagtgcctgcctccaaaaagtgcttcctttcttcctcttcctccaggtaaattcgaaccaccattatttcacccgaatgtgtacccttcggggacagtgtgcctgtccatcttagaggaggacaaggactggaggccagccatcacaatcaaacaggtacggggcctccgcctctggcaccggcagggctgccttagtctcccctccggacacgtgggtctgtggtcattctctgtggctgaggccgagtctcacggtgtctccctttcaaactgctcacacccgtcttgtgtttttgtctctggcacagatcctattaggaatacaggaacttctaaatgaaccaaatatccaagacccagctcaagcagaggcctacacgatttactggttagtagcagccctggccccgctggtggcagctcctccccgtcccagccaaggccgcctggcaggacgggagtggaggacacaggctcaccctacggacagccagggtccacgcctctgtggggaaggtcggggggcataaaccctgtgggcagcaggcaccgttgcacaccgtctgcggtgggcatggatggcgccggagccgtgtcccggggagggagcaggccaggtgacgggctgtcttgggccactgccccagtgagttgtggccagctaggaggggaaggaccctgggcgtgggtgccagaggaggccatgctgagaggcctctccaccggctcagcctcccatggaccccagcctcccgcgccgcccttgctgcttgtccccatcccctctacaacttggttccttctgtgggggggcccagcccagcagggctcagtgacgtgatgctgtcacacggaccctgggcttccaccctgtccctgtgaggtgctgctgtggctagaagggtccccgtgggcctggggtcctgtctgcaccgaggagggcctggtgtgagttaggatgcagacgacagccaaacagtgctggggaaagcagggaggaccctgccctgagcagaggccatgcgcccgcctgtcctgttccctctgcagctgttctgggcaggtccataagaaggtgggttggggcctccgaccccccactgctccgcctgcagcgttgagaaacccagccccatctcaccacgggtccccacacctctgagggggtctcagggcccccaatggccagggacccagaaggctcacctgcagccaccccacacatccctgccactgtgggcatcagaggccctctccctccagggtgcatctcctggtcaggaggggggaggctgaggggtcccggttgccttaggcccggcctgcacaggtcgtgaggaaaagcacctggtttcggccgggcgcagtggctcacgcttgtaatcccagcactttgggaggccgaggtgggtgaatcatgcggtcaggagttcgagaccagcctggccaacatggcgaaaccctcgtccctactaaaaatacaaaaaattagttgggcgtagtggtgggtgcctctaatcccagctacctgggaggctgagacaggagaatcacttgaacccgggaggcggaagttgcagtgagccgagatcctgccactgctctccagcctggcgacggaggaatgctgtctcaaaaaaaaaaaaagcacgtggttttggagagatgtgtttctccctggatgcgggcccagcccaggtgtctgcaaggtgccctccctggtggccgagggtggcacagaggccccaggcagggagcaagtatcacagcagccaccccaggctcagcctggctcccctgcatggtggtgcacacctgtagtcccagctatttgggaggctgaggtgggaggactgcttgagcccaggaggttgatgcgcagtgagttgagattgcagcaccgcaatccagcctgcttgacaaagcgagaccctgtctcaaaaaaaaaaaaaaactcatagccgctcagtcagccaagccattgctggaagtggctcgtgggacgtggcgtgacctgggtttgtgtgctggcctgctgtgccctaggagtccgtgaaatgcattcccttggacaggaagccacagtgctcgtgggtgtccacatggcccttgaggcagaaaatgttttcttttttttttttttttttttttttaaacagagtctcactctgtcgcccaggctggagtgcagtggtgtgatctcagctcactacaacctctgcctcctgggttcaagtgattctcctgcctcagcctcccaagtagctgggattacaggcacccaccaccacacctgactaatttttgtatttttagtaaagacagtgtttcaccacgttggccaggctggtctcgaacttctgacctcaggtgatccacccgcctcgcctcccaaagtgccgggattataggcatgagccaccgtgcctggaaaatgatttctaggccaagtgtggtggcccaacacctgtaatctcaacactttgggaggccaaggtgggctgattgcttgaactcaggagttcatgactagactgggcaacatagcgagaccctatctctacaaaaaattaaaaaatttgccaggggtggtggctcatgcctgtaatcccagcactttgcaaggccactgtgggacgttacctgagcccaggagttggagaccagcctgggccacatggcaagacctgctctctttaaaaaaaaaaaaaaaaaaaaaattaagccggggatgatggtgcatgcctgtagtcccagctatttgggaggctgaggtgggaggactgcttgagcccaggtggttgatgctgcagtgagccaagattgcagcctgggtgacaaagtgagaccctgtctcaaaaaaaaaaaaaaaagcatgccgggcgcggtggctcacgcctgtaatcccagcactttgggaggccaaggtgggcagatcacgaggtcaggagattgagaccatcctggctaacacggtgaaaccccatctctagtaaaaataaaaaaaattagccgggcgtggtggcgcacacctgtaaccccagctactcgggaggctgaggcaggagaatggcttgaacctgggaggcggagcttacagtgagccgagatcacgccactgcactccagcctgggcaacagagccagactctgtctcaaaaaaacaaaacaaaaggcaaatgttttcctgcctagcccttagatggtctgccatccccagcatggtgtgggcgtgagctctgtctggcctgcaccccatttgccgaccatctccagagctgggctgtggctcccatctgcggcgtgggctgggcagggttgcagtcccccgccccgtgtgactctccccagcgtctcctgggcttggtgcctgctgggctgcactgtacacttgcgtgcacgtaaacaaacgttctttctcctacacacatccgcttgaaaagcaccctttgtgaagcatgtgtgcgggtttcagatcgtttttcctgggtttcctggaggccttggaccgtgttcctgccctggcaggtgccttttctcggggcctctgcttggtcaaggaagagctgggacgtgtagccaccgcctctggttccttccacgcccacccagctgagctgctctgccctggggccggctggtggcccaaggagggcgctggggtctgggctgcggtccaggcccttggcgtgggtgggggtggcaccggcgctgctgccgtcctgggctgttccaccatgcagagtgaggctcagtgtctcagaccaggtccaatcctggcgagactggcaggactgcgaccccaggagccacctccataaatgtcatggtgttcccccatcctcagggtcacactgcaccctgtgacccatcagcccctaggtgcagcctcggccgccctcccgcccacctgttttgcccgggcagtgtgtgccatgccactctcctgggcagctgcttgcaggctgagcctcactctacccagctccagacctgttcgctgatgcccctgcactgcccagctcgggcacaacgccttctcaaccaggcctgccttcccacacctttgcccctgcggctgagagcctcatggaaaaaccctccagaaattggtgtctatttttgggaattaacaaaaacagtggcaagcagtcagtgttttcagtttattaggactgtccccagacctacagaaaagagaagctgctgattactagttaggaccagacttggcatcggcaacgatgttgcaggccctggcgtgggccctctgggcctgagccctcctcgcagccctgcgggacccctctgtcccccttgaacaccacgttcacccagcgtgggttcctctcctccctgcccttctgcccccgtcagaccacgggacagtctcagccacgtcagagccagcatgggctccccaccacgcaggcctccctgcttctccgggcttctgcttctgttactatgacgagctccacactgccctcccccaggaggtcccatcctgcagcctggtctgcccagctggctccggggcgagcgtgagggccaggcagctcagccctctaacacgtctcttctcttttgacctcctcagccaaaacagagtggagtacgagaaaagggtccgagcacaagccaagaagtttgcgccctcataagcagcgaccttgtggcatcgtcaaaaggaagggattggtttggcaagaacttgtttacaacatttttgcaaatctaaagttgctccatacaatgactagtcacctgggggggttgggcgggcgccatcttccattgccgccgcgggtgtgcggtctcgattcgctgaattgcccgtttccatacagggtctcttccttcggtcttttgtatttttgattgttatgtaaaactcgcttttattttaatattgatgtcagtatttcaactgctgtaaaattataaacttttatacttgggtaagtcccccaggggcgagttcctcgctctgggatgcaggcatgcttctcaccgtgcagagctgcacttggcctcagctggctgtatggaaatgcaccctccctcctgccgctcctctctagaaccttctagaacctgggctgtgctgcttttgagcctcagaccccaggtcagcatctcggttctgcgccacttcctttgtgtttatatggcgttttgtctgtgttgctgtttagagtaaataaactgtttatataaaggttttggttgcattattatcattgaaagtgagaggaggcggcctcccagtgcccggccctccccacccacctgcagccccaccgcgggccaggaccaggctctccatctgcttcggatgcacgcaggctgtgaggctctgtcttgccctggatctttgtaaacagggctgtgtacaaagtgctgctgaggtttctgtgctccccgcatctgcgggctgtagagcgctgggcagctaagatctgcataggtcgggattggcatcgagaccctggcaactgcaccggtgccagctgtcttgggggccacaaggccaggtccagaccagggctgggggctgcctgaggactcctatccgggcagcctgctggcgggggttcccctcttcagtggccaggtcacagggatggagctgcgctgtgcatagggtgccacctcaggtgtctgtcccttgtgtcctcaggaggcagccttgctaccacccgtggcaaacgccaggtgctttttctgggagagcccacagccgtggccctccagggcttccccgacccttagcgccaggtagagggccctgggcagcctgtgtctggaattcttcgtcctgaggccacctgagtgtggtctgtcctggggaggctgtgcgcctcagcagccgtcctgacgctgagccctctgcaaaggttgggccggccaggcctcttggggctgcctgagccactgcaggaagtggcctggctgggaagttgggtgccggtcacctcccagcaggaaggcacagtggacagagatgggaagccctgggggacacagcccggtgctcccagccctccaacctctggctcccaacccagtctccccatcctagcgagcttggccctcctcagtttcgtttcaagccttggggctggagctggccctgctgccctggcaccccccggtggctggagctgggtccccgtggcccaagtgcagggtcccaagagggcagggcggggctccccaaaggagcaaagaatgcagggagggcggtccagggccctgggaaggggagctcggcaccctccaggtccgtgtgggactccagccgctgttggctgggaatcgaagttagaggtgacttccaaaggccccccgagccggcagtgccccccaccacccctccagcgactctgcggtgccagtgccttgttggcttttccggctacgcaccctgcagtcactgagctctcggtctgacgtctgatgtttgtggtttgtttataacacggggccttacctggggaattcagctggtttgaatatttgtagcccgctcccagaatgtcttattttgtaatgactgaactacatttagtaatagttacacatgtatatggttaatacatatggaaattcaatatattttgtagttaacgtattctgaagtaacggatgtttctcgccaatcgtagtgacttcagctaacgaaatgttcttttgtagtaccacggtcctcggcctaacgaaggacgtgaaccttgtaagaggagagctctgaaacgcggtcacctttgtttagtggaagggaaagtgtgttcccggcatgaggtgcctcggaattagtaaagaattgtgggcaatggattaaccactgtatctaagaatccaccattaaagcatttgcacaga

SEQ ID NO: 425 - DNA, 10758 bp, Homo sapiens
  source 1..10758: mol_type = genomic DNA; note = NC_000001.11:c248860761-248850004 ZNF692 [organism=Homo sapiens] [GeneID=55657] [chromosome=1]
tgagccaccgtgtgcagccgattactttatatggcaaatactttacagaagaaattgtcttaggatactgagatggagagattatttggattataaggatggactctaaatgcattcacaagcatccttgtaagagagaagcagagggagatttgacacagaaggaggcaatgtgacctcagagacagagattggagtgacgtggccacaagtcagagaatgctggccaccattagaagctagaagaagcaaggaaaggattctcccctagagcccttacaatggcctgtggccctgctgatgccttggcctccagaactgtgagaaaataaatttgagtaaagggagcaagtttgtggctgaaaacaacacacaacacaatttgttacaacaattacagaaaattaataccagtggcttggagtagggttttagcagttgagagggtcagaagtgattggatttaagataaatttttggagacaggaccaacaagatttgctgatgtatatggtttaggtatcataaaaggcaaagaatcaaggctgattcccttttttctgaacaagtgggtggatgatgacatagtttactggcatgggggagggtacaggcgttattgttatatgtttgccatatttatgttggagaaaatatcagctatcatgtgtcagcgctctctacatgccaggcactgtcctacattctttacacgtgttagctcagttaacacatgtaagtcaagcgggcagtaagatatatgactggagttgaaagagggctaggctaggagccatcagtgtatttaaagccatggaactaattagatcacccaggagaacatatgcagacgagagaagatctggttcaaggcctgagccagggcacacttcatcttttggcagaacagagggaatggatccaaaaaaaggatagaaggagccagtgaggagggtggaaaacctggagcatatgaagtcacagaagtaaaactggggcccaaaatgtagagggagccataaagatgaggaggacgagagctacatagtcgcgctctttctagggcagagaggcggacggaactgacagctgctatgtagcaatatgaccgtctcaagtgaccttgtgaagcgccactgcagtggctgggtggggaggaaagctccatcagagccatttgaagagaagaggatgggaagtgagcgtacacagagaatgcaggcaacttttaggaggaattctgatggtaatagaagtgggctgtagctggtgggactctgcggtccacagagggctctagctggaccctctgtgggtctttcaaagtgactgattctgcatcatgtttgcgggtggcaactgtgagggggaaatcgaaggtgaatacaaaacgggaacaagtgaagaggcaacgtccccatacaggccgggtgggctggggttggagcacaggaggcctgaccctgtctcttccactttccctcaaacctttggtcaccaagcgcagacgctcaccacagaagccacccaaccacaactgccgcggggctccgcgacacgcgcgggcgacttgagtcgggcaaccacgattcccggcgggcgttgcgcggggcacccagtgcgcaggcgcacggcgtcggcctccgactcgcccctccctctggggcgcgggcctcagttccgggctacagcagccgacgccgagaggcaccgtttcttcttaaaagagaaacgctgcgcgcgcgaggtgggcccctgtcttccagcagctccgggcctgctcgctaggcccgggaggcgcaggcgcaggcgcagtgggggtgagggcgcgtgggggcgcacaggtaaggccggggtgggggtgggtcgcgacgggggctctgggcagcctgggaactgccattgggattagtccgctccactcactgtcagcattaagtgggggtgcccaagacggggtggatggggggcgccctccagacctctgaccacggcctcaccgccactcgacccaactatgaagagcgcccccagctgcacgccaggacacgacctttccttcccctagaaaccagtaaaggccgctgccctattcaagatgaaatgtgtggaccgcccccagcccagttgaaatttcccgtgaaagtctctcgccccttccccacagctccacttcagtggactggagggcgcaggcctttgttctgactgcttctgtctgcctgcctcccacccgacgacactcacatggtagcgctgagcttcaacaccctgtatcatagaaggacggggtttggctccacacctgccactgctattgaaatagtttagtcttgccccagttcactgatgaggaaactgaggccctaacggcaggtggagccgggtccccgacccccgagatcggcagggcgctgaagacgtcccttccaccctccagcctctggtgcacatggcttcctccccggcggtggacgtgtcctgcaggcggcgggagaagcggcggcagctggacgcgcgccgcagcaagtgccgcatccgcctgggcggccacatggagcagtggtgcctcctcaaggagcggctgggcttctccctgcactcgcagctcgccaagttcctgttggaccggttaggggccgggagaagggcttgggggagggtacccaggcagcagcccctagcctcctctccagggcctgtcctgctgctcttttccaccctcaggtttctcactttaccaggacggcctgtgtgacttgtggcctccgagggtcctgctcccctcctcatggtctcagcgaatagcggcccttagggctggccccttacatgtgtgagtgcccagggctgagggtggctggccacctgagtcctgacctgcctcttctcctgctggcaggtacacttcttcaggctgtgtcctctgtgcaggtaggtaggggatggcagggggtgagagccagagggaagagggaccacagggtgacccagaaacaccctcctttcaaagggagccctgagtaagtttgggaagggtggggtgagttggggagcacagggtagtttgatggaggcaacctctgggtggggaagggagcaatgtctcaggatctagtgtgtctaggttctgaagaatgataaattggactggggctgaggttgccctggggtttgagggaacagggctccctgggtatggctctccagggtaagaggaggagacttcccagttcagcctgactgcttcccccacccctccaggtcctgagcctttgcctccaaaaggtctgcagtatctggtgctcttgtctcatgcccacagccgagagtgcagcctggtgcccgggcttcgggggcctggcggccaagatggggggcttgtgtgggagtgctcagcaggccataccttctcctggggaccctctttgagccctacaccttcagaggcacccaagccagcctcccttccacatactactcggagaagttggtgttccgaggccacgagtgggcaggagcttgcaggtaggctggaaaaaagcagagttatggagaaaagggaggaaaaacgtttcccattttctgtagctcagaaccctgttctctaaaaatgatcctttttcaatggaaaaactctatcttgacaaatatatcatcaaatacactgttgggcatgaaaagcaaaacaaaatacagtgtatggtatgctatcattggtgaaaaatacaaataaggggaaagtgaatgtgtgtgtgtgtatgtgtaagtacttgcgaatgtatgacatatctctggaaggcacatagaaaaccaggttgcctatgggaagaagtaggcgatgggggacagtattggaaaggagatttttgactgtatagttttgtgaactatgtgaatatcatctctgaaacagaacaactcctcctactcagatagcctctgctccctcctcctccttcttaaaagtctctgcctgggtgcagtggttcacacctataatcctagcactctgggaggctgaggcaagaggattgcttgagcccaggggtttgagaccagcctgggcaacatagtgagaccccgtctctatttaaaaaaaaaagaggagtctcccatcacttcagaccttagaactttatgtgtcctcatcccttgagtccagagttccttctcttttgactttgcctgtcccacagatttggaatctgagcatgatgagaggactcaagaggccaggttgcccaggtgaggatgtggataggagagaaaaggcggaattgcataggtgggaggatgagggagcaggacctcaggcttgccttctttgggcctgcaggagggtgggacccccaccagagaccttcccacctccaggagaggaagagggtgaggaagaagaggacaatgatgaggatgaagaggagatgctcagtgatgccagcttatggacctacagctcctccccagatgagcaagttggggttgagggagaatgagcagagcaagagagggaggcagctggcctggcagttcatggctttgcagactagagggaagggcttgttagtgtggagggaagggtgggttttggggaaggcaaaaagaactagaggctttgaactgagggggtgaaaaggggtgaagtcaggtgcagggagattgagggctgaaagcagatatgaatggggagcctagggtgggggtagggttgtttcaagtttgagatcttttcagtttaggggctagggtcgggcaggggatggctgactgcccagaaagttaatgccatcttcctctttgttctcctttcagtagtgagcctgatgcccccagactactgccttcccctgtcacctgcacacctaaagagggggagacaccaccagcccctgcagcactctccagtcctcttgctgtgccggccttgtcagcatcctcattgagttccagagctcctccacctgcagaagtcagggtgcagccacagctcagcaggacccctcaagcggcccagcagactgaggccctggccaggtaacctgatggctgagacagaaagggcaggggcgtcctgggatgtggccctccctcgaggccctctgctccctctttgctgcccgtagcactgggagtcaggcccagtctgctccaaccccggcctgggatgaggacactgcacaaattggccccaagagaattaggtaggacttagggagatggggttctggggagggccgagaggagggaggcagagaagggcaggcaggagtcatgctgctcctttccattcttctcctcaggaaagctgccaaaagagagctgatgccttgtgacttccctggctgtggaaggatcttctccaaccggcagtatttgaatgtgaggggcacaggttggggcctgtgtggctgctggggtgggggaaagggctaaaagaaaaactgaggaaaaggatcttaaggcatgggaggattcagaaccaggaagcagagggtacctgacatgtataaagtcttttggtcctcacaatatccccatagattaggtgctgctattattcccactttgcagacagaaaggttaggcattgctcaaggctcttcagctagtgtgtgttagtgctagggttctgagcctggtggcctggcttcagagtccatgcctgggctgccacatatcctggcttgagagggtagttctagagtgaaacgggctgggagatggtcctgtccccaatctcattgcctgagaaatttgaggcacagaaggcaaggggtccaatccctacagtcaaccagagcacttggcacagcaggtaccaaggctggggagggccacagacactgggatggtgaggtgagggtagacagacaggggagaatgccgcccacagaagatgacagagaggaatcaagtgaaaagggaaaatgacccgggatgacagggaagctctaggctgagaagagcattcggcagggcatgtcagacattctggagtctgctgtggagaagatcaaagcagcccctggaagtttaactgtggaaaaatgggattctaaagaaggggacagcccatgcaatttagtgagccaggatgccaacttaggtcagtgaaaagagaaatactttgatatttaggagttaaggttgaagagcctgttacccttaatagtgttctaggttgagagtgtgtgtgtgtgtgtttccaaagcagatttagaagaaaatcatatatatacccatggtgaactattaaaaagcaagcagttggggagatactgttgtacgtgaatactgacatcaagtaggatgatcatacttacccaaactgctttcccctctgcagcagatagtgcattcatgattaggtgaaccaggggtgtcacccagagtgatactttgtacagggaacattgcaggacattgcagggtgagagtgtgacaaggaggtgagataatggaagtaaagcacagaattgggtgacaggagagttgagtggtcaggatgggatgggtgtggtactcatggtgtaggtgaggactgagcctcaaggaaacgagcaggccatgacagggagaactgctggggcacaggggccaggaaggggacagaggagcatgcctgccgggtcagctcagttcatctctccgtggaaggtggctatccttttgcctcttctctccctaccacccacttccttctctagcaccacaaaaagtaccagcacatccaccagaagtctttctcctgcccagagccagcctgtgggaagtctttcaactttaagaaacacctgaaggagcacatgaagctgcacagtggtgagtggtggaactccaccttcctctgtgggaccttttaccttcctttgtgggtcccgtcaccctgggctctgtgggtttcttcacctccccctctacggggtcctgtcacctcccgctctgtgggtttcttcacctccctccgagggatgactctccctcatcctgtatgccctgtgtgttgagcacctgcttgttttaaactgttttgggtactgggtacagcaatgaacagagcaggcagcgctaaccctcttgagacatccactttagtgatacagggctatgaagaaatgtggaagcaagggaaaggaggagagcataaggaggagttgctattgtagaaagagaagatgctttgagcaaagacttaagtgaggaatggaaacctgtaccttacagactatggacagcgcgtgtggaagggcccttaggtggtatctgggtgacatgttccaggaatagggaagaggccaggagctgagaaaggaagagaagtcacatagttgatggaggcctctgagaccatccacaggacagtttgacatctgctttaagtgagatgggtgccatcgcagagtcttgaatggcagagggacatggctttttaaaagatcattgtggctgctgtgtgaacagggggacctcagatgagcagaaccaggcactcaactgtgagatgactgcagagatgtgcaagagggcaaggtggtgcctggatttgctggtagcagctgagtcagtgaggaatggatggaggccagtgtgtgtgcagatggagccaaacgagctgccgtgggaaggatgggttggctgcagtcgagtgggaagggaggagttgggtaacttggaggattccagcctcagcaactgggcagaaggtgatgtgatttttctgaaaacaagggagaaatgggcttgggaagggaaatttgatttgagacatgctaattaaacatccaggagatgtgaatgtggagatcaggggagatgtcaggcaaaaatataaatataaatgtgtgggtcatgagcatatgggtggtgtttagagccatgaggccagagtgtccctacatagaggaagtgagtgtcatggcactctagccatcagagggcaggtcaggtgagtagtgaggaagatgaagagagtggtatttgaggaactgagtatagaaaatgctccagggaggaaggggggatgattgctagtgcgacaggccaaatgtgagctgagaataggagaccagatgtggcagtggtgaagccaccagatgacaagatggaactgacaagaggggcagtggagctgtggggatagccggaacggagtgcattcaaggcagagtggagacagcaagtatggacaactctgttttgctgtgaagataggcagagaaatggagtcccagctggaaggctgtgggctcagggcatggagatgggaatgattccatagagaaaggcttgctgctgatgctagagtggggtgggggacctcaagtgagaaggggttggtcttgaggggcacagtggagggctgccgggggaacagtttgagcagttgtttatatagacacagatgcaagttgaatagtggatttggtgggcagaagatgtgggtgttgtagtttcttggcgactttagaaacaagagcactgctgaataaggctagtaggctgggggtgttggaggctggtggagaaaggaggtggtgtgaaatgtcttctgtatttctagaaagttggaaaagtgaactgatgagggaaatgcagacacagtagggcaagaaggcggccttaagacttgtggttttagatgaaaagagtggccaagaggcagattttgcccttacagtacacatgtgcaggcccggaacagaccaaaagttgtgtctatcctgagttgggctttaaccaagcaagtacagttgacggagagagggacaggaagattggtagtgtgaatgaaagaaggcaacaaagatggctgtggaaatgtagctgagcggggaaggggctcagagggaagatggtggggccagtggactggcctggaatcatgggattatcatagcaagaggacaagattggaggccctggcatgaaccaggatgtttgaaatcacaatttcttttttttctcctcctaacccactgtatcttagaagaaatagcaatttctgaagtggtgcagtgcatgggtgtgacctgagactggtggctgaggagggtgggcgatgaggtcagtgaggtgagggaacagagggctggagtgctgattgacagcaggagtagtggctgacaggagtagaggggctgaacctagagttgtgtggatggagggggagtgatggggccaaaggaggaggctgcaggtgtgtgtttgtgtggtctgatggtgcggtcttcagagaggtggggatgttagaggtggtctaaagggcaccatgagaagcaaagacaccttttttactgtacaccctgaggtttggtgggttagagaaaccacagcagcctgtgagagctgctgccacacagtgaccatgggcaacaggcaggtgctattggaacaagcagggagtgcaggctcagggaaaaagaggagaggggactggctgcctgcagacaggtagctccacagggcaccgatagggtttgggacaggtgggatatgcaagcctaaataggtggtagatgattccaggtgccagggtctgtccttgggccttgagcttcaatcctaattcccatcgctgactccaaggttctgcttggctgctgcccactgccttcaattcatacataaggacccagctctccattccatgtgtctcctttgagaaagaaccagcctagaggctgaggtggggtggtgcacttccatcaggagttcattggtttgagtgggattggcgggcaggggctggggtggacaataatgaagtcttttagctgggttcgtatcttacttggttgtcatgacccatcaggtaagggaggtccagacgggctccatgatttggataacaactaattagaacctgagcctcctgacctccaatacggtgcactctggtgagggacagtgggtggggtgggccaaggaggggccacagggtgggggcagatgctggagtgtccctcatatgcctgcagacacccgggactacatctgtgagttctgcgcccggtctttccgcactagcagcaaccttgtcatccacagacgtatccacactggagaaaaacccctgcagtgagtgctggggtggggtctgagggccaggggctagaagggaggaggtggagtctggaagctaggcatataggacacctaggcagtggggagcaggaggaaccccctagggaagtcatgatggcctgaggccttgttccttccctcttctgtccctgactccaggtgtgagatatgcgggtttacctgccgccagaaggcttccctgaactggcaccagcgcaagcatgcagagacggtggctgccttgcgcttcccctgtgaattctgcggcaagcgctttgagaagccagacagtgttgcagcccaccgtagcaaaagtcacccagccctgcttctagcccctcaagagtcacccagtggtcccctagagccctgtcccagcatctctgcccctgggcctctgggatccagcgaggggtccaggccctctgcatctcctcaggctccaaccctgcttcctcagcaatgagctctcctccagctttggctttgggaagccagactccagggactgaaaaggagcaacaaggagagggtctgcttgagaaatgccagatgcttggtccccaggaactaaggcgacagagtgcagggtgggggcaagactgggctgtaggggagctggactactttagtcttcctaaaggacaaaataaacagtattttatgcaggca

SEQ ID NO: 426 - DNA, 11440 bp, Homo sapiens
  source 1..11440: mol_type = genomic DNA; note = NC_000001.11:c169734079-169722640 SELE [organism=Homo sapiens] [GeneID=6401] [chromosome=1]
agctgttcttggctgacttcacatcaaaactcctatactgacctgagacagaggcagcagtgatacccacctgagagatcctgtgtttgaacaactgcttcccaaaacggtaagtgcagaacgctttataagggcagcctcgggccatgaaacacagatatgcaaaaggccttctaataaaaaccacatctgtacaagctcttattgtattgtagctaaaacctgtcttttctctttgacctaaataatgaaagtcttaaaatttgtttatttatttgattaaactctgaaataaagattattgcactagtgtcctttgcccaaaatcttaggatgctgccttaaacatcatggtagaataatgtaactagctacccacgatttccttctttaattcattttgtgttttatctccccaggaaagtatttcaagcctaaacctttgggtgaaaagaactcttgaagtcatgattgcttcacagtttctctcagctctcactttgggtaagtcagtgccattagaccaagatttctcattctcgcactatagatatttcagactgaaatatccttgcttgtctggggctgtcctgcacaggatatctggcagcatccttgacctctacctgcaatgtgttcttccctgggcttggggtcatttactttacctcttggtgtctccctttccttaagtgtaaagtgtggatcataatgacctatttcccagatgcattgtgaggattcaatagcatggttcatggaaagtacctcatacagtgcttcttggtgcatactaagtgctcaataaagcttagttattctgattattattctactacaaaatgggtatactataatgttgtgagtgagtgtggataaggtacctagtgggtggcagtcacaaaagagataaacaataagtcgctgtttcttcatacgtacttcttacttttgaaaagatgagaaaagtctgggccatgtcacaaacattgccaaaaataagacaataaaaagcacagttgtcagagttaaaccacaacagtaccaaactctaccatttcttttctttttctcccactagtgcttctcattaaagagagtggagcctggtcttacaacacctccacggaagctatgacttatgatgaggccagtgcttattgtcagcaaaggtacacacacctggttgcaattcaaaacaaagaagagattgagtacctaaactccatattgagctattcaccaagttattactggattggaatcagaaaagtcaacaatgtgtgggtctgggtaggaacccagaaacctctgacagaagaagccaagaactgggctccaggtgaacccaacaataggcaaaaagatgaggactgcgtggagatctacatcaagagagaaaaagatgtgggcatgtggaatgatgagaggtgcagcaagaagaagcttgccctatgctacacaggtagggagtttgcggcagcagtgggaggtagtttcagtgtgtgggcatcttggcaaatttacagcatgcaaaaactgctctctattgtggtcattttatgttccaaaagattctgtttaactgctaaagtttctctcttttgctgttttgtgtgaatgtgggcaagaatatgtggatatgtatatatatacacacacacacatatatacacacacacatatatgtgtgtgtgtatatatatatagcctacagcatttatatacattttatatatatacatacacacatatacacacatatatgtgtgtatgtatatatataaaatatatataaatactgtaggcaaatatgtagttctttacatataaaaatgcacacacacaatacatattttaattacttgtttatttgtggtaggggaactgtcttcagagtttgtgaagaagtaaattttctacggtaggtgccagccacagctatacattagcatcaaggtttaggataggtgggcctgaaactcagatttggaactttgtaaaacacttcagttaaagtctatggcactctgtaggactgctgatgtctctgttgcacactgttgattctaaaatcaaaggcactcagtataagcacagtaatagtcctcctcatcatgctttgtattttccgtagctgcctgtaccaatacatcctgcagtggccacggtgaatgtgtagagaccatcaataattacacttgcaagtgtgaccctggcttcagtggactcaagtgtgagcaaagtaagtctggttcttgcctctttcttcacttgagatggtagcaccatctcacgtcctagctggcattagagtcaggtctgcatgccttcccttccctggtgcagatggtgtcatatggtgatcgtgagctgagactatgaagtcagaccctgctgggtttgagtcctagattcaccagttatttattttggcaccttgacaagatagtttaactctctatgtcagttttctcattgtaaaatgaggataataatagtgtgaacttcataggctcatggttacatggtgcctggcacacaggacacattcaataaactgtaattctgtgtccctgcgaggaacatgtactcacctcatctaggtggtaacaagacgttgcagtagaaatgagtgagttacagagtccagggtatcttggttcatgctctggcctctggctctgtaatgactagccgtgtagcatggagcaagtcacttgaatgaaatgaggtctcagttcctaaatttgtacattaagagagttagatgagcttctctccaagattccttagcacagcgttgtgcagtagagcttttgtgataatggaaatgttccatagctgtgttttccagtgtgtacctatgagccacatgtggttattgagtacttgaaatgtggctggtgacactgaggaactgaattttaaatgttatttgatttcaacgaattcaagtttaaatttgagtagccacacagatagtggctactatagtagacagtgcagcattagggttttaaaatttgtaatgtattctagtacttaaatttgaaatatagctttgtgaatggttctcatcctggttggaagcttactgtagtatttttagcagttgtgagaaaagtaacaagaaatttgttgtggtacctaagtttgctgtgtttgttcatataatttgaacagttttgaggtaaacacaattacactactctccccatatcactcaatatttcttttttatggttgtcatcactgcttttttgttgttgttgttatggatcagcattttcttgaataaaagaaaaggggtagaattacagtcaattttacaaattccattagaaattttataaatttttaaactaaaaaaaaaaaaaaccaaactgtagttctagtttccagtgttcttatctgttaaaggtgagagatgagcagaactgatttgggtttctttttcagttgtgaactgtacagccctggaatcccctgagcatggaagcctggtttgcagtcacccactgggaaacttcagctacaattcttcctgctctatcagctgtgataggggttacctgccaagcagcatggagaccatgcagtgtatgtcctctggagaatggagtgctcctattccagcctgcaatggtaaatccctctgagaatgcacagaacgttctgtaactcatccctcattgcttctgttttttgattcaacttacattttcaaaacttcagggaaagttttttttttgtttttgtttttaatacaatttgttctctcagccaatgtatattgccaacccagtacctgcttgggttgagagaggtttttttattctatgcttgaaatgggtgtttctgaggctctggtgatttgtaagggagaccataaaacaataaagctctagaaatctcaatggatttctcatcttgtttccctgtttaacttttccaagccatgggactaacttaagaccatgatagtcaagcagtcttagtatctctttttctctcttaattttatctttctgaaccagaggccaaaaaaagaaaaatcagttcttcaggctctgatgggctaaaataaatgaatagcctacgtatgtcagtactagtcataactcctaatctggaatctattttttttaaatttttacctcacgtaaatgataacatagattagagaccactcagcataggcaaagtggaaatcagaaaagatagaatatccatgaaaaagaataaaagcttttattctggctgtgcatgtccctaagaattgacataggactttgggatctaccctttgaaggcagcttcctcactctgttaggcacccagctcaataggaagtgaaaagatcattcttctgtaaaattcatggtgctctttaaaatcctcagtggttgagtgtgatgctgtgacaaatccagccaatgggttcgtggaatgtttccaaaaccctggaagcttcccatggaacacaacctgtacatttgactgtgaagaaggatttgaactaatgggagcccagagccttcagtgtacctcatctgggaattgggacaacgagaagccaacgtgtaaaggtagagttgttccacatggagacttactgtgaacattctttctctcaacccatactggaaatgggcaagctaattctaggccgtgctaatatcaatgcgtatatttgttacagctgtgacatgcagggccgtccgccagcctcagaatggctctgtgaggtgcagccattcccctgctggagagttcaccttcaaatcatcctgcaacttcacctgtgaggaaggcttcatgttgcagggaccagcccaggttgaatgcaccactcaagggcagtggacacagcaaatcccagtttgtgaaggtaagcttgagatccttcgatttatactttcttaaagaacaaccatcttcaaacttggacagtgaaaaaaaaaaccaatacccactttaactatagaaatcagatttgatgagcaaccctcgtatctttgagattcatttaaaagaactaatgtttggccagggaaaggatcatatgtgttaagaatgaattctttgctgtttttttttaactgtgatgtgctgataaaactttgtagacattagcatggaatagacagaattcttaatctaaaggaatcatattagaaaattcggaaagcagaataatgagaacatgatttgaatgtaaaactctcatcacacctgtcttctgaaatggctcataattagcagtgatgagactgtttcaagcatggtgtcagctacagagatagtattgatgcatatataagcagtaaattttaattcactttaaagtgagagcaaggatattgaaaacaagcagtttttactatcaggcactggccttgtcctagccaaagccagcacagaatgatttccagtagcaaaacataacacaaaaaccaaactgcaaaacagacaaattttataggggtgctttcttttctttctttttggcaccatctataaacatccatgacccatatgttgtcctcagactgcgtgaaatctttccttggaccataatttattttgtgtgttagaagaacagtgctcaggaactaatgttctgattaattagtcttttaattagtgccatgatcagtgagggggctgaaattcaaagaaaacacagccatcttcccatttgtccagggaattataaagaatcttcagttctccaagtgttgcttgaatgaactgggttcactcaacaaacgccaagtactctctagttccactgcaatattttctgaccatcattttgatgtctcagctttccagtgcacagccttgtccaaccccgagcgaggctacatgaattgtcttcctagtgcttctggcagtttccgttatgggtccagctgtgagttctcctgtgagcagggttttgtgttgaagggatccaaaaggctccaatgtggccccacaggggagtgggacaacgagaagcccacatgtgaaggtacagtctttgtttttattttattttaagataaaaagaactattgaagagcttgggaacttggttaccttgggaaacgtattgctggagatgcaaacaaacttctaaagtgctctctcgtgtgttccagctgtgagatgcgatgctgtccaccagcccccgaagggtttggtgaggtgtgctcattcccctattggagaattcacctacaagtcctcttgtgccttcagctgtgaggagggatttgaattacatggatcaactcaacttgagtgcacatctcagggacaatggacagaagaggttccttcctgccaaggtagaattgagtgcagacttttttagggtacaggtcaaatacttcataaagtttctgaacctagattgccccaaaggggtttggtcctaatttcctacatgctgaaaactaagtagcgcttacactttacattcattgttgacttttaagcaagttttggaagttttccagtagatttttctgaaactctgcctgtgtacctaacatttgcagtggtaaaatgttcaagcctggcagttccgggaaagatcaacatgagctgcagtggggagcccgtgtttggcactgtgtgcaagttcgcctgtcctgaaggatggacgctcaatggctctgcagctcggacatgtggagccacaggacactggtctggcctgctacctacctgtgaaggtgatgcattgattgatggtggttgtctggtgattaaaaagaaaaagggggagctatcttgttacagtaatcaactattcattatatccaaaccagaaagttcgcccaggttgacaagttgtgaatattaagttgtatggggatagagaaaaaacagaagttgcatgttgatggaaagggtagaattctgacaactggaaaaaggagacagagagaggagaggagaaaggggaaatggaaaacaagagggagtgagagcaagagagcaagcaagtgcagtgtttattaaccaaggtgtggtgtggtattgtgaacgagcttggcaagttagagttctgcctgccaatggtggaaatagcttcaaaggtggcttggagcagatctcaaaggcctgtaatgccacatctctgcttcttgtattaaactagatagctcttctgctcctagtaatgaatgtacagaaaaaaggccaaagggacaggacggagagactttaacatcaattcttcctcatgacctttcttcgtctcttacttccttagctcccactgagtccaacattcccttggtagctggactttctgctgctggactctccctcctgacattagcaccatttctcctctggcttcggaaatgcttacggaaaggtgaggaagtttatgaatgtacttcaaaaatgtttttgaaaatacatttctttctcattgataagtcatggtcttgcttactgatttaaacaataattagaatctggataaaatgcagtataattaagcagaagtattaagaaaagagttagtagtacaactcagtgtgggaagtgtttcaggaaataaaaatgttagtcgtgcctaatattgtacaactccagggggtgctattcatgttgaattatatgatgcctcccggaattgtgcaatggaactgccatgatgagcactctaaggaaaatggataaaattcttcctaaggagatttatttggagtacaggcttaaatttgagagtctctcataaggaatatggaagcacatctgactacactcatggtttgtttggcttacatgtttaagagtacttaaaacatttttgagttaagttctgacgtttacaaaataggaaatctcacatttaaattaagactttggacttctcatgaaaaattgggagctgaattgggcaagatgaccccgtagctatttgctggcattaggaagctgctatgccctttggatggctgtgcactttgcattttaccctagatgccacagagccatgcttgtgctctgattattacagaggccctgaagcatcgagtttgcaacacttgatgaattaagtcatattgtatctggatttaatatatccttaaaagtcatttagtctgaattaatggttgtttgtcttttcttttgcagcaaagaaatttgttcctgccaggtaagttgcattcttatacaaagcatgccattgaacattccacatatttttctctcttcatgttggaagacagtgctttacctagtgttctcatgtattccacagcagctgccaaagccttgaatcagatggaagctaccaaaagccttcttacatcctttaagttcaaaagaatcaggtaagacttgtaaatcacaaatggttatgagagaggtatcttctctacatgctctgtttctccttgaaccctccaaacttgccaatatcttagggagggagcaggggagaaatcatcacctgggtattgttctggaaagttgctttattttttgtagaaggagaggaaagaaacggatctagctttattgtgtaatttcatttatgatagataataataatgaagatagctgacccttacattgcacttattatattctgggaatttttctaagctaggaactctgagataggggctggtactatatttcttatcttttctttttactttttttttttttaattttgagatggagtctcattctgttgcctagactggagtgcagtggcatgatcttggctcactgcaacctccacctcctgcgttcaagcaattctcctgcctcagcctcctgagtagctgggattacaggtgcctgccaccacacccagctaatttttgtatttttagtagagattttgtattttttcgtcatgttggccaggctgatcttgaactcctgatccacccgccttggcctctcaaagtgctgggattacaggcgtgagccactgggcctggcctgttactttatttcttatcacacagatgaagaaaatgagacagagaagttaagtaaattgtctgaaatctcaaagctagtaagtggtgtagccaggattcaaactctggcagtctggttctaaaatttgtgttcttaactactccgacctgctttgagagaatttggaaaggtcaagtccctctgaatactttttaaaaaattaaaataactttttttgtgtgtgcggttttaagtttacagaaaaattgagcagaaagcacaaagagttccaacatatctccccaccaccccttcaattccccctgttattaacatcttatattagtgttacaactgatgggccaatattgatacattattattcattaatgtccacaggctacattagaattcactctgtgctgtgttgtatattctgtaggttttgacagaggtataatatgtagacatcatcactgtcctaactgaatagaattcgatgttcctacatggtctatcctagtgagagtgtctgtgttagaaggtacattttgttgtcatgatcagtatgcagaatattaagtgttctgatgacatgcatgtttatatttacagaaacaggtgcatctggggaactagagggatacactgaagttaacagagacagataactctcctcgggtctctggcccttcttgcctactatgccagatgcctttatggctgaaaccgcaacacccatcaccacttcaatagatcaaagtccagcaggcaaggacggccttcaactgaaaagactcagtgttccctttcctactctcaggatcaagaaagtgttggctaatgaagggaaaggatattttcttccaagcaaaggtgaagagaccaagactctgaaatctcagaattccttttctaactctcccttgctcgctgtaaaatcttggcacagaaacacaatattttgtggctttctttcttttgcccttcacagtgtttcgacagctgattacacagttgctgtcataagaatgaataataattatccagagtttagaggaaaaaaatgactaaaaatattataacttaaaaaaatgacagatgttgaatgcccacaggcaaatgcatggagggttgttaatggtgcaaatcctactgaatgctctgtgcgagggttactatgcacaatttaatcactttcatccctatgggattcagtgcttcttaaagagttcttaaggattgtgatatttttacttgcattgaatatattataatcttccatacttcttcattcaatacaagtgtggtagggacttaaaaaacttgtaaatgctgtcaactatgatatggtaaaagttacttattctagattaccccctcattgtttattaacaaattatgttacatctgttttaaatttatttcaaaaagggaaactattgtcccctagcaaggcatgatgttaaccagaataaagttctgagtgtttttactacagttgttttttgaaaacatggtagaattggagagtaaaaactgaatggaaggtttgtatattgtcagatattttttcagaaatatgtggtttccacgatgaaaaacttccatgaggccaaacgttttgaactaataaaagcataaatgcaaacacacaaaggtataattttatgaatgtctttgttggaaaagaatacagaaagatggatgtgctttgcattcctacaaagatgtttgtcagatatgatatgtaaacataattcttgtatattatggaagattttaaattcacaatagaaactcaccatgtaaaagagtcatctggtagatttttaacgaatgaagatgtctaatagttattccctatttgttttcttctgtatgttagggtgctctggaagagaggaatgcctgtgtgagcaagcatttatgtttatttataagcagatttaacaattccaaaggaatctccagttttcagttgatcactggcaatgaaaaattctcagtcagtaattgccaaagctgctctagccttgaggagtgtgagaatcaaaactctcctacacttccattaacttagcatgtgttgaaaaaaaagtttcagagaagttctggctgaacactggcaacaacaaagccaacagtcaaaacagagatgtgataaggatcagaacagcagaggttcttttaaaggggcagaaaaactctgggaaataagagagaacaactactgtgatcaggctatgtatggaatacagtgttattttctttgaaattgtttaagtgttgtaaatatttatgtaaactgcattagaaattagctgtgtgaaataccagtgtggtttgtgtttgagttttattgagaattttaaattataacttaaaatattttataatttttaaagtatatatttatttaagcttatgtcagacctatttgacataacactataaaggttgacaataaatgtgcttatgttta

SEQ ID NO: 427 - DNA, 7687 bp, Homo sapiens
  source 1..7687: mol_type = genomic DNA; note = NC_000016.10:c2980494-2972808 PKMYT1 [organism=Homo sapiens] [GeneID=9088] [chromosome=16]
ggaggagcctcgaggccggtttggaatttttggcgcgagcagctccgcgcgcgttcacgggccgttccccctcacgggagtcctccgcccgggcgtccggaacagtcgacggcagactccggcccgctgagccacccgaggggtcccgtggcctccgcggacccggaatctgggccctcgcggacccgcgccccgcccagtcgccccaggtgagcccagaccccgccgtgaggggcctcggcgtggccacctcgccgctcccctccgcctcgccaggtctgcgttacccctgcccctcaggcctccccggcggcccgctcgcgtcccctcaggcccgcccccgcgagcccctgcctcccgtcctccccaattcctggttcccttgcctcgagccccttcccagcggcggtcccgccctactcgcccctcccggagaccccgcctgctgtccatcaaccccgcgccgccgccctccccgtgacagtccttcctccgtgacagcccctgccccgggacagcctctcttcttctgcaacagcccctcttccctcgtgacagcccgtccactgctctgttcgccagggcttccccacacccacggagtgaagtcagccgcggccctgcctgggaggaacttaccgtctaccgggaaaggtggccagcagatgtgtcgggcctggtgagagggtgaggcgagacggcccgatcgcccagggccccggaagctgcggaggtcacccccgcctggccttagctcagggacaccctggattcacgtgggagcccctgctcctgcctcccccgtcccaccactgaggctgttgggccaggccagtcatgctagaacgtaagtcgtagggcagggacggtgggagaactgggttaagatgcacaggcccaggtccccgagtgtgccagggttgggcctggaggctgtgcttgtgaccagtgacctccaggatcccaacaccctggctcctgacttggagaaaccctgggctgggactctgaggtagttagagtcagaggaagagtctccacaagatggagggcagcctgccagccaggcccaggtagcatcgctcccctcacccctgtactccctcaggtactggagactgctctttttaattttttatttactattatgtatatttttttgagatggagttttgctcttgtcgcccagttggagtgcaatgccgcaatctcggctcaccgcaacttccacctcctgggttcaagcatttctcctgcctcagcctctgagtagctgggactacaggcatgcaccagcacgcccggcaaaaatttgtatctttagtagagatggggtttcaccatgtaggccaggctggtctcgaagtcttgacctcaagtgatccacccaccttgcctcccgaagtgctgggattacaggcgtgagccaccacacccagccgctctattgttttttataatactttggtgcaccagcctcaccaacatggtgaaaccacatctctactaaaaatataaaaattattctagtgtgttggcacacgcctgtaatcccagctactcaggaggctgaggcaagagaattacttgaacctgggagtcggaggctgcagtgggccgagatcataccactgcactccagcctgggcaacagagtgagaccctgtctcaaaaacaaacaaacaaacaataccttggggcataaagtgttccacggtccaatccaattaaatttttttttttttttgagacagagtctcgctctgttgcccaggctggagtgcagtggcatgatcttggctcactgtaatctctgcctcccaggttcaagcaattcccctgcctcagcctcccgagtagctgggactacaggcatgcaccaccacacccagctaatttttgtatttttagtagagatggggtttcaccatgttggccaggctggactcgaactcctcacctcaggtgatttactcacctcagcctcctaaaatgctgggattacaggcatgagccactgtgcctggccagatccaattaattttgagctcctttgacagggtggcttttgaggtcagtgaggtttgttctgacagcaggcaggctcttcctagctagctctttctccacttctctgtggtaaactagctggcctatggttcagctggttgccctaatgcgggtaccagtctcttcttaatggcgcaccaccaaaacttccactgattttgacagcccctttaaacttgaacttccctacgcactgtttcaaatcaagccaattttcagggggttggtgggtggggagagctctatttatgacctacgtctacccctaggctaaatctctgtctgagccatgctgtggaactgggggcaggacagcggggcacctctctgagtgctgctattgctttaggagcaggtcgctgggttgggcaggagcctctggccttcttggttgccctctcccagtgtggagcctccttcctacaaatgagctggggctccatgttcccagcctgccgggcctgagatatagcctctattctatgcttgggggcaggtggaagaaaggagcccctggcctgtctgccacactcagctggaatttagcctctgccatgtggagctgggagggttgagaagtgctgagaacctggccctcctgggcaaacaccctaacccttgacggggagctgggggagagggagcccttcttcttggccacacctgcccccagtgctaggcggggggagaggggtgctggaggtgggagggcaggagtgtcatggctcaggtgccaacaggcttgccattattcccaggccttggcaggttttcttgtgtaaacctttgtttgctgtgtgccctgggcaccatgcccagaggctttcagtgcttgcttttgaataatcgtcatcagttgtgctgtttcactggggcaggggtccacggagctgcacacactgccattctggaagtggacaccactaactgggttttggcacgacagttatgaaaaagaaagacacttgagggattccgggttttcactttggaattggagataagggatcgtgggcccgtgtagtctcggaagaggttgtgtagtttaggatcaaagagctggccgtgatgagggcagggatgcaggcgcagcccgtctgactccaaactgccttgctcttaacccgactgcaagaccctcaagaacacgggccccatggttttcctcttatgtttctatcatctctaaaatacaacagcctggtgggcaggtgagtatgaatctgtcctctgccttttcttggtaggtgcttattgctcccattgccgtttaaagtagaataagtgtgtggtatagacatagctctcttctgtggcctctttggagccacagggccaggtggtatcagagtggacatgctgccctgtactcagcctctgtctctgcccccagggcctcctgcactggccatgcccatgcccacggagggcaccccgccacctctgagtggcacccccatcccagtcccagcctacttccgccacgcagaacctggattctccctcaagaggcccagggggctcagccggagcctcccacctccgccccctgccaagggcagcattcccatcagccgcctcttccctcctcggaccccaggctggcaccagctgcagccccggcgggtgtcattccggggcgaggcctcagagactctgcagagccctgggtatgacccaagccggccagagtccttcttccagcagagcttccagaggctcagccgcctgggccatggctcctacggagaggtcttcaaggtgagtgaggggacggcttctaggcccatctgggggacctcctttgtgtttctgcacctcccttggcaggacagtgtcctgggcagcctgatccccttccgttccctacagcctgtccctgctgggctcacaggctccctccacatttgacttggctgctcccatcatccccaatgcaggcccctccaggggttgctctgtgcatactggccccttgtccagagtctggcacgccctgcagcagcccctgtgccatctcctccggccctggcgccagctgtgcagcgtccttggcgagtcggcccagcctctggcactggccctgagtgcagtgcctggccagccctccccaggctggcaggctttgagctaccccctgcctgccatcttgcttttcttaaacacagtttccagtcatttatattttcttttagagaggagttttcccttgtatgagtcctgtatgaagacaattttgttaaaaagtacaaacaacattggcccccaggtcagctttctcacaggggagcccacttttcacaccacagcctgggctgcctgtgttgctctgcagctgctttttccacctcgtgacacatccaagaggtcccctggggtcagtgcaggtcggccctggctcctccgtcgctgggtctccacagacccagcccgagggatggaggtttgtctggttttgttattaccctgggcaggggtctgagacagatgccagctacaccaccgtgccccgtgtgtgaacccttaatggggtctgccaggttgtccccctatgtgattgtgccacttgtggctcaccctcactgtgtgcgtgggtaccacctcccttccaggtgcgctccaaggaggacggccggctctatgcggtaaagcgttccatgtcaccattccggggccccaaggaccgggcccgcaagttggccgaggtgggcagccacgagaaggtggggcagcacccatgctgcgtgcggctggagcaggcctgggaggagggcggcatcctgtacctgcagacggagctgtgcgggcccagcctgcagcaacactgtgaggcctggggtgccagcctgcctgaggcccaggtctggggctacctgcgggacacgctgcttgccctggcccatctgcacagccagggcctggtgcaccttgatgtcaagcctgccaacatcttcctggggccccggggccgctgcaagctgggtgacttcggactgctggtggagctgggtacagcaggagctggtgaggtccaggagggagacccccgctacatggcccccgagctgctgcagggctcctatgggacagcagcggatgtgttcaggtggggaccggggcacgccaggtgtttggcaggctgtgggaggcccttcctgggacggaagctccattccccaggagggaagctccaccctagcccaggacacccggcctcagagccacaaggctgagacgccatccctgccctccagtggagagcgtctctggtcaggctgcctgtgagcctcgaaccctccagagccactttgtgtaacctgcctcctcacagctccacaggagaaacaattgtcactccatttacagccagattaagggccttgccggagcccactgctagcaagtggcatagctgagactggccctaggtgctgggttccagggtccacactggtaaccactgccctgatcatcaggatagtaatacctgccagcagtaactgtggtgcctgtccatcagggcactgggaggactcaccactgtggcttgtgggctccctgggcacagagcccatattccatgatgtccccatcctgcccagggttcatgatcaggcctgttggggtgtcccttccccctgcttccgcccctccctgactgatgaagacagcagccctctcccacccacctccaagaggcagccctggactgggtctgtgtcccagggccaaccctgcccctttctgtccccatcccgtccctgccagtctgggcctcaccatcctggaagtggcatgcaacatggagctgccccacggtggggagggctggcagcagctgcgccagggctacctgccccctgagttcactgccggtgagtaggtgagggcgggagggggtgctgccacgggctcctggggagatagtggctggccatggaggcactgctgggctcagggtgcagtcggtgttctgggaccccgatgtggcccttcctcatgggcaggtctgtcttccgagctgcgttctgtccttgtcatgatgctggagccagaccccaagctgcgggccacggccgaggccctgctggcactgcctgtgttgaggcagccgcgggcctggggtgtgctgtggtgcatggcagcggaggccctgagccgagggtgggccctgtggcaggtaagctcccgacagtggcggctgcctgccctgctccccagccccgggggtccgcccacccacatcctgagctcctctcccccacaggccctgcttgccctgctctgctggctctggcatgggctggctcaccctgccagctggctacagcccctgggcccgccagccaccccgcctggctcaccaccctgcagtttgctcctggacagcagcctctccagcaactgggatgacgacagcctagggtgggttcaagtgcagggtatggggggctagggggaaggtgggggatatcaccggggctccatggagattcgtggtgaatggggaccactcccacaaacctggcccccatcacatcctggggaaggggaccaagactgggggtgtgtggcctggccaggcttaatgcagctgggcatgtggactggccgttcagggcatggcttcacacttagggcaccagcaccccagggagtggctggccgcgcagccccgaccccagtggaggctgccagtgcccagggataaaacattgtcccttctctgggaagagaaagcctctggagtctggggagccctgccctgggaacaagtccttggtccctggggcctggtgtcttgagtgagaggctgtaattaggaaaccacacgctcagggcagacagctcttggggactctgccgttagccccttccttacaaacacatcacctcatccctcggggcacttgatagcagacaagaagttccagaaaggcttacatttactaaaagtttatttcaaatctgcctccaagtccatgtgttctgaaaaggacagagggggccttggagtgcagccagatggaaggactttgaaggctgtccaagtgctgctttcagagtgcaccaagtttttattgtccctgactgtggctccctgcctgtttgtcaggcgggagcctggagcctgcacagggacagagctggtttcatccggcactccctagccctggacaccctccttgtctcgcctgccctcctgcaggccttcactctcccctgaggctgtcctggcccggactgtggggagcacctccaccccccggagcaggtgcacacccaggtaagcaggtccaggggctggggtgggcagggctagcttttggatcctgagtgtcactactctctcctcccagggatgccctggacctaagtgacatcaactcagagcctcctcggggctccttcccctcctttgagcctcggaacctcctcagcctgtttgaggacaccctagacccaacctgagccccagactctgcctctgcacttttaaccttttatcctgtgtctctcccgtcgcccttgaaagctggggcccctcgggaactcccatggtcttctctgcctggccgtgtctaataaaaagtatttgaaccttgggagcacccaa

SEQ ID NO: 428 - DNA, 13255 bp, Homo sapiens
  source 1..13255: mol_type = genomic DNA; note = NC_000016.10:c68000644-67987390 DPEP2 [organism=Homo sapiens] [GeneID=64174] [chromosome=16]
tcagcttggtgattggaggatgtttgtctacagtggccaggctgctttctggcttggaagactattgtttcttgggaattgtctgtatcagacatcatgggagcagatccagggcgacatcaaagggaagcatgagtctccaggaccagaggggcttggatgcagatgatcatcatctgggcactgctggatactgagtaagccccagctgcaccccacctctgcgctctgagcatgggaggcagcctgtgcagctataactcagcctgactttttccttccctgcatactcttgaaatacactggagatgagtaggggcgagtgagctgcacaccagaataagtttggtccttggagcaaactgtttctactgctgcctcctctgcaggtcttgatttatgcaaacactgcatagaagaggaagtagagggaaaagctgttcacccacctactccttcctggtagcaagatttcctatcctggccttgcctcaacagccctaccaattggaggctgaggttgtgccaaggctctatggggggacgtagcatcactgaggtggccagattttggaggacaggaaagtttgtgctatttgctgagactggagaggctggtgagagcagactctccatgagttgaaagccaaagaaagaaattcggtagatttctgcaatgagaagccacggaagaacttcaggcaggaggatgcattggatcttgttttcgttttgttagagatggggtctcactctgtcgcccaggctagggagcagtggtgccatcgtctctcactgcaaccttaaactcctgggctcaggcgaacctcccacctcagcctcgtaagtacctggaaccacaggcatgcaccacttttttttttcctttttcttagagttctcattatgttgcctagactggtctcaaacctccggcttcaagagatcctctcacctcgaccttcaaattactgggattacaggcatgagccaccatgtcctaccagactttgttaaaagaggaacaggccaggcatcgtgggctcacatgaacactcatgccccagaagtaaacaagtgttagccaaccaggaggcctatcctccccctaacctcacccaaagccatctctgtgccctcccccttgcaggggaaacagcacacactagtgaaatcttgtcttagtgtgtccggaattggtgggttcttggtctcactgagttctagaatgaagctgcagaccctcgcagtgagtgttacagctcttaaggtagcgcgtctggagtttgtttcttttgatgtttggatgtttggagtttcttccttctggtgggtttgtggtcttgttggctcaggagtgaagctgcagaccttcgtggtgagtgttacagcttttaaggcagtgcgtctggagtcgtttgttcctcccagtgggcttgtggtctcgctggcttcaggagtgaagctgcagaccttcgcggtgagtgttaaagctcataaaagcagcatggacccaaagagtgaacagtagcaagatttactgcaaagagcaaaagaacaaagcttccacagtgtggaaggggaccagaacaggtagccactgcgggctcaggcagcctgcttttattctcttatctggccccacccacatcctgctgattggtagagccgagtggtctgttttgacagggtgctgattggtgcgtttacaatccctgagctagacacaaaggttctccacgtcgccaccagattagctaaatacagagtgtcgacacaaaggttctccaaggccccaccagagcagctagatacagagtgtcagttggtgcattcacaaactctgagctagacacagggtgctgattggtgtgtttacaaaccttgagctagatactgagtgccgactggtgtatttacaatcctgagctagacgtaaagattgtccacgtccccaccagactcaggagcacaactggcttcacccagtggatcccgcaccagggatgcaggtggagctgcctgccagtcctgcgccatgcgcccgcactcctcagccctgtggtggtcgatgggactgggcgctgtggagcagggggcggcgctcaccggggaggctccggccgcacaggagcccatggagggggtgggaggctcaggcatggagggctgcaggtcccgagccctgcccccccgggaaggcagctaaggcccggtgagaagtcgagcgcagcgcctgtgagctggcactgctgggggacccagtacatcctccgcagccactggcccgggtgccaagcccctcattgcccggggccagcagggcccgcgggccgctccgagtgcgggcccgccaagcccacgcccacccgaaactccagctggcccgcaagcgccgctcgcagccccggttcccactcgcgcctctccctccacacctccctgcaagctgagggagctggctctggccttggccagcccagaaaggggctcctacagtgcagcggtgggctgaagagctcttcaagtgccgccaaagtgggagcccaggcagaggaggccccgagagcgagcgagggctgtgaggactggcagcacgctgtcacctctcattaggagctgccaatatcagtggcacagacctgagcacagggataatttggggtcagaggctacagtctaagttagctagatgctggcagtgggcagagtggaaacaaggcagaggcggggaaactcagggcctgactccagagccgaccttaagtgtcaccgctgattcctccttactgtctcccaccaaccctgcttcaaagcatctccaaatcctgggttcaacttccaaacatgtcccaggaatgtctccttcctgttcccactgcttctcccccttacaggccccttcattccttacccctcctgatctcctggcctccagcccattccctacagaaaagccatacctatttcttccattttaaaaaatgtgagctgggcgcggtggctcatgcctgtaatcctagcactttgggaggccaaggtgagtggatcacgaggtcgggagatcaagaccatcctggctaacacggtgaaaccccgtctctactaaaaatacaaaaaattagccgggcgtgttggcgggcacctatagtcccagctactcgggaggctgcggcaggagaatggcctgaacccgggaggcggagcttgcagtgagccgagattgtgccactgcactccagcctgggcgacagagcgagattccatctcaaaataaataaacaaataaatataaaaataaaaaatttggccaagggtcgggggtggctcatgcctgtaatcccagcactttgggaggtcaaggcaggcggatcacctgaggtcaggagttcgagaccagcctggccaacatggcaaaaccccatctctactaaaaatacaaaaattagccgggagtggtggcatgcgcccgtaatctcagctactcgggaggctgaggcaggagaatcacttgaacccaggaggcagagattgcagtgagccaagattgcaccattgcactccagcctgggcaacaagaatgaaactctgtctcagaaaataataataataataataataataataataataataataataatatcattatctatttttttacagacagggtcttgccctgtcacccaggctggaatgctatggtgttatcataatgctcactgcaactacaagtgtgggtgtgtctgtgattcgctttgtatggtcccctcaaggccacatttgaggactgaagttgcatatcatggaaaattgtgttgtctggcttatctcctacagagacagtgctcacttttactggctcaactcagcctgcctctgctgagctagcaggtaccccaagtcccaggaggtcagacattcgggctctggagagaagcttaaaaaaaaatgcaaaaagttggccgagtgcggtcgctcacacctataatcccagcgctttgggaggccgtggtgggtggattacctgaggtcaggagttcaagaccagcctgaacaaaatggagaaaccccatctctactaaaaaatacaaaattagccaggtgtggtggcacatgcctgtaattccagtgacttgggaggctgaggcaggagaatcacttgaacccaggaggtggaggttgcagtgagccaagatcacatcattgcccgccaagatcacatcattgccctccagcctgggcaacaggagcaaaactttgtctcaaaaaaaaaagaaaaaaaattcaaaaagttgaattctcctcacctactctgtcagctgttatttatttattcctacctaccccttccttatttttacatttttcaaactgacaaataataattgaccagcctgggcaatatagtgagaccctgtctctaaaaaaaaaaaaaaaaatagccgagtgtggtggcgagtacctgtagtcccagactcgggaggctgaagtgggaggattgattgaacctgagaggttaaggctgcagtgagctgagactgcaccactgcagtccagcctgggtgacagagcaagaccttatctcaaaaacaataataataataatttgcacatattcatggggtacatagtgatttttgttgttgttgttgttgttgttgttgttgtttggcggggggagacagggtctcgctctgtcatccaggctgaagttcagtggcccaatctcggctcactgcaacctctgcctcctgggttgaaacgattctcccaactcagcctcccaggtatttgggactacaggcgcgcaccaccaagcccggctaatgtttgtatttttaatagagatggggtttccccatgttggccaagctggtctcgaactcctgacctcagatgatccacccacctcggcctcccaaagtgctgggatcacgggtgtgagtcactgcgccccacccatagtgatgtttcaatacatataacacataatgatcaggttcagttcctcattctttatgccccttacctcttggggctctcagaataaactgtttatccccaaaaccacatctttgacctggagaccagcaaatccaagagcttctcctccctctcactattccagtgggtgtggggagctgctgaccagcagtggatgatggagagaaggagggaagcctgtgttggggtacccaaaccacccagatctgggacacgccctactgttctctgaagcagagcccaagaggactcaccatctgcagtgggcctccctatagaaccctccagcagggctgggcacagtggctcacatctatactcccagcactttgggaggccaaggtgagatcatcacttgaagccagaagtttgagaccagcctgggcaagaaggcaagacagtctttaattaaaaaaataaataaaaaataaaaaaaaagcccaggtgcggtagctcactccagtaatcccagcattttgggaggctgaggcaggcagattgcttgagaccaggagttcgagaccagcctgggcaacatggcaaaaccccatctctactaaacaacaaaatttagccgggcgtggtggcgcatgcctgtagtcccagctactcgggaagttaaggcacaagaatcgcttgaacccaggaggtggagattgcagtgagccaagattgtgccactaccctctagcctgggcaacaaagtgagactctgtctcaaaacaaacaaaaaaagacccccttcggcagcagtagacgtgacagttaacccacctcgagcactcggccatcgatctgccttcctcctggacagcagacactgggcaacatcaagtgtgcagtccctaaaatacatcaaagctgggatcacttcccctcctgggtagcttgggacctccagtccctttggaagagttggttcattttctttttaggaggccttcttgaatctctagtcgtcgtcaggcttaggtcacactacccatgcactgatcagccctgccacgtgggggaggctccaaaaaatgaagcggttccaggggtgccaaggttcagagcagagtcttgagagcctgaggggcaggaggaggcaaaggtctctgaggacgaaggggtttggccacagtcccggaagatctcaggtcgtggggcttctgtgagcgggcacatcccctgtgcctgtgtgattgtgagcttgtgtgcttgtgtggttgggggtccttcctggaggaggcatctaggttgagggccccaggccgggaatggggtggggcctgtcgtcaaggaagggactcagccctggaggtttctgtgagagctcaagccacaggagccacaagataagaggagtgtggctgcagaacccaggtggcagggctttcctcaggccccttactcctgacctggacgaggccggggcttcctcaaggaggtaggaggtatcctggccagcagatcagccagaagctctaggaggaaggtgctgcggccggggactctgctgccctagacaagacttcatttccttccatgcagatggctgtgtgggttcctgctctgttgagtgaatgttccctggcagtggccagatgcttgctgcgctctcatccctccactggggtcctggggaggtgtggcagctccttaggaaggagctctttcctaaggctgattggagaatgtgcggtcggggcggggggcggaggagtgctcctgacaggtcctagtagctgggagattccccagagtataggcttgagggcctaagttacgggagagagaaggtcagggccagggggccccttcctgaatccagtccacagggttaacccctcatttccagagcctatcttctcccccacacccacccacacaacccagcaccaggaaatccagagcccagagcactgtggtcacagggacacatgtggccctgggtgtggccgggacacgttgcaggcggttggggacatgacgtggtctgcagatctcccagggcagggcagagggccactgtttgggggaagcaccccaggccctctctcttagagagagagcctaggggcagcagaggagccacctgggtcggccccctggggacagtgggaggagtaaaagggagggtggagggccctaagacaggccgcgagtgggcgcccaggacagggatccgcccagccggcgggagcgcccttggggatgacggcgggagggctgggcgccccctggtggccgtactgggcggtgccgccgctctccgcacatccttcgcggggccctgtgacttcgttaccctcctcttgaggccacgccgccaggtggcctgaatcgagggtcgggactccatcgtcgcgctctgcccctcgcccgcccctctcaggctctctgactgccacccctgcctgcctgcccggccctgcacaacatgcagccctccggcctcgagggtcccggcacgtttggtcggtggcctctgctgagtctgctgctcctgctgctgctgctccagcctgtaacctgtgcctacaccacgccaggcccccccagagccctcaccacgctgggcgcccccagagcccacaccatgccgggcacctacgctccctcgaccacactcagtagtcccagcacccagggcctgcaagagcaggcacgggccctgatgcgggacttcccgctcgtggacgggtgcgtaattgctgcaagggggcgatgggagctgagcacactcctgggcaagggagggtcccagagtatgcagggctgtggaggaggctccctcacaccacccctggatgccctctctcccgtcatgcatgggtaccctttcccctctgtcatcccctcttgggtgggcactcctagcccgggcctcaggggatctcagtatagtcatgtgacaatgagggatggggatccccagatgtgtccttcctgaactggagggctaagaggcccatctgtctgttcttcacctgaccctggcttgacatccctccagccacaacgacctgcccctggtcctaaggcaggtttaccagaaagggctacaggatgttaacctgcgcaatttcagctacggccagaccagcctggacaggcttagagatggcctcgtgggcgcccaggtaccacagggatacacgaggtgccacagcatggctgctgggggatgatggggagagtggggaccccagagatcacaagttagtcacatgagaactcagttaccatagtgacccaaaaagtgtcatgatatggatgctgggggctgcagaggctacagtgagccagcttggtggccaggaagaccctgtggaagaagcagtacattacatgtggcctcctggcccactgggtgctctgtcagctgtggaggctgtgagcagtccagggtcctccaaagcagcccccatccaagccaaaccctggccttccccccagttctggtcagcctatgtgccatgccagacccaggaccgggatgccctgcgcctcaccctggagcagattgacctcatacgccgcatgtgtgcctcctattctgagctggagcttgtgacctcggctaaaggtaggcaagttgatgggaagcgttaggaacttgattgagctactccagccctggaaagtaatcacctgacctacctgcccccagctctgaacgacactcagaaattggcctgcctcatcggtgtagagggtggccactcgctggacaatagcctctccatcttacgtaccttctacatgctgggagtgcgctacctgacgctcacccacacctgcaacacaccctggtgagcctagtgcagatggtgtgggaccgctgaggcaggggcagagatctgcctgaggtcactgtgggcccagaacaagctttacccatgggatgtggcactgactctggagtggggaggggagctgggattctggttttcagaatacgacttgacccctggccagacgcggtggctcatgcctgtaatcccaaaactttgggaggctgaggcggacagataacttaaggccaggagttcgagaccagcctggccaagatggtgaaaccctatcttgaagaaaaacacaaaaattagccaggtgtggtggtgcgtgcctataatcccagatactcaggaggctgaggcatgagaatctcttgaacccaggaggtgcaggtttcagtgagctgagatggcacgacagcaccactgcactcctgcctgggtgacagagcgagactctattgccaaaaaaaaaaaaaaaagaaaaggaaaaaaaagactggacccagcagggccctcctgctgccaggcatggcccatttgcagggcccattttggatccctgtttttgtttcaggggggtgcagggatggagggtgggtagggcctctagactcttgaggccgaggaacagctaccagtcagactgcttcctggccaccctgcagggcagagagctccgctaagggcgtccactccttctacaacaacatcagcgggctgactgactttggtgaggtgaggaccctggttcacactccaccccaaacaaatgtgcacaccccagctgtttcttacaaataaatgtatacacatgtgcacccctgatacccttctcccaacatgtccctgcagaaggtggtggcagaaatgaaccgcctgggcatgatggtagacttatcccatgtctcagatgctgtggcacggcgggccctggaagtgtcacaggcacctgtgatcttctcccactcggctgcccggggtgtgtgcaacagtgctcggaatgttcctgatgacatcctgcagcttctggtgagaaactgcccagcccaggaacctaaagcaagaggttcaaaccaggagcccttcggccaggcatggtggctcacacctgtaatcccagcactttgggaggctgaggtgggctgatcacttgaggtcaggagttcaagaccagcctggccaacatggggaaaccccgtctctactaaaaatacaaaaattagccgggtgtgatggcatattcctgtaatcccagctacttgggaggctgaggcaggagaatctctggaacctgggaggcggaggttgcagtgagccaagatcacgccacagcactccagcctgggtgacagagtaggaccctgccatggaaaacaaaaacaaaaaacaggagccctcaaacctgaggccctgctccctccacttcttccaacttcaggctgaacatcttttgccccacaaccccacagtccacatccaggagtcgggggttctagatggtaaatatgtatattcctctactcctcaaagcaagtgccaagacacctatgccagaccagggcctagactcctcccttcatacaaaaccagagaggtgaagtttctgctgactcctgaagtcagagctgaacaccctctccagggatccagagggtggcagggcaggaatgcagtttgctgaggggccaggctaagtgtccacttgcccgcccctgcagaagaagaacggtggcgtcgtgatggtgtctttgtccatgggagtaatacagtgcaacccatcagccaatgtgtccactgtggcaggtaactccctctcccgggctctctgaacagttctgatttgcacctgaagacttgggagggccccaggactgtcccagtggtttcactgaaaaaaatgcagtgatggacagtacacagcacattggtcacatggagctgcagccacagagtcagtgctgcggtcctgatgggtataagggaggaagccacacatagaacctgagtgctaactatctgcgcctctgcaggggatccccaaagcacccttcctcggcctctggccaagagactagaaggggaaggccccttaggtctctggggtctttgtcagttgtactctttgtccctccgtcatctcccacaaccatagaaaagagttcctaccaggttctcaaagagactagaggcaggtttaatcctaggtgggaaatggcccagacaagtggctctgtggatccactccaaacctgaaatccaggccagaaccagctgaatccattcaggtcaaacctcagggttctcaggttgccaagctatgtggcaggccataaaggaattagcctgcctggcccacaggctgcaagaaggagactcagtgccatccagccccagtggcacccctgccctggaagccctacgcagctgactgtccaccttccccctccccagatcacttcgaccacatcaaggctgtcattggatccaagttcatcgggattggtggagattatgatggggccggcaagtgagtgccttccctgtggcttgtcttgggctagctgtacagcagtggggccttcacggtcaccatagccatcacgtcctttaggccttgaccacactcccgggatcagttctctgggctctcctgtttgtcttcatcccagtgaccccactctaggacattatacttggccaaaccaccagacagagctcatctgcccagcactgcacgtacccccaagcccaggagactcactctccctgagcagaccatcagcaaggtctggtgtgagccctgtgcacagtggctgtgtttgcaaccactgttttctgaagaagctcttcctctccttctccttctccttttcttcctcgtcctccttcttctttgtctcctcctcctccttctttcttccttttcttcttcttcttcttctcagggtcttgctctgttggccagactggggtgcagtggcgcaatcttggctcactgcagccttgactttctgggctcaagcaatcctgccatctcagcctgcaagtagctggggctacaggcatgtgtcatcatgcccagataattttatttttggcagagatggggtctcgtgttgcccaggctggtcttgaactcctggactcaagtgattctcctgccttggcctcctaaagtgtgggattacaggcctaagccacctcactgggccttttcttctttttttcttttcttttttttttttttgagacagaggctcactctgttgcccagcctggagtgcagtggcacaatctcggctcactgcaacctctgcttcctgagttccagcgattctcctgcctcagcttcccaagtagctgggattacaggtgtgcgccatgatgcccagctaatttatttttcctttctttctttctttctttcctttctttcctttctttctttctttcttttttgtctttttagtagagattgggtttcaccatgttggccaggctggtctcaaactcctgacctcaagtgatccgcccaccttggcctcccaaagtgctgggattacaggtgtgagccaccatacctggccattttcttctttttaactctggttggtaggggggatcatttgcattcagtaaaaggcatagatcttaatagtatgattcaataagttttgataaatattcaaggaggttttgaggcctccttctgaaggataaagagcagaggagaattacctactctctccaagtctccacttcccatacctgaccagggctggggtttcatagaccctggactgtggttctgagtcatgatcagggaatcaggtctgaaacccactagctggtggccacacagattccctcaggggctggaagacgtgtccacatacccggtcctgatagaggagttgctgagtcgtggctggagtgaggaagagcttcagggtgtccttcgtggaaacctgctgcgggtcttcagacaagtggaaaaggtactctgggctgggcaagagagtagccgaggggtctgagcaagtgtatcaaggagagctgtggaagctgagcaccgactgccacctctaggtacaggaagaaaacaaatggcaaagccccttggaggacaagttcccggatgagcagctgagcagttcctgccactccgacctctcacgtctgcgtcagagacagagtctgacttcaggccaggaactcactgagattcccatacactggacagccaagttaccagccaagtggtcagtctcagagtcctccccccacatggccccagtccttgcagttgtggccaccttcccagtccttattctgtggctctgatgacccagttagtcctgccagatgtcactgtagcaagccacagacaccccacaaagttcccctgttgtgcaggcacaaatatttcctgaaataaatgttttggacatagaaacaga

SEQ ID NO: 429 - DNA, 7114 bp, Homo sapiens
  source 1..7114: mol_type = genomic DNA; note = NC_000008.11:c81447439-81440326 PMP2 [organism=Homo sapiens] [GeneID=5375] [chromosome=8]
atctgagtcttctgaatcccacttagaactgtgttgagctctcacccatcacgatgagcaacaaattcctgggcacctggaaacttgtctctagtgagaactttgacgattacatgaaagctctgggtaagaaatgctttttgttgttctgctgaaaagctcctttttaagaaagctacatgacattttcatctactacttttaacaggatactggggagttttgcaaggctgcagtacaatcctcttttaggattaatcttttgttgtgtcattcagataatttatttgaattttatttgtggtaatttttaatagaattaacttaaatgagagagctgcttaaatgcatggaatgcccactgatttcaagggcaatttcataccaagagaattttggttgcaggtccagaggagagaaagcttaaaagcatggtcaacccattttctggcttttctgagagctacgttcatagcaactgaagtgttcataaaataaggaattgaatatattgcaaatcctagaaaatctcaatttaaaaatttaagttttagctaaactaacagttttttctctctacctctaggttgtcctttattacacaatcatgtagatacagagagtttgaaaaacaaaaatacttcctaaaatactgtgttcatagtctagggaagttactgagagaaaaagaactggagttatggcagtgaattcaaactcaatttcgctaacatcagacgtttctggagttggagcagtgagtgaagatggaaaaccgagtcattagttacaacaactttattttatactatttctagagtatgtcccatcgatataaacacaatagatatgaagagtctttgggaattttcagaactatataaatacaataaagagtgatgccagtgacccgagtttgctgtgcttgtcaaagtgcctacagctttacttaactgttcagaaagcctgtataaaatgttctattttagataaaatgagcaaagtcatgtcattgttgcctggaacagtaagagaacttatggggatcaattcatactgtgagatcggttagatttaaagacttcactttacagctgaggaagaagccaaataaaagaaagtctcagtgaaggattttctaattccactgttttccagtttagcatgcaaaataacaccttgggatttggtaaatataaattctcaggctctgacccagagattatgatttaacttgagaaacattgtcctaaactgtataaaataacaaaagattaatcagaatttgaagaaagaatatagtttatagtttattggctgtaactcttaacttcttattcagtatgtaaaagtttgagatctttttaactggaaaaagttattcaaccattgagacttcctggaaaattagtttttctttcatatattttttattttacattttcccttttccatatattttatagtcttggtaataatggtaataaacttaagagtctaattttgtttcatttttgaaatgtagaagagttttttaaaaaatattttatttctctatgatcatttataatagtatagatctcaaagttagatggatagtttttttcctaccagctagatatagaagccacaaaatttcagaagtgaaattctatcaaaaatatgaggggaatacttctctatatccataatatggtattgagggaaaatatcatagaacaatacgtatatgctatagtctcatctttaaaatatatctatagtatttgtacatacaaactaaaatctctagaatgatttatgcaaatctataattagtaattttcaatggggaataggattggatgtgataaaaatggatgacttgcagtagctatttcagctggaaacttttactcttgaaaatctgcagacattggccgggcgcggtggctcacgcctgtaatcccagcactttggaaggccgaggagggcagatcacgaggtcaggagatcgagaccatcctggctaacacggtgaaaccccgtctctactaaaaatacaaaaaattagccaggcgtggtggcggcccctgtagtcccagctactcgggaggctgaggcaggagaatggagtgaacctgggaggcggagcttgcagtgagccgagattgctccattgcactccaaccaggacgacagagcgagactccgtctcaaaaagaaaagaaaaagaaaaaaaaaaaagaaaatctgcagactttacttttgcaacaacaaaacctaaaatgtttgagtcctgggcatgtatttccattaggagtgaaacatgggaggagatgcttagtagtaagtgatattacctgccatcaactcacctggggcaccactgagcgtaggatgtggccaccacagtctctttggctatgctctcttggtcaacataattctaacactatcttaattttcaggtgtggggttagccaccagaaaactgggaaatttggccaaacccactgtgatcatcagcaagaaaggagatattataactatacgaactgaaagtacctttaaaaatacagaaatctccttcaagctaggccaggaatttgaagaaaccacagctgacaatagaaagaccaaggtaatctttaatgtttctcttcaaagttggcccagtgggctgcttgagagagaggaatattcctgctagtgtaaaagggtagactcaattctgttgaaaaggagtgtacctcctgagacatctatatctattatgaaaatggttccatactgaaagaactgcttctttgatcaacaaatttcaggcaagtcaattgcatgaccttgtctttgcagagcatcgtaaccctgcagagaggatcactgaatcaagtgcagagatgggatggcaaagagacaaccataaagagaaagctagtgaatgggaaaatggtagcggtaagagtatctttacttctaaatagagaaataatgctatataaataatttgattatattgttttcaaaatattctttgttctttggaatatgaatggataaaaatgactaagaataaagtaagagttaatgcttcagtgatatttaaactattacagactcatcttcaagtactgacccaagattttagaaataaaaaaagccatttgttattttacaaataaaaatacctaaaaatggtagtaaggttaaagaaagtataggtaaatcttactagtttgggctcacaaagaagaaagcaagtctaaattttaaaagcaaaacactctctgcaaggtgtattttgtagactatttgcaaagtcatttgtagactatttgcagatatcccacaattttgaattcaagagcccatagtaacttagaatcaatcatgtcaataaagcaagctgagctcattggagacttctagttggcagatgaaaataatgacaaaggttgtatgtgatgacctttgatgattttttttttttagggttaaggctttatgttcactaattaacacatacattgaatgtaaatagattcatgtactcttccgaatgtttctttctttagtacagtggttcttagcccttgctgcacaacagatttacttggggagtaaataccaatatggaggcctccaaacagataattcaatgtaaatctcttgggggaggaggaaccatcactatatttaaatattccccaggtaacgcaaatatgtagacatttttgaaaaccactgtcttattagatttaaatgcaagtgaactatacataaaaacttgccacttaaaaaaattcctttacagcaacgtagatcaacttttaaattgtttcttctatttcaatggtcataattctgaattactggagactgacatactgatattttattcctttctaaattaatcttatgagtttattttgaatttctatttttattacaaattttctgttctctggtttgaacttgagatactcaattaacctctctcttttttaaggaatgtaaaatgaagggcgtggtgtgcaccagaatctatgagaaggtctgaaaaatcatttcttcattgaagtggctttttatcatttaatgatggaaatcaattgcttccattgacaaaactgaatacactgcaaatatttgtttttgcttttgtcttaatatatcagatatgcaaaggcctaaactgagaattaatctaaaagtcagtgttatttaaacattttcaatgtgcatgcatgtcattattacatcaaagcatatatattggccagacacaaacagttgatgatgtcattcaattaactacaaaattctaatctatgttgaactttgtatacttgaaatgataataaaaaggatataatttcttagtaaaatgaaatcaaagtattgatcagggtagcaaactcaaatgctgacaggggccagaggagatatggggaaggagcatcagaaatgaggcaagctaggagaatgggctattataatgtaaagaattgtagtctcagttaaaaggggtagcctctactccagccaacattttaaaattaatggataatttatagacagttaaatttatagacagttaagtaaaaatggataatttatagacagataatttatagacaggtaaatgtgagttaaatataactcacatcccactcaagacacaaaacattttcttaatcctagtacatttttttctgtcccttcccaatcagtgtccttttctgttccacccctaccaaaagcaagtagtggtttggtttctatcatatagattaattttacctgctcatatgaagggaattgtacatcatgcattcttttctgtttgccttttttaaattcagcatcatgtttttgtgatacatccacattgttgcatgcagctgtagtttgtttctttttattaccaagtactatttcattgtatgaatatatcacagtttatccattctactattaagacaattgagctatttctaattttcggctgctatgaataaagctgctacaaatatttttgtacaagactttttgtaaacataggagtccctttattttaaataaataactagtcatatcattaggtccagtaattgttgacaggcaggaacgggggaccattgcattgtgcccaagtaataataaaactatttcagatgtattatatgattgagcaaatgagaaaacatgttgatgttgatgggagtcaggatgttcactatggaaaaacaaatatacaaatatgaaatgagggaaggcaagaaagaaccatgtggaaatggaatagaattggtataaattcataatttctaaaccatgtatatgtacgtttatatgtattataattgcatacacatgcctccatgcatatatgtgtgtgataatacacatgcatttatgtgcgtgtgtgtatacacatgcatatatttactaatcctatctgccaaaatggcttagacacaaaaacacctcagcagaaatgaatatacctagcactcagatcttcgtgtctaatatagtttgccactaaaaggaaccaaggctacttggaaaaatggatgattccaaagcaagggcaaggtaggaacaagatgagcttgaaatatcttgttatgccagaaagtaatgttaaaaaaaaaaatagaggtatattgccaaaacatagagccagcttgaaggggctcccactggccaaacttgagccaatctgagagcaaaataattgagaaaaataaataacaagataattgagaaaaaaataaaataaattcccaattccattgggaaaaaatagaaatccatgaatccatactgatataatgatagataatcgatagataggtagatgactgacagatgatagatagatatatagatagatagatagatagatagatagatagatagatagatagagaaatgagaaggtttctcttttgcaatagaacgtcatggaccagtgttaaatgtgagtggaaggagttctggaattggaaaaccatcatttttcaaccatcacagtaaatatggctcaggcaagaattatcaatcaatgctaaagctagggggaaatttcgcttaggagcaggatattagggtattagtctgggcttaaagtatctcctcacagattgttgttagtttctggggaaagaatagtaaccatgcaatggaaaaaaatggacaacctcttgactaggttatcaaaattaacctcaccaataaagggtggatgttcaacatgtgccttcaaatgtgacccactgagaaggaaacaacatcactgtaacaacaacaaccagaaacgacagggggttttgactgaattcttcaaaaatgtcaatgtcatagaagacaaagaaaggttgtggaaatgtttcagattaaatgatagtaaaaacacctgacaactaaacatagtaagtaatactagactggattctgtaccagaggtaacataagtgctccaaaggacaatgttaggtcaactggcaaattggaatatagacagtcaatcagataagaagtatactttgattaagtaaaaaaaatccctattcttggaaaatacacaataaagtattttgaggtaaagggccataatgtatgcaatctactctcaaaaaattcagaaacatatatttgtgtgcatttgcatgtgcaacagtacacacaaacatacataaagagagcaattgataaggcaaataaggtaacatttaacaataatctgatacacataaatagagaaagagcaattgataaagtaaatgaggtaaaatttaacaataatctgagcaaaaggtatatgtgttttctttgagacagtctgattcttgcaacttattctgtaagttggaacttatttccaaacatgattgaaaaaaaaccccgcacttggcaacttcttctctttttcagcctagaaatgtctgtgttaagtggttttttatttattgttgttgtttgttgttattgttgttttgttgccaggctccaactcacaaaatacgagtttaaaaactgcgttgttatttttagagatttgtgataatacaacttgttataaaatttattcctcaataaatataatttctctactatgcaaaaa

SEQ ID NO: 430 - DNA, 57470 bp, Homo sapiens
  source 1..57470: mol_type = genomic DNA; note = NC_000019.10:6135633-6193102 ACSBG2 [organism=Homo sapiens] [GeneID=81616] [chromosome=19]
aagaggtggctgggatggaacgttctggaaggttgaatggggtagaaggcctgttgtggagggaaaccacccatcctcctgcctcccaccaccaccatcatcctggctggacggagagggtgacgggggctgggaaggggcagctcatgttcaggtttccaggaggggctacctgttgactgtctttgcaggaagaagaaaacacctgagtgaccagatgtcccagctccaggtgccttgccagatggccagaaccacacctcttgaagagtgacaggtgccagtggtatgggagaagggcatgcgttttcttttcttttttttttgagacagggtctcactcttttgcccaggctatagtgcagtggcacgatctcagctcactgcaacctctgcctcccaggctcaagtgatactcccacctcaacctcccaagtagctgagattacaggcgcctgccaccatgtccagctaattttttttttttttttgagacagagtcttgctctgttgcccaggcgcaatctcggctcactgcaagcttcgcctcccaggttcacaccattctcctgcctcagcctcctgagtagctgggactacaggtgcctgccaccatgcccggctaattttttgtattttttagtagagatggggtttcaccacattagccaggatagtctcaatctcctgacctcgtgatccacccgccttggcctcccaaagtgctgggattacaggcgtgagccgccatactcggcctaatttttatatttttagtagagatggggtttcgccataccagccaggctggtcttgaacttctgacctcaggtgatccacccgcctcgacctctcaaagtgctgggattataggcacgcgccaccatgcccagctaatttttgtatttttagtagagatggggtttcaccatgccagccaggctggtctcgaactcctggcctcaagcgatccacccgactcagcctcccaaagtgctgggattacaggtgtgagtcaccacatctgaaccctacatggccttttaaaattgtgaaacatataatgcatataaaataacacaaagcatatctgtacgatttaatgaataacgataaatatctgtgtgcccttttcacttcgtgaaatcgaatattactagtaacttacaagtcctctgtagagaactcctgagctcaagtgatccacctgccacggcctcccaaagtgctgggatcacaggtgtgagcctccgcacccggccgatcgtgtgatttttaacgtgcagttccctgatgaccaaagctactgagcatcttgtccaggatttgtagccctttccaggctccttttttgtgaactgcctgtttacatttttcatcataaaacactgggttgtttacatttgtcttttaaatccagagttcttttcatactccggatactaattttatttgcccattttgcattgccataaagtaatacctgaagatgggcaatttataaagaaaagaggggcctggtgtggtggctcacacctgcaaatcccagcactttgggaggccgaggtggcggggttggggggggggggggggcttgcttgaggccaggagttcaagaccggcctgggcaatatagcgaggcccccagctctacaaaaataaaaataaaaataaattagccaggcgtagtggcatgcttctgtagtcccagctatctgaggggaagagagttccaggcagagggcacagcccgtacgaaggccccaaggaaggactgcacctggtgagttggaagaacagtgaggaggcccacgtggctgcagcagagtgaggagggggagggaggaaggaggagagcacagggaggtgcagggccttgtggaccgtggggagaacttgcgcttttacctggagggaggtgggagccatggagggctgcaggcagaggagagacagggttgggccagcatttcacttttttatttttatttatttatttatgtatttatgtatttatttatttatttatttttgagatggagtttcactcttatctcccaggctggggtgcagggcgagatctctgctcactgcaacctctgcctcttgggttcaagcaattctcccacctcaacctcctgagtagctgggattacaggtgcctgccgccgtgcctggctaatttttgtgtttttagtagagacagggtttcaccgtgtgaaccatggccaggctggtctcgaactcctgacctcaggtgatccacccgcctcggcctcccaaagcactgggattacaggcatgagccaccatgcttggcattcatttttatttgtaaacacttttatcgtggaaagtttcaaacacaaaagtagagctgatcataacataagcccccagctacctatcactcggctccaacttaaagtcagccttggtcatttctgtgtcaccccactcctcgtgggtagttttaaagcaagcaccagacagtgtgttctttcatgcatgaatcctttggcaacaaggattcctttctctaacttcaccccaaagcaattatcatactttaaggaagtaaacatcccctcttcatttcttcatgtcgtctgagacacagtcagtggtggagttcttggcggcctcgtgcacatcttgtttgaattgagatctagcagaacccacaatgcgcctgggtgatgggcctctcacgtgaccaggacctctcaggctcctgggaggaagcttaggtccaggcaggcggagagagtggatcccattttgaaggctgagctgatggaattagctaatgagtcaatgtgctaggaagagagagggagagagagaggggaagggggaagggggagggagggagggaaagaggaaggaggaaaaggaaggaaggggagggagggagggaggaaggaaggaaagaagggagggagggaaggaaagagggaagagagagggaggaaggaaggaaggaaggggaggaagaaagaaaggaagggaagggaagaaggaagaaagaaaaggcagggacggagggaggaaggaagagaggggaagaacgaagggaggaaagaaggaagggagggagagaggaagggtaggagaatgggaaaaaggaaggaaggggagggaagaaggaagtagaaaggagggaagaaagggaagaagcaaagggaggaaggagggagggaaggaagcaagtcaaaggtgaattaaggatgactttgaggttctgggccagatccagctgctccagaggggccttgggcttcctcctcatttcttcttgggccgcacactccgtgcatgtttttcatgcatatctgtagcttggtctggatctgctgttttgggctgctcgctttgtcctgctgattgatctactttgtgtgtgtaaactccgtaggctcattcaagttcactttacttatttttaaaattaaacttatttttttttttttgagatacagttttgctctgtcacccaggctggagtccaatggtgctatcttggctcactacaaccttcacctcccaggttcaagggattctcctgactcgacctcccaagtagttggaactacaggtgtctgccaccatgcctggctaattttttttgtatttttaatagagacagggtttcaccatgttggccagactggtcttgaactcctgaccttaggtgatctgccagcctcggccttccaaagtgctgggattacaggcgtgagccaccgcacctggcctcaagttcaacttagaacatggccttttagccacctgttttcactgaaatacaaaatcagtttttgctggtgtaagaatcacgtgcatgttacagggcttcattcaccagagggtttactcaagttttcacctgctgtgttcctgcactcactgatggaaacttttagagttcataaaacattactgcaaatctagaatccagaacaactgcttgattcttgtgtcaagcacgctctttatcatgaacaaaatcgtacaattttcctccctgaaagccactagaaaaatcagtttcaataaatgttgaccaacaatttggcctccacttcccccaggggacaaagttgacaatatctggagacatttttgattggaataaatttatatttagaatttgtgattttaggccaggtgtggtggctcacacctgtaatcccagcactttgggaggccgaggcaggcagatcacctgaggtcgggagtctgagaccagcctgaccaacatggagaaactctgtctctactaaaaatacaaaattagccaggcataggctgggtgcggtggctcacgcctgtcatcccagtactttgggaggccgaggcgggcagatcacgaggtcaggagatcgagaccatcctggcaaacacggtgaaacccagtctctactaaaaatacaaaaaaaattagctgggcgtggtggtgggcacctgtggtcccagctactcaggaggctgaggcaggagaatggcgtgaacccagaaggtggagcttgcagtgagccgagatcgagccactgcactccagcctgggcgacagagcaagactccgtctcaaaaaaaaaaaaaaaggaattaacacactgagaattaaacaacctgaaggagtggtggtacaaacaccactccaaagccctcaaacagtagagtccaattaatgactatgcaaaaacccagggtagccccggaatcctgtccgctactgatgggttaaagaccatgtgatctcggccaggcgcaatggcttacgcctgtaatgccagcactttgagaggctgaggcgggcggatcacttgagcttgggagttcgaaaccaacctggctaatgtggtgaacccttgtttctactaaaagaatatttttaaaaattagctgggtacggtggcctgtaatccctgctactccggaggctgaggcacgagaattgcttgaacctgggaggtggaggctgcagtgagccgagattgtgtcactgcactccagcctaggcgacaaaaccaaaccaaaccccatgtgatcttaagtctgattactgataagtgttttcgaaagaggtggcattgatttttaccacgatgaatgagagcacctgttttcccacattttcataatagacaatattgtcagcttttttgatcttacttaacctgaaaggtgaaaactgcatcatattttctgttgtatttctcataggactgagtttgagcatgtttacttctttttaaaagtcatttttcagtttcagataattatctattcatgtcctttgcccgctttcccattgggttttggtctttttctgattaattcctcagggttctttacatatgagggaaatcaagcttttatactttggatgtattgtccacatctttccccaatttgttgttgatctcttgatttttgtttgtggtattcttggccatgtggaaaatttaaaaattttatgtagcaagacttatcctgtttctcctttaggccctttgagttttcatgttaatattacctttaagagaagataaatgtgtggtcccatgagagtttctttcccctgggaggcttcaaaatattttctcacccacagaattgtgtatagacccagactttatattctaacaatttaagagactcttctgtaaactcacagattgaataccctctgggttttacaaatgctctattatctggcatgccggccactctcctctcctcccaggcccaggacaggcatgaccaatggatcctaggattctaggcagacatgaccagtggatggaagagttggcctcatccctacagcccctttgccaatcctgttaaactccctgcttttttgctttgcagtgctgtggagcatggtttctgcacacctggaatgactggaaccccaaagactcaagaaggagctaaagatcttgaagtagacatgaataaaacagaaggtatattgcactaaagagtacgtgggagagagagtggcacattgattccacaaaggctctttgcagaggagtctggatctagaaagatgtagccattccttgcctgaccctgctgaccccgaccccccacccttttgttttgagacagggtcttgctctgtcacccaggctggagtgcagtggtgcagtcatagctcactgcagccttgaccttccaggctcaagtgatcctcctgcctcagccctccaagtagctgggactacaggtgcacaccaccatgcccagctctgtattttttttgtagagacagggtttcgctatgttccccaggctggtcttgaactcctgggctctagcaatcctcccaccttggcctcccaaagtgctggaattacaggtgtgggccaccgtgcccagcctagggcctattttctattcttgataggttgttgaggtagcagggcaagttgttcacataattcagagctctgctctactggtgatgtgacactgggcaagtcacttgctctttggaggcctcatttgcatatctgaatgatgggggcattgataacagcacctccctgtcaggttggtgagcccgagtggataaagtacccaggaatcatccatgtagatagggtgcggatatgatcatagtgatttattaacattaggctataatcattttactgtcagagctaaagtcaagggacatggtgacatcatagacagctctgataccagtgggttgggggaggtccccaaacgccggtgggacctcgaacccagccattatccaggctcttgacaccatcgagagtgaattcaagaaacaagtcagaaaatagtgaaagtgggccgggtgcggtggctcacacccgtaatcccagcactgtgggaggccgagacaggcggatcacgaggtcaggagatcgagaccatcctgactaagatggtgaaaccccgtctctactaaaaaatacaaaaaattagccaggtgtggtggcgggtgcctatagtcccagctattcaggaggctgaggcaggagaatggcgtgaacccgggaggtagagcttgcagtgagccgagatcatgccactgcactccagcctgggtgacagagcgagactctgtctcaaaaaaaaaaaaaaaatagtgaaagtactgaggtttatggcaaataaaagtacttgcattgcaaagtacacattcaaggagagggagtgcaggcgtgcttgaaagatagcatcacacacaaaggagtttggggatgctacctttatgggtccaaagggtggaatattcatctaaatccctagaaaactggccgggcacagttcacatctgtagtttcagcactttgggaagctgaggcgggcagattgcttgaggccaggaattcaagaccagcctggccaacatgacaaaaccctgtctctcttaaaactacaaaaattagccaggtgtggtggcacatgcctggattatagtgagtctcaacttattgcaacctctgcctcccaggctcaagcgattctcatgcctcggccacccaaacagctggcattacagtcatgcaccaccgtgcctggctaattttttttttttaacaaagcgccccaaagtgggtgtctgaaacagcagaaatgtattgtctcacaattctggaggccagattactgagatgaaggtgtgggtagtgaggttgcagtgagccaagatcacaccactgcattccagcctgggcaacagagtgagactctgtctcaaaaaaacaaaaacaaaaacaaaaacaaaaacaaacaccagtcattggatttagggatcaccctaaatccaagatgatgccatgatgtcatctcaagatccttcactaaatccacctacaaaaaccctgtttccaaatacggtcacagtctgaaattctgggtggacatgaattttggaggttcaccatgtaacccactacagtcattaaaatatcccacaagtgtccaggtgacacctccatgtttttgtccaatttaaagcatctccactcccccctgcttcaggctggggtcaggaaggcatgataaggtgctctttgagttcctagatgctcttctcctcatcacccccatctccccaggtggtttctttgtgagctggtgctgactcccagagctgattagctcgggaaagtggggttgaagggggcctgtatgaactaggcttcccttgttgtaagttgttatgagattaattgtgcatctccaattcctttgtggaagtcctaacccccaggtgctcagaatgtaaccttgtttgggaataggatcattgaagtaatttggtttttttgttgttgtttggttttgttgttgtttttttgttagttagtttgtttgtttggtttttgagatggagtctcgctctgttgcccaggctggagtgcagtggtgcgatcttggctcactgcaatctccacctcccgggttcaagcgattctcctgcctcagcctccagagtagctgggacaacaggcgcgtgccaccacgcctggctaatttttgtatttttagtagatacagggtttcgccatgttagcgaggatggtctcgaacttctgatttgaagtgatccacctgcctcggcctcccaaagtgctggaattacaggcacaagccactgcacccagcctactgaagtaattagttaaaatgacgtcatgaggttaggtcccaatccaatgtgaccagtgtctttataaaaggaggaaatagagacgaacctgcacacacggagaatgtcatgtgaggatcgaagcagagtttgcagtgatgcacctacaagccaaggaatgtcaaggattgccggcaaccgcagctaggagaaagtcattggtcagattctctcccacagcctcagaaggaaccagtgctgcctgcaccttgatctcagacttgtggcctccagaattgtgagacaatacatttctgttgtttcagacacccggtctggggcactttgttattgcagtcctagctaattaatatatcagtcataccagtgtctgttttttttgttgtttttttctttttctttttttttctttgagacagagtctcactctgtcacccaggctggagtgcagtggcacaatcttggctcactgcaacctctgcctcccgggttcaagtgattctcctgcctcagcctcctgagtagctggaattacaggtgccctccaaccacgcctgactaaattttgtatttttaatagagacgaggtttcactatgttggccaggctggtctcgaactcctgacctcaagtgatctgccggcgtcggcctcccaaaagtgttgggattacaggcatgaaccagcctgctgtctgttgatgactatctgaacatacatctccagtccttgggtcctactactggcaccaagccaagagcctttagaagcccatctatgaggcccatgtctagtcaaggggaaaaagtagcatcccggccgggcgcggtggctcatgcctgtaatcccagcactttgggaagccgaggcaggcggatcacaaggtgaggagatcgagaccatcttagccaacatggtgaaactcatctctactaaaaatacaaaaattagctgggtgtggtggtgcccacctgtaatccccgctacttgagaggctgaggcaggggaatcacatgatcccaggaggtggaggttgcggtgagctcgcatgatcccaggaggcggaggctgcagtgaactgagattgtgccactgcactccagcctggagatagagcaagactccatctcaaaaaaaaaaaaaaaaagtagcatcccatcataggtggatgtgcaatttccttccaacacagctgcctactctaccattgccatctaccacctccccagtagaccaggttcagttgaacaaacgcaaggttacacacccaattctccaagagggtctcttggactttctctcacttgcccgttactgggtggtagtgagaaacacacaacaaaccaacaactgtctccagaggaaaccctgttctcttctttctcagtgtcaacccttactcatccccaaaagaagtgatagatacaggaccccaaaactggttttgaattggtccctttgctagttccatttggctgatctgggtgatgtcgctgtgacaggcaaccccctcaacaaccccctcaacaacctcaatggcttaacacaacacaagtgtgtttcttactcatgttgtgtgtctggcattgggggagaggggctacttcttcacatttgctccaccatttttgtgacaggacaatggacgatggggaattatgcaccgggtcttaaatcttctccccatgaacgacacacataactcacttcttatgtttcattggccaaagcatacatagtccactgcatgtacattttacctttaaaaaaatctccgtaaataatattaaatatgtgactcttgttaatgatttacatgcaagggtgtttaagggtaaatggatgaatagctttggctcacttggaaatgcatcaaaaaatcagatggagccaggcgcggtggctcatgcctgtaatcccggcactttgggaggccgaggcaggtggatcacttgacgtcaggagttcgagaccagcctgggctacatggtgaaaccccatctctactaaaaatacaaaaattagccagatgtggtggcgggtgcctgtaatcccagctactcggcaggttgaggcagaagaatcgcttgaacctgggaggtgtaggtcggggtgagccaagatcacgccactgcactccagcctgggcaaaagagtgagactccgtctcaaaaaataataataggccaggcgcggtggctcatgcctgtaatcccagcactttgggaggccaaggcgggcggatcacctgaagtcgggagttcgagaccagcctgaccaacatggagaaactccatctctactaaaaatataaaattagcgaggcgtggtggtgcatgcctgtaatcccagctactcgggaggctgaggcaggaaaaacgcttgaacccgggaggcggaggttgcagtgagccaagatcgtgccattgtactccaacctgggcaagaaaagcaaagctccgtctcaaaaacaaaaacaaaacaaaacaaaataataataaaaaaaataagatggggccaggtgcggtggctcatgcctgtaatcccagcactttgagaaactaagggaggaggattgtttgagcccaggagtttgagatcagcctcggaaacacagtagaaccccatctctacaaaacattaaaaaataaattagctaggcatggtggtgtttgcctgtagttccagttatttgggaggctgaggtgggaggatggcttgagcctaggaggtcaaggttgcagtgagctgtgattgtgccagtgcactccagcctgctgacagagcaagaccgtgtctccagaaaaaaagaaagaaagaaaaaaaaaatggacataacaaagacagcaggatagatgtgtgataaaatatggtaaaacgctagcagttgtagaatctaggtgttggataagaaagtatttggtatacaatccttttgactattaaaatttggcggggcggggaatgaaaaaataaataaagagaaaggaagcttgtcttgccagtgttgaccacataacttcaccctagaaggggattaattcaactctcagcaccttaggtccaaaaagacaccaaccgccccccgtccaaagttattaaataaataaaaacatttgccacccaactctggtgactatttgcagttactcccaggctgtggaccacctgtcgagatggagaagtccttctgaggctatccaaacacggaccaggccatgagaccccgatgaccatccctgaattttttcgagagtcagtcaaccgatttggaacttatccagccctcgcatccaagaatggcaaaaagtgggaaattctgaatttcaaccagtactatgaggcttgtcggaaggctgcaaaatccttgatcaaggtaagattcattcattcattctcctttgttcaaccattcattctgaataggtaacagacatacatacatgtggtacaaaattcacaaggcaccaaaagatacaaaggttaattggcgaaaatttccctctgattcatgagcctcagccactcagttcctctctgtggaagcggtcaccattgtcagttttttgtgtgtccttttgggaaataaattatgcataaatataaaatgaaatttttatatatgcaaattttttacacacataatagcctactacacccatggttctgcatcttgcatttgtccctaacatactatctctatgtttttgttagttgctgctgcataacaaattatcccaaaatatagtgacttgaaatgacaaacatttatcatctcacagtttctgtggattgagaatttaggagctactttgaaattgggttcttctggctccaggtctctcatgaggttgcagccaagctatcagctggggctatctcatctgaaggctcaactggggctggaggcttcacttccaagcttacttacctagatgactggttgttggcaggaagtctcagctcctcattccatggccttctccacagaattgcttgagtgtcttcacggcatggttgccagtcacccctagaatgaatgaagcaaaagaaagagggaacaaggctggggtcagtggctcatgtctgtaatcctagtgctttgggacatcgaggcaggaggatcactgagcccaggagttcaagaccagcctgggtaacatagtgagaccccagtctcaatgaaaaatttaaaaagtagccagatgcagtggcacatgcctgtagtcccagctatcaggaggctgaggtgggaggatcacttgagcctcggaggtcgaggctgcaatgacctgtgattgcaccattgcactctagctgggcaacagagtgagatggtgtcataaagaaaaaaaaaaaaaaagagaaccatgtgcttgggctgggtttcttcttgggggccccaccttcatactatgttgctgtggctagttcatctctcctgaaagatggtctcctttagccatgttcttagttccgtggagttaaaggtccccctcctcccgtaaatcttggacacctgactgagcacggtggctcatgcctgtaatcccagcactttgggaggccaaggtgggcggatcaaggtcaagaggtcaagagtttgagaccagcctggcccacatggtgaaaccccatctacactaaaaatacaaaaattagccaggtgtggtggtgcacacctgtaatcccagctactcaggaagctgaggcaggagaatcgcttgaacccgggaggcagaggttgcagtgagccgagattgtgccactgcactccagcctgggtgaaactccatctcaaaaaacaaacaaacaaacaaaacttggagaccgaagtagaaacaaaaccaaaaataaaaacaaacaaaactacttggagacccaagtagaaattagtcggtgtaactaggcattaataaaaacacactctgtccacaataaagccagccttttggttactgaaatacttggcatctcattctgaaggaccagcaggcaaatgccttccaaatggttccttttcccccaagaacagcagatcattgccagccgtgatcccgtatgactaaaagagccaacaacgttggttggcagtacccagaacaaagagggagttttcccctaaggatgctcacttttgtttctgagtttcctggttcattctcacccacattcagaacaagtctgtacctttacatgtgcaacttttttttttttttttttttttagacagagtctcactctgttgcccaggctggagtgcagtggcacgatcttggctcactgcagcctcagcctccaggttcaagcaattctcctgcctcagcttcccaagtagctgggactacaggcaggtgctgccacgcccggctaattttttgtatatttagtagagacggggtttcatcttgtgggccaggctggtctcgaacttctgacctgaagagatccacgtgccttggcctcccaaagtgctgggattacaggtgtgagccaccacacctggcctcaagagatccacccacctcggcctcccaaagtgctgggattacaggcgtgagccaccacacctggcctcaagagatccacctacctcggcctcccaaagtgctgggattacaggcgtgagccaccacgcctgtaattttttttaaattagactcagtggagcaggcccatagtcccagctactcgggagggtgaggcgggaggattgctggagcctgggaagttgaagctgcagtgagctatgatcacccactgcactccagcctgggtgacagagcgagacaaaaaataataataataaaataaaataaaataaaataaattcacacctttcaagatagctattctttaaaaaatagcaaaacacaacacgtgttggggaggatatggagaagctggaacccttgtgcagtgctggtggaaatgtaaaatggtgccgccactgtggaaaagtctggcgatttctaaaaaaagaaaaaatgtaaacagagaattgccatatgattcagcagtctcactcctggatatttaacaaaaaaaaaaaaaaaaaaggaaagccagagacatgaagagttatttgtagactcagggtcatagcggcgttattcacaagagacagagggtggaagcagcccgtgtgtccatcaatggaagaatggataaacacgatgtggtccgcccatacaagggaatatgattcagccacaaaaaggaaggaaattctgacacatgctacaacatggatgaatcttgaggacatcatactcggtgaaataagccagacacaaaagggcaaatcccgtatggtttctttcctaggaggtccctagagtcgttagactcatagagacagaaagtagaatgggaggtgccaggggctggggaaggggatagagagtgagtgttttatacagagagtttcagtttagaaagaggagaaagttctagagatgaacagtggtgacggttgtacaaccatgtggatgtgtttaatgccactaaactacactcttaaaaatggtcaaaacgggctgcgtgtggtggattacaggcgtgagcactttgggaggctgaggcgggaggattgcttgaggtcaggggttcgagaccagcctggccaacatggtgaaacgctgactctactaaaaaaacaaaaattagccaggcgtggtggcgcgtgtctgtaattccagctacttcggaggctgaggcaggagaatcgcttgaacccaggagacggaggttgcagtgagccgagatcgcactgctggactccagccttggcaacagagtgagactctgtctcaaaaaaaaaaaaaaaagaaaatggtaaaatccatgttatagatattttaccacaataaatgaaacaaaacataaaaataaaaataataaatggtgtgttatgtagagggaggtaaacaaacctcccgtagtcataaaaattaaaaatattacacctcagattttaggctcaatgctgtctcccaccccgtgtggctacttttgttttgttttgaaacagggtctcaatctgttgcccaggatggagtgcagtggtgcaatcatagctcactgcagcctcgaactctagggctcaagtgatcctcctgcctcagctacccaagtagccgggacgacaagtgtgtaccaccatgcccggcgaacttttccactttttttgtaaagacaggggtctcactgtgttgcccaggctggtctcgaacttctggcctcaagcaattctcccacctcaacctcccaaagtgctaggattacaggtgtgagccactgcgcctggcctccatgtgactacctttgattctgtcgtcacatatcctaatgatataacatctctgtgtttatgttttgtttttctgtttgctttttccttcccagctgggtttggagcgtttccacggagttggtatcctggggtttaactctgcagagtggtttatcactgctgttggtgccatcctagccgggtaaggtcattggcttggttcatggtgagggttaaggagccgctaccctgggcctgggacccctgggcttgtccagtgtgagatgcaaacaggaattttggatgaacgccctagttagcaggcaggatagatgcacgaacaaatcattctgatcacaggtcatacgcaataacacccattagactagcagtctcagacctctcgattttcttcagctgaagaactttttgcagacaaaataataattgtagatagcatttagaggtttctgattatgtgcagaagcattgtgctccacgtgtatgatcctgtaaaacctcacgacagcaatgtgaagtgggtcctatcatcccctatctacagatgaggaaactgaggctcacacagccagtgggcagccttgaagtcttgggctcatgcgatcctcccaactcggcctccagggtaactgggactatgagcacacaccaccacacccagctaattttttttttttttttttttttgagacggagtctcgctctgtcgcccaggccggactgcggactgcagtggcgcaatctcggctcactgcaagctccgcttcccgggttcacgccattctcctgcctcaggctcccgagtagctgggactacaggcgcccgccaccgcgcccggctaattttttgtatttttagtagagacggggtttcaccttgttagccaggatggtctcgatctcctgacctcatgatccacccgcctcggcctcccaatttttttttttttttttttgtagagatggtttcttgctatgttgcccaggctgtaatcgtgaaaaaaacaaaagtaaaaataaaatactgatttcttcttgagcttgtaattctacctttgggagttttacttaaagaaacaaaaccaaaacatgaatatattttggcttatgcacaaagatacttcttggaagtgttattagtgatggcaaaaagtcggggacaacctaagtgtcccacagctgtggattaaaccatgagatgccttctggatgggattctcggtaatattttgaaatgatggctctgaagagcacattttaagcatttttgatgtcagaggtgacaaagcaggtatcaaaatctttatacactgtatggttacaactatgcttaaaatttaaatatcaggccgggtgtggtggctcacgcctgtaatcccagcactgtgggaggccaaggcaggcggatcacaaggtcaggagatccagaccatcctggctaacatgctgaaaccccatctctactaaaaataccaaaaaaatcagccaggcgtggtggcaggtgcctgttagtcccagctacgcgggaggctgaggcaggagaatggcgtgaacccaggaggccgagcctgcagtgagccgagatcgcgccactgcactccagcctgggcgacagagcgagactccatctcaaaaaaacaaaacaaaacaaaaaaatttaaaataccaaccattaatataccaattattgctggtcactcttacctatatgatatcattgactgctcatggtagccctttgaggtaggtgccatcatgatcccaagtaataatgatggtgacgataatctgggaccaatagaggttaagtgtcttccccagaatcatgctgtggttggataaagaccctgagatctgaactcgtttgttcgactcaagattaataataacaacagcaacgacagcagcagcagcagccacggccatgacaaaattgagcggctgggcacagtgactcatgcctgtaatctcagcactttgggaggctgagatgggaagactgccttagcccaagagttcaagaccagcctggacaacatcgcaagattctgtctctaaaaaataaaataaaagtgtttttaaaattagccaggcatggtggtgtgtgcctgtagtcccaactacttgggaggcagaggtgggaggatggcttcagcccaagaagttgagactgcagtgaattatgatcataccactgcactccagcctgggcaacagagtgagaccctgtctggaaaataaaagtaaagaaaagaaaagaaaagaaaaggaaaagaaaaaagaaaagaaggaaaagaaaaaagaaaagaaaagaaggaaggaaggaaaagaaaagagaaaagagagagaaaaaaattgagggtggtgactagaaataaatattaacattagttatatctcatcatcgagactaacaccaccctaatatgttatattctattttccaaatttttatgagcatatactacccctgtcttacagtgagttgaaatatatatatattttgaggccgggtgcagtggctcatgcctgtaattccaacactttgggagtggaacacctgaggtcgggagtttgagaccagcctgaccagcatgtagaaactctatctctactaaaaaaaaccccaaaaaattagccaggcgtagtggcacatgcctgtaatcccagctacttggagggctgaggcaggagaatcacttgaacccgggacgcagaggttgcagtgagccgagatcatgccattgcaatccagcttgggcaacaagagcaaaactccgtctcaaaaagagagagagagagagagagagagagagagaaaattattattatatatataaaatatataatacatataataaataatatataatacatataataatatataatatattatattatctatatagagagaggtggagtctcactctgttgcccaggctgcagtgcagtggtgtgatcttggctcactgcaacatctgcctcccgggttcaagtgattctcctgcctcagcctcccaagtagctgggactacaggcgtgcgccaccatggctggctaaattttgtatttttggtaaagatggggtttctccatgttggccaggctggtctcaaactcctgacctcaggtaatccacctgcctcagcctcccaaagtgctgggattacaggtgtgagccactgtgcccagcccagaataaattttaatgaagagatctgtccccattttaggactgaatggtaagacagtgtcatgcagtgattgggctctggtgccacatcagacccaaattcaaatcttgggttgtctgctattttgtattctgtatgaatgagcaggaaagcacacatctccatgcctcacagggctgttataaagattcaataagaggatgcttcataaacccttagcacagtgcttagcaaatagtatgtgcttaagaatggtgatgagagtaaccatctcaaataattataatgtgcctcattccctgccatattaaaagcacaacaactagatcaacagagcagagagcccagaaatagctccatgcatacatggtcactggcttccaacaaaggcagcagagtagttcagtggtgctggaccaactggatatttgtatggaaaaataaatcagccctgatccctacctcacatcatatgcaaaaattaaattgagatggattacagactaaatcatgcaagttaaattctaaagcttctagaaaaagaaaagcacggaatggtttcacaacctgggggtagtcaaagatttcttagacaggacacagagagcaaaaagcataagagaaaaagttgccaaataggactttattagcattaaaaacttctgcttattaaaagacaccaacaagatgaacagttgtcgaacatggtggctcacgcctggaatcccagcactttgggaggcaggggtgggtgggtcactggagtccaggagtttgagaccagcctgggcaacatggtgaaacaccttctctacaaaaaatacaaaaattagccaggtgtggtggtgcatacctgtaatcccagctactcaggaggctgaggcatgagaattgcttgaatccaggaggttgaggttgcagtgagctgagattgcaccactgcaggccagcctgggtgaccgagctagaccctgtctcaaaaaaaaaaaaaaaaaaatggtgaacaggcaaactgcatacttggagaaaatattcttaaaactcgaatttctaacaaaggactggtatctaagatagataaagaaattctgtaactcagtaataaaaaggcaaaaaaaaaaaaaattgaaaggggcaaaagatttcaacagaaatgccacaaaggaaagtagccaaaaggcacatgtaaaggtgctcaatgtcattatccattgggaaatgcaaattaaaagcaaaagaggatgcaccctgcaagcacaaaaggctgtgaatgatgggaacagaggctgagtcaggagttcagatcctaggtctaacacctacttgctgtgtaatcttgagtgacttcactgctgggcccctgtttttctcatctataaaatgcggtgttctaagtgttccatgacctgttgtcatagtgacatcataggagctgtcacttatcatcattgtcatttttgttgtcttcatcattgttaagttggggaggaagggaagctggtgctgtggctgcaaacttaagaacttgcctgcaaacctttcctctcttttgaccttccagaccattctgcctttaaggtgtgtgtggatgcacacacgaatttgttttcttttcccaggggtctttgtgttggtatttatgccaccaactctgccgaggtttgtcaatatgtcatcactcatgccaaagtgaacatcttgctggttgagaatgatcaacagttacagaaaatcctttcggtaaacccctacccagcactgcctgccaaagtcacccaggggtacctcagggctctgggcaggtgttctttttttcccaggtaaattctaatgataagatagggccatgcatctgttcagcgagtcctccatgacctcattagtatatgtggtgaagctatttttggagaagcagactgaaatagaggagtttgatttccaattcatattaacttagtttaatactcagcctccatttttttttttttttcgagacagggtctcactctgtccccaggctggagtgcaatgtcgtgattgtagctcactgtagccttgaactcctggtctcaactgatccttctgcctcagtcctccaagtagctgggactacgagcgtgtaccaccatgtcaggctaactttttttttttccgagacagagtctcgctctgtcgcccaagctggagtgcagtgggctgaactcggctcactgcaagctctgcctcctgggttcatgccattctcctgcctcagcctcccaagtagctgggactacaagtgcccaccatcacgcctggctaatttttttgtatgttttagtagaaacggggtttcaccgtgttagccaggatggtcttgatctcctgacctcgtgatccgcccgccttggcctcccaaagtgctgggattacaggcgtgagccaccgccccgagcccgggctaacttttaaaacattttttgggccaggtgtggtggttcatgcttgtaatccgggcactttgggaggccaaggcaggcagaacacctgaggtcaggagtttgagaccagtgtggccaacatggtgaaactccatctctaccaaaaaatacaaaatttagccgggtgtggtggcatgcacctgtagtcccagctactggggaggctgaggctgaggtggcaggatcgcttgaacctgggaggtggaggttgcagtgagccaagactgagccactgcactccagcctgggtgacagagagagaccctgtctcaaaacaaacaaacaaacaaaaaccattttttttttgtagagacagagtcttgctatgttgcccaggctgctgttgaacttctggcctcaattgatcttcctgcctcagcctcccaaagtgctgggattataggcatgagcccccatgcccaaccttaagcccccacttaagtaaaagtattaatatatttatgtattattttatatacatcccactgctaattattttttcttttagaagtgtgatgatttcaagcccatgctactatataattttcttcatttcttgtcattgtcttcatttctagatgcttttgttgttctcttctatttcttgcctaagttctatcccttcctgtttcatttttttctagtgtcctgctgtctcttccctgagtgcttgtatgtttgctttgtgttcttcctttctagctgtgtttgcttcattacatttttagttttatgttggaatgtttggttacaattttctttttttttctttttttttttttgagacagagtctcgctctgtcgcccaggttggagtgcagtggcacaatctcagctcactgcaacctctgcctcccaggttcacgtcattctcctgcctcagcctcccgagtagctgggactacaggtgcctgccaccatgtccagctaattttttgtatttttttagtagagacagggtttcaccatgttagccaggatggtctcgatctcctgacctcgtgatctgcccgcctcggtctcccaaagtgctgggattacaggcatgagatactgcacctggccttggttacaattttcttttgcattgtgttgaaattatccagtgagttttatttgtgtacagtgaaatttagctgctgtcttacgtttttttttttttttcattgtagtgtctttgtatggctattgtcgaaactttaaatttcctacatgtttgaatgagctgcagtttgctgtatcagcttttggcaggagggtcctggagaggaggggagtccctgggaggggtgagcctagatggctaggttcatttcagctcaaggaccactgtgactgtttcttgaatacatgatttcatgactctgagtcactcatttcttcactttttcacatctctggagtcgagatgtgtcttttcattgatggcattctctgatcactactggccatatgttttctcacattttattctctccgaaatttgggtacagtttccagattcaatgaaatcctagctagactcagtgaaatacaacactttctcctgcctggcttcctttgactcctaattcctgacttggttcaggaaggacagacctccacctctggcctagagcttttaaaaattcttttcttttttctttttcttttcttttctttttttgtttgtttttttctttttttgagactgtctcactttgtcgtccagtctggagagcagtggcgccatcttggctcactgcaacctccacctcccaggttcaagtgattctcatgcttcagtctcccaagtagctgggactacaggtgcacaccaccacaccgggctaatttttgcattttttgtcaagactggatttcgccatgttagccagactgctcttgaactcctggcctcaagtgatccaatggccttggcctcccaaagtgctgggattacaggcatgaaccactgctcacaaaattactttcttaagtgatgcatcggtggttcccaaaactcatgtcatacctgtttgtcctcttcctagcagaacacactatggggtgggtgctggtgggtgggtggggtccttcttccagctgggaatgctggcttaatttgagttttccataactggaaaatgccacatacacaaccttcccctctacacccacctggctgctgtggatttctgtcctggttctagcaggtccagcattaagtgaataaagcaatatctgaattatttctgactcctagtttcattgaaggtgaagtctgtggaggatttattgttccagttgctaggtctagaagattcaaaaccaggttcctgacatgcttctcccaaattggatgcccagctccacttggagatctttatttgggggagtaatcacagatcctcctctgcttataatcctctaattctctagcggttttctgttggagttaaataaactccaaactcctcatctttgcctccaaggctccgctgatctgggcctcaccattctttcatgccccctcccctatcatactctcttgggtccccactctggccatcctggactttttgtatccctcagacatcccaagctgttgcctgccccaggctccttgaatgtctgtttcttcttctctctggaaaactcctgtccagctgctatacgggcttctgccatcttttctctccaatgcatgccagaggcgtggttatgattagcaaaatggatgttgcaagtaactttttcattggattggctagaagtgtcatagagagaccccatcccgctttctttggcatgaacagagtataaaaatctcgcaggggccgggcgtggtggctcatgcctgtaatcccagcactttgggaggctgaggtgggcggatcacgaggtcaggagatcgagaccatcctggctaacacagtgaaaccccatctctactaaaactacaaaaaattagccaagcatggtggcgggcgcctgtagtcccagctactcgggaggctgaggcaggagaatggcatgaacccaggaggcggagcttggagtgagctgagatagcgccactgcactctagcctaggtgactgagtgagactccgtctcaaaaaaaaaaaaaaagaaagaaagaaaagaaaaaagaatcccgcaggtcacctgaaccttaccgtgctaggtatgggtagagggctctgcacttgtccaggttccagccaacttcatgaaggatttttattgcctgactccgagtaaaaggttagctaaatctgggctgcaaggtgcaaagtcctggaaaaggaagagccatgagggacttcttttagctcatcaaccaagatccacaattctgtgtagcataatttggtcagagatgtgttgtctcgggcagactattgtcatcctctaccgacactgttggaagctactgatatggactacaaagaatccaggagtcctgaaaccaagtcatttggagtcagtcaagaccaatagcagcattttatagtgtgggcaggggaagaaaagaggctggaggctgggcacagtggctcacgcctgtaatcccagcactttgggaggccgaggcggggggatcacctggggtcaggagttcgagaccagcctggccaatacggtgaaaccccggctctactaaaaatacaaaaattagctgggcatggtggcacatgcctgcaatcccagatactcaggaggctgaggtgggagaatggcttcaacccgggaggcggaggttgcagtgagccgagattgggccaatgcactccagcctgggcgacagagcaagactgtgtctcaaaaaaaaaaaaagaggctagagttgctggagagagcttacttaggacatctaacccagctttagtctttcccagggctgggttgccatgaagcccacagggaactttctttcagattccacagagcagcctagagcccctaaaagcgatcatccagtacagactgccaatgaagaagaacaacaacttgtactctgtaagtgtgggaggtgggcactggggaaaggggagggcggggccttgcaagaaaagtgggcgtggcctaagtggaaggtgagcagagggaggaggtcggacctggcaagggtgggaactctcaaaggaagtaggtggggactctcaaaggaagtgaaaggtgaggaaaggaagtgggtggggccttgtgaggaaagtgggtgtgacctttcaaaggacgtgaaatgtgagcagagggagggggtgtgaccttacaagggaagtgggtgtggcctttcaaagaaagtgggaggtaagcagagatggaatggggcctcacaaatgtggtaggtgggggtttgcaaagggatgtgggtggggcttcataaatgtagtgggtggggctttgcaaagggaagtggatgtggcctttgcaaagggaaatgggaggtgagcaatgcgtgggggcctagcaaaaggacgtaggcgggacctttgggacgcatttttcccttctggcatgaagggactgattaatgaacagtgtctgttctggctaattactgctgggcaacaaatcaccaccaaaactggtggctaaaaaaaatcagtcattttgttattaattttttcccaagaacattaagataattaaacaatatactaaaaagttgaaaattatgttaaaactaacaacattaagtttaaatattttatttatacccaagccaaaatttgttataacaatgactaagacaaccaattagaattgcagacttctcaggagatcgagaccatcctggtcaacatggtgaaacaccgtctctactaaaaatacaaaaattagctgggcatggtggtacgtgcctgtagtcccagctactcaggaggttgaggcaggagaatcgcttgaacccgggaggcggaggttccagtgagccgagatcacaccactgcactccagcctggcaacagagtgagactctgtctcaaaaaaaaaaaaaaaaaaaggccgggcgccagtggctcacacctgtaatcccagcactttgggaggccgaggcaggcggatcacgaggtcagaagatcgagaccatcctggctaacacggtgaaaccccgtctctattgaaaatacaaaaaaattatccaggcgtggtggtgggcgcctgtagtcccagctactcgggaggctgagacaggagaatggcgtgaacccaggaggcggagcttgcagtgagctgagatcgcgccactgcactccagcctgggcaacagagcaagactccgtctcaaaaaaaaaaaaaaaaaaaaaattacaaactttttagaggttcaaagtgaccactacagcaacagtcttaagtctcggataacttaaaagactactttgttagcaataacacttacagcagggtttctcaacctccttgctgttgacatttggggcaggtaattctctaaggagctgtccgacgccctgtaggatgttgagctgcattgctggcctccactcactggatgccaggaatatatcccctgcctcccacttgaaacaaccaaaagtgtctccagacactgcctaatataccctggtggggggagggtgggcggtggtggagtagtatcacccctggttgaagacgctaatttataggggagagtcacatagaagggcatctactcctctgcaagggagagtagaacctaccattttaagattctgtttaggctgggcacagtagctcatgcctgtaattgggaggctgaggtggacaaataacctgaggtcaagagttcgagactagcctggccaacatggagaaaccctgtctctactaaaaatacaaataataataataataataataataataataataataataataatcgcccaagcacagtggctcacacctgtaatcccagcactttgggaggctgaggcgggcagatcatgaggtcaggaggtacagaccatcctggccaacatggtgaaaccccgtctctactaaaaaatacaaaaaattagctgggcatggtggcatgcgcctgtagtcccagctgctcaggaggctgaggcaggggaatcacttgaacccgggaagcggaggttgcagtgagccgagatagtgccactgcactcaagcctggcgaaagagcgagactccatctaaaaaaaaaaaggctgggtgtggtggctcatgcctgtaatcccagcactttgggaagccgaggtgggtggataacctgaggtcaggagttcgagaccatcctgaccaatatggtgaaaccccacctctactaaaaatacaaaaattagccgggcgtggtggcacgcacctgtagtctcagctactcaggaggctgagagaggagaatcacttgatcccaagaggcagaggttgcagtgagccaagagcagtgagcggagatcacgccactgcactccagcctgggcgacagagcaagactctgtctccaaataaacaaataaataaaataaaatacaaaaaaaaaaaaaaaaaacagccaggcgtggtggtgcatgcctgtccaagctactcgggaggctaaagaggatcacttgaacctgggaggtggaggttgcagtgagctgagatcacgccattgcactccagcctgggtgacagagcaagactcttgtctcaaaagaaaaaagaaagaaagaaagaaaaagatttagtttaggacccagaaatgagcaaaaacgaatgagactgagaaagtggactgtgacatttgggaaggaaaatggccgagtaagacaatgaactgtgccagttgtgatgcttggcatctgtgtgcccaacagactgaggaccaacccagatctccaagacaggggattggattggaccagcatgggtctggtgcccatcccaatccagtcatttgtggctgtggaagccgggggtcttctaccggcctttgaaggaacaccctttgtagggagacctaggggcatctctgagaaaggacaggttcccccagagggcttgtgtgtgctcttcctctcacccttgccctaccttgttacagattatctgggcaaagggctttgcctgctcagatgaagccagcatcaccctgggcaggtttcaggcaacactggccatctgtagaggactttgaggggccttttttttttttttttgagatggagtttcactctgttgcccaggctggagtgcagtggcgtgatcttggctcactgcaatctccacctccccatttcaagcgattctcctgcctcagcatcctgaggagctgggattacaggcgcctgccaccacacccggctaatttttgtatttttagtagagatggggtttcaccatgctggccatgttggtcttgaactcctgacctcgtgatccgcccacctcagcctcccagtgctgggattacaggtgtgagccaccgtgcctggccgaggggcctccatctttaagtcagcgcatcaccctcatccagtgctttgttgggggttcaatggtagaatttctgcagatcccatgtgatgctcagtcgatacaacccaagagttcactttgcggcaccgaattctgtcatagttaagagcacaggctctggagtcagaccttgggtttgaatgctagctcctctcttcacttgccttaagtaatctgccttgggcaagtaatctaccacccctgagcctcagcttcttcacctgccagagtgaggcaatgcatcaattatcaataaggatgcctttggtcgtaagtgacaaaagtctgaccccaaatggcttaagcaacaaacaaacaaaaagataatctgttggaccatgcaactacagttcagggcgtggatttcaggcatggctggaaccaggggctcaaagaatgtgcccaggctctattttcctttctctatttcttggctccgctccagccttgctttctcacatagtcctgagatggttcagcagctcctagagctacatcttgactcattcacatacacagtctgtgtctcagaattcccaggtaaagtcttcatcttcattatgattggaccacttgaggtcacatgtccagacttgatccaatcaccataacccaggctgatagaacagtttgagccaattagggttgacttccagatctgtgggtgaagtcagccccatccaattggtgactaagaagtagagtggggagtggaatttgggaaggcagcgaacaaataatacctaactccgtagaacacttaccacctgccaactactattctgagcactttgcatatattaactctcttactgcttagaacaacccaaggagttgcgtcctgacatcattcccattttacaaatgaggaaactgaggcacagggagcttaagtggcttggtgacgctgcgaggaagtggcagaactggaagcagagatcttgggacttttgtaagaggtgccaggactggcacatcctaagcccttccacctgctgaggatcattctttaggaaaagctgataggacgaggtctggctgggtgagaggactcccgactgccttctcatcctccgcttgtcttttctgtccacagtgggatgatttcatggaacttggcagaagtatccctgacacccaactggagcaggtcatcgagagccagaaggcgaatcaatgcgcagtgctcatctacacttcagggaccacaggcatacccaagggagtgatgctcagtcatgacaacgtacgccaaagtccctttgctctggagtggtggcctttgggctgtttctcttgttggcttccaggggcagggtggcattccagggtctagtacgcagtgtggctccttcaccattgggggttagagagtagcgtagttgcttcactagggggcagcagagtgcagtgattgagatcaaggaatgctggccatgtcaaaagcagaaaaatgtctggcagggtatgcacccagcagacaatgattcctctgtgtgagtcaggaaggttgtgtgtgtgtgtgtgtgtgtgtgtgtgtgtgtgtgtgtgtgtgtgtgtgttttgagatggggtctccctctgtcgcccaggctggagtgcagtggcgcaatcttggctcactgcaacctctgcctccgttcaagtgattttcctgcctcagcctcccaggtagctgggattacaggcacccgccaccatgcctggctaatttttgtatgtttattagagacagggtttcaccaagttggccaggctggtcttgaactcctgacctcaggtgatccaccgccttggcctcccaaagtgctgggattacaggcatgagccaccacgcccagcctactttatttttcagttgtgtgtgtgttttgttttgttttgctttttgagaccgagtctggctctgtgccccaggctggagtacagtggcactccactcactgcaaccactgcctcctgggttcaagcaattctcgtgcctcagcctcctgagtatctgggactacaagccagtgccaccacatccaactaattttttgtattttgggtagagatggagtttcaccacgttgaccaggctggtctcaaactcctgacctcaagtgatctgcctgcctcggcctcccaaagtgttgggattacaggcgtgagccacagcacctggtctgtttttacactgtttttagagatgggttcttaccatgttgcccaggctggagtgcagtgactactcacaggcacaatcatcatgcacttaagcttcagactcaacaggctcaagtgatccttctgcctcagcctcccaagtagctgggtctacaggtgcatgcaatcacacctggcctgctggtttttaaatgaagaatttctataaaagcattcttataaatgcttccctgccccccctcagcctagggtaatagttaccagcacacactggtgtctgaccacctcagtgttggaatcctggctttgctacttgtaagtaaccatgtaagctggtgtgacattggtcatatgacatcaccaaactgtgtgtcagtttgcccaactgtaaaatggggagagtagagggcccaattctggcagagggcctggcccatggaaggtcagcaatggaagattgcaaaagtcagcctccactcccttaatacactgtctcagctagtgctgtatagcaaggtgtggagctaggatcatccccctgggtctggaggtcccgatcctagatccacaccctggaaatcttctctgaatttctcattttaacatgaatccaaatcttttgccaacactgtctccttcagcagaactcctttcctcctcctgcatcttagctcaaggcctcttagaagttttctgatttttctacaactatggtttttactctcccacactgtctgtctgagcaatatcacgggcccaggactaaggtctatatgtaaattaaaacttggcttcctgtaaaatttgatgcataaatatattttgctataacaacaaggaaagcaggcttcaagtttggcaataaatcacgggagtacaaattaaaagttcagacattacagaagcccttggactcaattgtatgatgcatgatagagaaaaattatttttggcccagtctccatcatcgctcccctggacctgtgtggttgcttccaccccatccggttacccgcctcccacccaactcccaccctcacccccacccccagtctatcctctctacagccaccagagagtgcctgtgagcacctgagtcaagtcccaatcctcctctgtctgcagccctccatggctcccacttccctccaggtaaaagcccaagtctcctgaggcccacaaggcactgcaagcctagccccatctcccttctcctctcctctcctccctctctcccccttgctcactctgttctagccacatggtcctccttgctgttcctccaacacaccagacacgtcctgcctcttggtctttgcatgagctccgtgggaagtatttttccacacagcttgttccctcccctccttcgggtgggtctctgctcagtgtcacttcctcagtgaagccctccctaacttccatgtttgaaatagcaaacaataaaccaccccattactacctaattcccatttggctactttttttcttccttagaaaattttgacactgtcatattatatgctcatttgtttatcaggaacatcagctccttgaggtcaggggttttctgtcttattcactactgtaactgcagtgcctgatgagcaggaggactcaatccacttttgggaaatgaatgaatgagggaaatctgattaaacaggatattcccctctatgctggctagtatttatgctcctagtggctgcatgtgtggtaagacattctcctagcacaggcattatgagcatagatcctggagcaagactgcccactttttaaaggggctggtttttttcttattaagttccttatagattctgaatattagtccttttttatttttattttttttgaaacagagtcttgctctgtcatccaggctggagtacagtgacactatcgcggcacactgcaatgtccacctcccaggtttaaacaattctcctgcctcagcctcccaagcagctgggattacaggcacccaccaccacacctggctaatttttgtatttttagaagaggtggggcttcgctatgttgggcaggctggtctcgaactcctgacttcaagtgatccacccacctcagcctcccaaagtgttggaattacaggcgtgagccatggcgcctggccaatattagtcctttaattgatgcacagttgcaaatattttctcctattctgtaggttgtctttactctgttaattgtttcttttgctgtgcagaagctcttaagtcccaattgtccatgtttggttttgttgtatttgtttttgtggtcttagtcataaattctctgcctagcccaatgtccagaagaatttttcctaggttttcttctagtttcttcattcttctgcacatggctagccagttttcccagcaccacttagtgaataggatgtccttccccattgtttatttttgttgactttgtcaaaaatcagttggttgtgtgtggcttaatttttgagttctctattctgttccattgatctctgtgcctatttttgtaccagtaccatgctgttttagttactatagccttgtagtataatttgaagtcagataatgtgatgcctctagctgtgttctttttgcttaggattgctctatttgggctttctggttccatataaattttagaattgttttatataattatgtgaaaaatcatattggtaatttgataggaattgtgatgaatctgtagattgctttgggcagtatggtcatgttaacaatgttgattcttcctgtcaatgagcatggaatgcttttccatttgtgtcatctgtgatttctttcatcaatgttttgaaaagttattctcgtagaagtctttcatctccttggttaaatgtgtctgtgggtattttattttttgtgtagctactgtaaatgggattgaattcttgatttggttttcaactttaagaatattggtatatagaaatgctactgatttttgtacattgattttgtatcctgaaactttattgaagtcatttatctaggagtgttttggaggaatctttagggttttctagatgtagaatcatatcattggtgaacagagataatttgacttcctctgttcctattttcctattcatacatcttttatttcttgcttgtgcctgattgctctggctaggacttctagtactatgttgaatagcagtggtgaaagtggatatccttgtcttgtttcagttcttagagggaatgcttccaacttttccccttcagtatgatgtttgctgcaggtttgtcatagacagctcttattattttggggtatattccttgatgcctagtttgttgagggttcttatcataaagaatgttggattttgtcaaatgctttttctgcagccattgagatgatcatatggcttttgattttaattctgtgtatgtgatgaatcacatttattgatttgtgtatgttgaaccatccttgcatcccaggaataaagcccacttaaaaagtatctttattttcatttgtttcaaagattgtttttattgcttctttaatttgtttacccaaaagtcattaaggagcaagttgcttagtttccatgtatttgtgtggttttgagggttcctcttggtattgatttctaattgtattccactgtggtctgagaagatgcttggtatgattttgatttttttaaatttattaagactttcattgtggcctagcatgtggttaatcttagagaacgttccatgtgcagatgagaaaaatgtatattcagaggccactgggtagagtattctgaagatgtctattaggtccatttggtcaactgtccaatttagtctagtatttctttattttctgcctcaatgttctgtctgtcagtggggtgttgaagtccctcacaattattgtatggctatctcttaagtctagtagtacttgtcttataaatctgggggctctgatgttgggagggtggttagatcttctggttgaatttaaccctttatcattatataatgcctttctttgtctttttttttttcttaactgtcattagtttacaatctgttttattggataaaacagtagcaccctctcatcttatttgttttctgtttgcatgatagatctttctccatccctttactttgagcctctgagtgtcattacatgtgagatgggtctcttgaaggcagcagcaggttgggtcttatttattattattttttatcaaatttgtcactctatgtcttttaagtgctgtatttaggatgtttatgttcaaggttaatattgatatgtgaggttttgttcctgtcatgtgtttttgctttgtattcttgattgtttagttgctttatagggtctgtgggctttgtgcttacatgtacttttatggtagcaagtattgttcttttgttctcatgtttagaactcctttgggcatttcttttcgggctgatctagtgatgacaaattcctttacatttgcttatctgagaaatattttatttcccatttatgaaacttagtttagtgggatataaaattattggctggcatttatttttctttaagaaggctaaaaatgggccctcaatctcttctggcttgtgaggtttctgctaagaaatccactgtacgtctgatggaatttcctttatatgtaatttggcccttttctctagatgcctttaagatttattttttttctacattgaccttggtctgatgactatatgcctcgggggtggccatattgtgtagcatctcacaggagttctctggatttctcatatctagatgttgacctctctggcaagattaggtaaattttcctgtattactccctcaaatatgttttccaagttgcttaatttttcttcttttctctcaggaatgcatttaagtcacaggtttggttgctttacataatcccacatttctcaaatactttgggttttttatttcttttttctttacttttgtctgagttgtttgaaagaccattcttcaagctctgaaattctttcttctgcttggtctagtctaactatatttttaaatttctatagtgaaattttcaattccagaagttcaatttggttttttcttaatatatctatgttgtatttcatatattgaagtgttcttctagtttccttatattggtttccaactttctcttggatctcattaagtttccttccaattcatattttgaattctttatatgtcatttcaaacatttcagtctgatgaggacccattgctagagaactggtgagattctttggaggtgttgaaacactctggctttttctactgccagatttcttgcactgattccttcttatctgagggagctgtcacttcttgtttttgaatcttctattgtttggatggggcttttgtattttttaattctagtttcccttgagggtatggctgtggtgtatgttgtgtgtgattgtatggccttgcttctgagtgcttttgggggccaaaggtctgtatgggttccacggttgtggacagcttctgtgcagtggctaaggtctgtacgggttccatggttgtggacagcttctgtgcagtggctaaggtctgtatgggttccatggttgtggacagcttctatgcagtggctttctcagatgctgcttgttgtaatgatgtaatggacataacagccaacactatctcctgcaggactgagggtgtggaggtctcaggaggcttatctcatgcactgtcaataaacccttccagtagcaagatttttgtttggtggtgcagtgcaggatgcagtccagtagatcgcacttaaaagttagaaccagcaggtaggctggtgccaagtaggcatgcataccctgatggaggtagcaggaagagatcatgatggggtgcactgaggtctcaggggtaggggcagggaatgcaccagctccttgtcctcagccagcaggaatgcagtccgcttctctatcacacccctgtcatggggctcacaatcttctgtttataaaggcttcatcctttagttcctggcagcagtgtggggtgggagggcaggtgggaaatgaccccttctccatgtcttttcccaggcatgggtgctgcccactccagtggtttgtgccacacccacatttcctttgtcccaaggggggctttggtgggctgcattctcctcctcctttaggggttacccatgccaagggttagatcttcagggatcctgcggccccccagaggctcactggtcccttgtgcttgccaaagtcacagcgcgttgtggggtatgtttgtggggaatctggtggtgcagtgggtcaagggcagagaatccccaggcagggcagtggcaccacaggtgcacaaccagtgtggtgcctgctgtctcagttcaggtctgaggggagtgtgggcatgcctgtgtgaactgaccacctggttctctgtccctgggaagttctctaatcagcaccgatggtgttggcctgggttgcaagggcagaggagctccctgagagtttagtgaccaggatattgtcaaaggcgagtgggaagcaaagaagcactcccacctatcctttccatggggctctgagttcctcaggagctgatctttgacaggcccttgcagctttcctttcctacgccgcagcttcttcctgtgggcactccaagaggtcctgcctctccttcctccattttcagttcaaaacttatccatttaccagtaattttgatcttcttcctgaaaactgacatctgatgtccgttgtcagccatcacgtatcaatacactgttagcaagtggcagattctcattcatatccttctggttccaaaccacaaggctttccacaatagggaagatgacacttgtcagccacgctgagcccaagccacagggctctgggcagggtcatgctgtctgtgggtagcttacaggaccaacatgaggacatcactcttgaactattttttttttttttttttgagacagagtctgctctgtcgctcaggttggagagcagtggcacaatctcgactcactgcaacctctgcctcccaatttcaagcgattcccccacctcagcctcctgagtagcagggattacagacgtgtgccaacacacccatctaatttttgtattattagtagagatggggtttcaccacgttggccaggctggtctcgaactcctgacctcaggtgatccacccgccttggcctcccaaagtgctgggactacaaacatgagccaccacgcttggccatcactcttgaacttcttaacctggtggctgactctcccaacagcaagtggtcccaaagatttgtcagtcccagaatttccacagcatcccttctgctcctttctgtcagtcaaaacaaatcactggaccaattctgtctcaaaggaaagagaaacaaattccacctcagaatgggaggagtagcagagaatctgcagctctgtttaatctaccacatatacataaaatgcttagaacaatgcctggcatacaggaagccatgtcaaggatagctattaatattgtatttggctgggtgcagtggcttatgtatgtaatcccagcactttgggaggccgagacaggaggattgcttgaagccaggattgtttgagagaaggctgggaaacacagcaagacctcatctctacaaaaatgttttaaaaattagctgggcatggtggcacatgcctgtagtcccagctactcgggaggctgaagtgagacgatcccttgagcccaggagttcgaggctgcagtgagctatgatgctgccactgcactccagcctgggtgacagagtgaggccctgtctcatcatcatctttacagcaagaagttaaaggtagccttagattcttgccagatgtctacagctcagtgtttctcccgtgtagggaacactatgttcagtgctaagataaacacattttaactccccactaaaaccccacgaggaaaattttgtcactaacccttttacagatgagaaaactgaggctcagacagaggaaattacttggtcaagatcacagagcaagggaagctctgaactgagatctgaaccaggagtgtctaaaccattgtacatcatagactatacacaacaagccccttctctcaacaagtgtgctaggttccttgaaccctggactgtgcatgacaaggtttatgggagccttcatcctgagcccagggaaagaagtggaactagccttgagggatattttgggctgactgctttatgtcctttactgcagttaaccattccttctatttcctcattcattcaagaaaaattcattgagcacctagtatgtactggggaatattccaggagcaggggaaacagcagcaaacaagacagactcaatctggaccttgggaacagataagaaatgaacaaatgaaaacattcagtttgtgtgacatggtacgtacagacttaggcagtcaatggcactttcaccttagatggtgtgagatggcccttctaaggaagtgacatttcagctgagacttaatgttcaagaagtagccagccatgggggtgggggacggtgagggaaaaggctgaagaaagagcattccaagcagggggaatagccagtccaaaggccctgaggctggaccatgcctgatgcattggagcaacagcgaggaggtctgggtggctggattaatgaagtaactattcaccagagatttatgacactagtgagaaatataagtgacaaaattataggtacactaaaactttacatctacatatgcattggagaaagaaaaatgctaataatgctaattactggggtgtttatatgatgggattatgggtagcctttttgtttgtttgaccatgttggttccatagttctatattggacctgagaagcctctgtccccactttaaagaagaggcaataaaagccacgagggattttaaggaaatagcccaaatgtctagcaaacagtggagtcagggtttgactctgggacacttgctgaatccagttttctgagttctgtcgttggacccaaggaagtctgcaacctccctactcctaaagctgcctgctaaattttgcaactcctcctaacttcaggcaagttagttaaggactctgtgcttctgttttcacataattctccctgattaaaaaaaccgttagacctagggctttacccaaaaaaatctgtcgaatgattaacaaccatctactcacctgggctacccaagaggctgaagtgggggccccaggtccttactcgatcttaccttgagagcatctgcttgagcaaagtatgtgagcgccccaatctttatgggtacccagatgtccatcatctgtgctgcaatatggctgagtgggaggtagctgaccaccatctcatgcttgtctgtcagttgaaagtcctttgccactgctcctgccatccacgtgatctgtaacataagggacaatccaaggtgccttatactgacttatgaaaaaacaacacacacacacacacgcactcagccagactgcagcacagacaatggacatctgggtacccataaagatcggggcactcacatactttaggcttaagcacatgctctcaaggtaagatcgaataaggacctagggcccccacttcatcctcttgggcagcccagatgagtagatggttgttaatcattcgacagattttttgggtgaagctccaaaaattttgggagaattatagttaccaacccccaggtgttatgatgattaaatgacttggtgtttgtaaagtatgaagacagtgtcttggtcatagtaggtgctttataagtgtttacttaattagtttatttatttagctaaatacatttaaaatcgccctccaggctgggcatggtcgctcacatctgtaaacctagcactttgggaggctgaggcgggaggtcgctggaggccaggagtttgaggccaagctggaaaacatagtgagaccccctctctacaaaaaaagttaaaaaaaaattagctgggtgtggtggtgtgtgcctatagtaccagttactcaggaggctgagatgggaagattccttgaacccaggagtttgaggctgcagtgagctgtgatcacaccactgcactccagtctgggtgagccctgtctgaaaaataaataaaaatttaaaaataaaatggcccttctatgagggtgaggcaccttggattgtcccttatgttacagatcacgtggattgcaggagcagtgacaaaggactttaaactgacagacaagcatgagacggtggttagctacctcccactcagccatattgcagcacagatgatggacatctgggtacccataaagattggggcgctcacatactttgctcaagcagatgctctcaaggtaagattgagtaaggacctggggctccgacttcatcctcttgggcagcccaggtgagtagatggttgttaatcattcgacagattttttgggtgaagccccatgtctaacggttttatctctgccctcatcttaatgctctatttagaagcattaaaaacaagaccaggcacagtggctcaatctgtaatcccggcactctgggaggccaagacgggcagattgcttgagctcaggagttgagaccagcctgagcaagatggcgaaaccctatctctacaaaaaccaataataatagtaaatttttctaaaaaacaaaaaacacctgaccaaataaaacaacttttttttttttttaaccagctggctacattctcctagtttttatctttatccaagtcagggcatccatgtatggttatgtagattgaacactgaacaacccaagacaaagatgtacttggtactgaaagtaaagagtgtgtgtgtgtgtgtgtgtgtgtgtgtgtgtgtgtgtgtttataagtcagtattcccaaatctaaaaagctccaaaaaacaggagtttttggcagcaaagtctgatctgaattgataagatgttgtttgtggtcttcattttattccacttactgggattatgcatatatttgtagaatttttataccaccttttcttgacttataccctttaagtattatcttttgcctttctattgtggtgaggatttagctcccttcctctcccgtcttctcatttctccttccccattctctcaacataaattattcttagttaactgagccaagtagtttatcatatgattccacttcctgcttggtacaactttttgtttttcccagaattaagttgcctttcttttccagtttggtgaagtttttgcatacatgtccagttgctccatctgatctgtcacatgcttatcaatagtctccaaatgttcaaatattcattgcattattattattattattattatttgagatagagtcttgctctgttgcccaggctggagttacagtgccatgatctcggcccactgcaacctctgtcttccgggttcaagcaattctcgtgccttagcctcccaagtagctggaactgcaggcctgtgccaccatgcctggctgatttttgtatttttagtagagatggggtttcacaattttggccagactggtctcaaactcctgacctcaggtgagccttggcctcccaaagtgctgggattacaggcatgagccactgcacccagctccattgcattatttttttcctccatccttttgcacttagctggactgttgttttaggttgtcttaggttgggtaccctagaagcaaaatctgagttggagatctttgtgatttatcaatggggagctctcaggtgaaaaccaaaaggaagtgaggagagaaggataggctgggggaaaaaacaagaaaggacacacattcagctggattgtaacttcagactgatcccataggaagctctgaggcatgaacgacaccagagttgttccactttgaggcaaggaggctgtgcttttgtaaccccaactcagatagtcattggctgtgggctcaggcatccatgtgggatagggagcataacttcccagttatttctaagtaagggcggttttctggaaaagagggaactgtgggccactagagatctgataggacatcaacagcatcttctacaagctgccatacagggatatccctttttcccactcctgggttggatcccctattttctggggtctttgccttcttttttggattattccttgatttagctggatatcattcattggtaggttttgcaaagtagttatgtgaaagaacactttgatttcttttctaaatttttttttttttttttttttttagagacaaggtcgtgctctgttacccagcctggaatgcagtggcatgatcatagcttactgcagccttaaattcctgggctcaaaggatcctcccacctcagcctcccctgtagccagaactacaggcatgtgccaccatgcctgactaatttgttttacagtgattttctacatgtctagactttgcaaacggagccagaaaagaactctgacattttccccaagttacattctctgaattagtttcctgttaatgccacaacaaatgaacagaaacttagtgacttaaaacaatatttatttatttatttagaaatggagtctcgttctgtcacccaggctggagtgcagtggcagtggcatgatctcaactcactgcaacctccacctccgggttaaacgattctcatgtctcagtctcccaagccgggattacaggcgtgcaccaccacgcccagctaatttttgtatttttagtagagacgggatttcaccatgttggcaaggctggtcctgaactcttgaactcaagtgatctgcttgcctcagcctcccaaaatgctgggattacaggcataagcaagcgcgcctggtccatttattatcttatagttctggtggtcagaagtttgaaaatggtctcactgggctaaaatcaatatgtcatcagggctgcattccttctagaggctcttggggaccttttccagcttctagaggccacctatgttccttatctcagggccccttcctccatcttcacagccagcagtgcagcctcttcccctctcctgcttccctcttataaggaccctgtgatgacattgggccacccagatcatccaggatgatctcccatctcaagattcttaacttaatcccatctacaaagtcccttttgccatgaaagattacatattcacaggtcccaggagttagaacgtggacatctttagggggccattattttgcctcccacactctccatcaagcaggctaaatcttagggcctttgcacgtgcttctagaaggttctttctcttgttctttgcagggctgactcttctttgtcacttagctctctgctaaatatttccttggcccctctcaatccctctcatatgccccatgctcagtgcctgagatgtgttaggtcttcaatacatatttcctttcttggctgaatacataatacatacacatttacctacaggacctgagaagttcccattttcccacatccttaccaactcctaatattgtcaaaatgtttacaacttgtcaatctgaatagtgacaaaagtgtcttaatattttcagaaatttccagattgttttctgaagtacgtgcaccagaaatgtgcgaaggttacagtttctctacatcttcactaacgcatgttactatctgttttattattattattgccattctaatttgcatttccttggtgattaatgatagtgagcatctcttcatgtgtttattgaccatttacatatcttctttggaaaaagaaatctgttcaaatagtttgcccatataaaaatgtggttgctctttctgtgctagcatgactagtaaaaagaaaagtaaaagccaggcacggcggctcacgcctgtaatcccagtactttgggaggccaaggcaggcagattgcttaaggtcaagagtttaagaccagcctggccaacatggtgaaactccgtctcctccgtctctactaaaaaaaaaaaaaaaaaagaaaaagaaaaattagccaggcgtggtggtgtgcacctgtaagcccagctactcaggaggctgagacaggagaatagctcaaacctgggaggcaaaggctgcagtgagccgagatggtaccactggactccaaccggggcaacagagggagactgtgtcaaaaaaaaaaaaaaaaaaaggaaaggaaaggaaggcaagggaagagaagggaggggaagggaggggaggggaggggagaaagaaggaaagaaaggaaggagggaggaaaaaagaggaaggaaggaaggaagaaagaaaaagaaagaaaggagaaaggaaaaaaattaaaaatgaaaaaaattggttgcatatctaatctcattgttgagtgttaagggttctttatatattctggttacaaatcctttaccaaatttgtggtttgcaaatactttctcccagttctatggcttgttgtttcctcaataatcttttgaagaggaaaaagtgtttaagttggatgaagtttgatttatctattttcttttatgcttttggtatcatatctaggaaatctttgcctactctaaagtcacagggattttcttctacgttttcttccaaaaggtttttagtttgagctcttacatttagggctataatgcattttgaggtaattttcatgtttggtgagaaataaggctctaaccctaaattttgtggaagcgtttgtttgttttattttgttttgcatttgaatagtccccacccgcccccccccccaacgaaatttccttggcattttgttgaaaatcaactgagcataaatttaaggttttatttctggatcttctattttgttccactgatctgcatctctgtctttacgccaaagcctcactgacttattacactagcttgatagcaggatggctaacgtttcctggtttgcctgggacttccccagttttaaaacagaaagtttcacatttcagatattcctgcagttctgggtaaaccaggacggttgttcaccctactttagaataaattttaaaatcaggtagtaagtcctccaattttgtctttcttttccaaaattgcttgggctattctaggtcctctgcatttctatataaattttaaagtcagcttgtcaatttgtatttaaaaaaaaaaaaacttgcctagatttcgataggggttgcattgaacctataggtctctttgggggagaatcttgcatccttttttaacagttgtgtaatattccactgcatgcttggaccacagtttctttagccaaccctttgtcattgaacctgtaagctgtttccattctgttacaaaacagtgttgcaaagaacgtcttgaacgtgtttctttgtgtgcctgagtctttccttcagctgaattccttcacccacagaagtgaagttgacaggttgcacttaaaatgttaatagaactgtcatgttaccttccaaaaatattttaccagtttatgcctctcatcaaatccctagacagagtgcaaaaatctgactggccaacccagctaatgggttgtctccttttggttgggagtcctgcgtaatctgatcagtgaaggaatgttctcttgggcaaagttgggtggatcaggagagatggacatccctggtgcacggaaggccctgctgtggctaacctagcttcgttccatacagggcaccttggtaagtactctaaaggaggtaaaacctactgtcttcattggagtgcctcaaatttgggagaagatacatgagatggtgaagaaaaatagtgccaagtccatgggcttgaagaagaaggcattcgtgtgggcaagaaacattggcttcaaggtcaactcaaaaaagatgttggggtaggtggagcatccagagggctgggagggtagttggtgaggaggctcagccttctccagtgggtcccatcagcccttctccacttgacggcattcttattcacaggaaatataatactcccgtgagctaccgcatggctaagactctcgtgttcagcaaagtcaagacatcccttggcttggatcactgtcactcttttatcagtgggactgcgcccctcaaccaagagactgccgagttctttctaagcttggacatacctataggcgagttgtatgggttgagtgagagctcgggaccccacacgatatccaaccagaataactacaggcttctaaggtaccagcccccggggcagacccctgctcctcccataacatggggtcaagagggggaaggtgggtggatagatgggcctctgggttaagaggaatcctgacgtggtgtctccagaatgatcctgttctccagcctccaagtcctaactccgcatgaccgtgggaaaccctggatggtaagagagcccacagataagggggatggctctctgaacattccatggtctccccgtttgtcacttgtgagttctgccttcaaggtcaccgcctgtgacctcagcacctttcatccccatgatcctccatctcaaaacacctccatggccgattcctggctttctcccaagctcagcttgccctaggctgcaaggttgaacccaatgataagaaaactttaagaataccaaattgaggttcaactccccatctgagagctgtcagtcatagaatcttctggttgtgtctctccctgactccctccttttagcatgggtgaggtttgaaaaaatcttttcatacatgtgtttatttattaaattttaattagagatagggtctcactttgttgcccaggctggagtgcaatggtacaatcatagatcactgtaaccttgaacttctggattcaagcattcctcctgcctcagcctcccaactagctaggactacacgcatgagcctccatgcttggcaattctgtaaaagtttttttgtagagatggggtcttgccatgttgcctaggctggccttgaattcctggactcaagcaatcctcagcctcccaaagcgctgggattacaggcatgaaccaccatgcccagcattgccatacatttaaaagtcatttgtacttcctttcctatgagctgtctgtccatattatctgcctgttttaaaaattagattattggtccctttattattggtttgttggcactctttacatattaggaaaatcagccctttgtctttcatatgagttacaaatattttatcccctggcttgtcattggtattttgattttagttaagatgttttttactgtgcagaaatttgtggtcacaaatttagatggttgaacttatcgatctcttatggcttctggatttttctatatacctaaaaaggcttcagtgggggaaatcataaggcagctctttgtaagttttaaatttctcaggtctgtcttcattttttcttttgctaaccaggggaatacctacatttaaccctgggaccattggccttgctaactgttaatcaaagagatctcagcaacacacggagaaaatatttcctttcctgcatcctagaactgcactggccagtgctatctctaggaaaaaaaaaaaaaaagacaaagaacccagatttcaaatagtgctactctgttttatgaaagtaacttttacctctaaagagattgtagttggttgccgtacttaaaattagctgtcctaatcactgcagagaggtctacctgttttctttaaaatgagggttttgttcctatctttaagccaaaggcatttttttctttgccggcatatgtggagatgaaaaaaaaaaaaaaaaaaaaaaaaaaaaaaaaaaaaaaaacgaaaaacagcctgcaatgctgctggattttctttcattttttgtttttgtttttgtttttgttttttgagacagagtcttgctctgtcgcccaggctggagtacagtggcgtgatcactactcactgcagccttgacctcctgggctcaggtgattctcccacctcagcctcccaagtagctgggaccacaggtatgtaccaccatgcccaacttttattttttattatttttgtagagacggggtctccgtatgttgcccaggttggtcttggaactcctgggctcgagcaatattccctcctcggctttccaaagtgttaagattacaggtgtgagccaccacacctggccactgctaggtttcccagttcacaaagcctttgggaatctgacacgctggattaaacactgcagcaaacacctccttctgtgcgctggggtgcatatccagcctgctctagctgagcagagtattaggcacctaggctgaagatccaggcagagctgggtggctgactttgtccctatgagcctgtttctctgcttctgtcccctggcagctgtggcaagatcttgactgggtgtaagaatatgctgttccagcagaacaaggatggcattggggagatctgcctctggggtaggcacatcttcatgggctatctggaaagtgagactgaaactacagaggccatcgatgatgaaggctggctacactctggggatctgggccagctggacggtctgggtttcctctatgtcaccggccacatcaaaggtaccaggggctgagctctttgggaatctcctgcaagcaggcccaccctgaacatttaagggcccagggtaccagcacgaaggccacccccagttcctcaccttccaagaggagctgtgcagaaactcctcagtctgtacaacccagctctatcctcctgtccagcaaacagttaccccttggtcacttggtatcccgtggtccaccctcaggaggatggacctgcaaaagacaagccttggaacctcctgaagcccctttcagaatagcaccagcccagaggaaaactcagtaagagaaggataaagaaattccttgtgacatcattttggcacctggatccagccatatctgaaagccaaagaccttttgaacttttcagttatattgagccaacagttttacttttttttttttttaactcaaactcattcaagctggttcaaatgggcttgagtaaaaaagtgccatcttctcctgcattttaagaggataataatcgacagagttgtaaggattgaagaaagtatagaacaaggataagccaacttttcctgaagagggccctttagtaaatatttttgggttcacaaaacatgtgtctctgttgtagcttctcaactctgtgatttgtagcacaaaaacagctgttgacaacacataaagaatgggtgtggccagctgccaatatgaatatcataatttttatgtgtcaaaaaaaattcttcttttgacttccaacaacttaaaaatgtaaaattcatttttagcttttggttatacaaaattgaatagtggcctggatttggccactatgggccatagtttgccaaaatctgatggagaacacttagtgcttttttactcaaacccatttaagatgggtttaaataggtttgaggaaaaaaataaaaagcaaaactgttgactcaacgtaactgaaaaggtcagttggccaaaaggtcagctggcttcaggcatggctggatctgggtgccaaaatgaggtcataaggaattttaaaattcttttcttgagttttcctctgtgctggtactattttatttttcagagaaggtctcgctctgttggccaggctggaatgcagtggtccaattatgactcactgtggcctcaacttcccaggctcaggtgattctcccacctcagcctcctgagtaactaggactacaggcgtgtgccaccacacccggctatttttttgcagagacccaatttcactgtgttgcccaggttggtctagcacttgtgggctcaagtgatctgcccacctcagcctcccaaagtggcaggattacaggtgtgagccactgtgcctggccactaggtttttttttttttttttttgagatggtgtttcactcttgttgcccaggttggagtgcggtggcatgatctcagctcactgcaacctccgcctcccaggttcaagtgattctcctgcctcaacctcccgagtagctgggattacaggtgcacaccaccaaacctggctaatttttgtatatttagtagagacggggtttcaccatgttggccaggctggtctcaaactgggggttccacgttgtcatggctggacatgtaccaagccaagctctgttccagaaatccttatcactgctggtggtgaaaatgtgccccccattcctgttgagaccttggttaagaagaagatccccatcatcagtaacgccatgttagtaggagataaactgaagtttctgagcatgttgctgacgctgaaggtaacatgggtttgctgtcattgggggaagtctctgcagccggtcttgggttccctggccccaccccagggtcaagaggatgcatctgtgggttcaagacccacttcttggtctgtgggcctggggaggggtgctggtcaaggagcatgggtggtgacagaggtgtctgggggcagtgtgagatgaatcagatgagcggagaacctctggacaagctgaacttcgaggccatcaacttctgtcggggtctgggcagccaggcatccaccgtgactgagattgtgaagcagcaagaccccctggtctacaaggccatccagcaaggcatcaatgctgtgaaccaggaagccatgaacaatgcacagaggattgaaaagtgggtcatcttggagaaggacttttccatctatggtggagagctaggtgagtggccatgacatttggaggctggtcccttgttagcatctgggactgtgtgggctctgaagagacaggtccttttctgaaggtcagagggtctatgaaaccagccagggaccaggagagggaggctgccaccttcagctaactggtccccagctcctcatcttggaaataaaatccaacctccttactatagctctatacaatctctcgcctgctgacctttcattcactctgcaccaactctatgggctttcttgatgttcctgcagctctctgggctttgtccaactatagggcctttgcacctgccagtctgcctccctgggaatacccttccccctcaattccttgcctggatggcttcttctcattgtccaggtctcaccctacaggcctcttccccctcagagcagccttgttacaggacccccaggtttgtatgcccactgcacagtaatataccaatacactgagacagcaggggatgcagcaaagacagagtttaattatggccaggcacagtggctcacgcctgtaatcccaacactttgggaggctgagttgggcagactgcttgagcccaggagtttgagaccaacctgggcaacatggtgaaatcctaactctacacaaaatacaaaaattagctgggtatggtagcggtgcccagctactcaggagactgagaggatcgcttgagcccagggaggtcaaggctgcagtgagccacaatcatgccagtgcactccagcctaggcaatgcagtgagaccctgtctcaaaaacaaaaaacaaacaaacaaaaataaaaaaggaaattaaattcccttgcagggaagccaaccgagatggaaggaaccctcaaatctctctttgaggaattctgggctggggttttaaggggatctttgggggtgaagggctggaaaattagagtcattgattggttgaggtaaaggggatgaaatcatcggatgtggaagctgcattctttggtaagtcagctcccgtggggtccttcagatcagtgggcatcagtagtttcactggtatgcaggacttgaaaggatatctcagatggaaaacttgacctttcacaatgcttaatatgttatctgtagagcagttaaggggaactatatcttgtgattgggttttttgtgtgtgtgtgattctggggcaataggcaaacagctagctatgaggaaggggttagagagcaaactgacctaatgatgaatgttgagtgtgctgtaagtgtggctgattttagtttgtccccctcccttcttctctgattaatattataaagttttcagggatggtttcagccctccctgaccatgctggctaaagtggcttgccatcgtccttaatatttcacccagtagcttgctgccacccccattataccaccctgtcttctttaaagcatcagaacatgaaattagtctctgtatgttttatttttgcctctcttcccccatgagggaagggctcactccagagtggggatactggattctactaatgtactttcatttgcgagtttgctgtcagcgctcggctgtaatctgacggtgtggatggaagaatcagagcaagtatgtggcaatgaacaacctgggttcaaatcctgtcccctctacacagggaagtgacttgtcccactgagtcttgttttttttttgtttgttttgagacagagtcttgctctgttacccaggttggagtacgatggcacaatcacagcttgctgctgcagccttgaactcccaggctcaagcgatcctcccacctcagcctcctgagtagctgggatgagtgcgcgccaccatgcgtggctattttctttctttctttctttcttttttttttttgagacggagttttactctgtcgccaggctggagtgcagtggcgcaatctcggctcactgcaacctccacttcccaggttcaagcgattttcctgcctcagcctcccgagtagctgggactacaggtgcgtgccaccacgtccagctaattttttgtatttttagtagagacagggtttcaccattttggccaggatggtcttgatctcttgacctcgtgatcaacccgccttggcctcccaaagtgctgggattacaggcgtgagccaccgtgcctggccgctatcctctttttgttttgtagagatggtgttttgccatgttgtccaggctggtggtcttctcatctataagttgaaaacacagtccttgtggggttgcttgagacacccagaggggcttcaatgcccctggtgactcagaggctttcaatgaaagtcctgggctcagggagcagacaactcccagtttgagacttgattctgccgtgcacttgctggctgacctcagaggaactggtcctctctatgccccagtttcctcacctgtaaaatggggataggggtatggtttgagatgatgatatccctcctccattgggtgcacagtccacatcaggcacagaatgcaccatgctcttcaccttccagctcacagaatcctcaccacagctgaaggatcacatggaagttttatcatccccatacagatggcaaaagttacacaccctgaaagtcaatggcacagccagccacccagcctagccccaggcatgggactctgttgcctggtcatgcatgggtgtgtgtaattttcttttatctccacaactcaattgatttctcctttctcgataggtccaatgatgaaacttaagagacattttgtagcccagaaatacaaaaaacaaattgatcacatgtaccactgactgctttgatggagctgctctcagctgttctgatggtgagattcagttgcttggctttgctgggctatgcattcagagtccaagagagggctccactgtgtggcaggcagatctgtgactggaactgcagaaaacacacacatacacacatacatacacacacacacacacacacacacacacacacacacacactcttagttgcagtggattctgagtagcaggcttcaactcatgctgtctctactctaccagggtcatggtagggtgtgtaaactccttcagctggccaccaatgttgttagctgtgcttcctgccttttctatttgtttctagaaagtaggaggcaatgaatcccaaatgtctcattgggtcttatttggagaaggcctttgtcagaaactttagtggagaaagttctacttgccaggaactcaaggaatgaggtgtgttggcccattacacagataataagggatggaggcttgaacttccactatccaccgtttatcctctcttttccccaagacatgtgcagagggagcctccatgacaccatgaatcactgatagttattgaggtgttttttttttttttcttcactagatgcacagtgcaggcagaaagtagaatgcatcttcaattgtcctataggctgcctgtaaccttttcatgggcaacttgttctaatgccaccagccaacccatgttttagtttgctggggctacattacaaagtaccacagactggagggcttaaacaacataaacttattgtctcacagatctggaggctaaaagtgtgagattgagaggctggctggcttggttccttctgagggctgtgaggggaggatccattccagacttctctccttggcttgctgatggctgtcttctctctctgtcttcacatcatcttccctctgggtgtcactgtgttcaaatttcccttttatagggacaggttagtaagattagggcccacccttatgacctcgttttaacttctataatgatctagtttccaaataagttacaccctgaagtactaaaggttaggacttcaacatgtgaattgtggagggatacaactcagcttgtaactcatcatatccattgtcctttgttcaacgttaactggtttaacccttccacaccttcatttgttgatgtcttgtgggtgggcccagcagttcaacgtaccacattcataattcttcatctttcacaagatttccaatttcactttccagttgaatgagaaaccattggacattgatgtgggagtgagagatggaccctcttacaccagtgctgtccaatatggcagccactggccactatgtggtctgtccaaaccaagatgtgctgtaatacataaaacacactgggcttcaaaagcacagcaccaaaaaaaaaaaaaaaaaaaaaaaaatagaatatacaatatctcatcagtattttaaaattttgattacatgttgagatgatattttggaataccgggttacgtaaaatatttattattaaaagtaattttaccagttttaaatttttatttactttttagagacagggtcttgctctgttgctcaggctagagtgcagtggtgcattcatacctaatgttttaaatgtttttgtagagatgaggtatttctatgttgcccaggttggtctcaaactcctggcctcaagcgatcctcctgcttcagcttcacaaagtgctgtgattacaagtgtgagccactgtgcctggccaagttccttttttaaaaatgtagctgctatacattgttaaattgcataggtggctccagtaatgtttcttgtggatagtgccactctaaagttcattgtggggagattttgggtgacagccaatttataaatggatcgattcactcgggaatattttcatcatatggtgactgtgggatcttggagactgaatgcacatattacgagaatccccatgtgataacttgtgtttctcctctttgcagccttcagcaggaagacctcattgcaataagtgaaatgctgctctaggtagaagctctccctgctgtttttaagaagccacattcctcattggtcagtttcttgattgttcgtctgttggagaggtgctccctagaagaacctgccatacgtttcaaagcaataaaatcactgtatatctttctaaggaccttcaagtcatgactccagggaagcctattgggaagtctactaaaaactgcctgatttacaagaaagacctgaacttgtgggctcccatttgatttttttctcctcaggggactcagacattagaaagaaaaagcctcacagatttgaagaactggacccccaaatcaactcacctgcctggaagcaactgggaaacccttccaataagtcctgataataaagcacttcagggtcccatgtcttga
